United States Patent Application Publication US 2026/0191916 A1 - sequence listing, part 75

SEQ ID NO: 541 - DNA, 5107094 bp, Hungatella hathewayii (residues 3,404,731-5,107,094 of 5,107,094)
  source 1..5107094: mol_type = genomic DNA
atccacggcggtcatgtcatcaaaccgtttcgtcagattttccgcttttatcacgctgttcttcctcccttaccatagatttttgtcccttccagtcctcggcgacccagcagtgaaccttatcttccgtcaccccggcatttctcgcctccaacagccagctccccagctccttccggagttcgctcaccttcagagcccgaatggaactcgtatccgatacaaagcttccccgtccctttacggaatagataaagccgcgtcgttccagttccgcataagcccgctgtatcgtattgggatttatggacaattccgtcgccagactcctgactgacggaagctggctgtcctgttctaagaccccgcatatcatcaggtcctgcagtttctccacgacctgctcgtaaatcggtctgcggtctttataatccagcagaatcatatggcacctcctatactgtattagtacatctaatacacttagtatacacaaacacctccggtttgtcaaccggaggtgctgaaaaaagaaataacaggagcagatccttagttccgtctgtcttccactatcagaattctgatggcatcctgagaattgttccagttgaacacatagagtgtataggaaacatttcccctgatgtaaatgttggaggtcagcagcggacttcccgaaaacgacgtgctgttggagacggaaaccgtgtagtatccggccggcagatagcggaagctggtaacctcgcggtaattcacattctggaatgtaactgcaccgccgtttaacgtcacattgacgctgcggttggtgttggataaattgcatacgcggaagcatcccgtattcaggccgccgttgcagttagaatctgtaatctccattaagtccaggccgctgttggtattgatgatggctacggtcaccgcgccgtttaacggcacattgatctgcttctggatatagacgtagccgttctgtcccgatacggtaaccgtctgcatgccggaggacacacggccgtactggctgacctccgcattgtccagaccgttcactaccatctgattgttgatgtaaatgatgaatgggttatatccggcggcggcatttaagaaccggacgacgccgtactgagtggtgctgcagaagtaacagggaatgatcggtctcgggaaaacggtaataatcgatccccagatcccattgttcggcctgttgggaaaagtcgggagcggtccgccctctccgggattcggcagcggaatgaccggtgtctggccattgtcaaaatcaggaatgggtcctccttctccgggattcggcagcggaaccaccgggaaattgccttccgcttctccatcgggtaccggtccgccttcgcctgggtttggcagcggaaccactggtgtatctgcgtcattctgcatataagataaagtgtccatattgcccctcttttatgtttattatactttaagtttattccaccttatcttcccagtgcctgtaccggaacaaatttctcttaattttcgcaaaatcctgtctaaacggcagtctccgcagccatccccggattatttctgcccataagcctgcgcagacgccccatcacatagcggtaagccggaatcaggaacaggtccgcagccacccaggcaatgggattggcaaagcataccgccgcgtatccaaagaacggaacgagacagaaaccgacaaaggatctggccgccatctcacagacgcctgcgataatggcaaacttggagtaacccagtccctgaatcgtaaatctcacaatattaaccagcgccagcgggaaatagaacagactgttggcaatcaggaactgcctcgtgtttgccagaatctcagtctccccggcatccacaaacagaagagccaccacgtcgctgaacagccagagcccggccagcgcaatcaccgaatagaccgcgccgatgataatacaggatttaattcctttatcgattcggtccagccgcctggctcccacgttctgtccgctgtaggtggccatggtggcccccatggcgtcaaagggacagcagaaaaacatgctgatcttacttcctgccgtcacggaggcgacagcgaccgatcctaaggagttcaccgccgtctgcaggatcacgcttccaatggccgtaatggagtactgaagccccatggggattcccatgccgcacagcgtcaccatggcattcttatccggcttccactcatccccctgcatctttaatatcgtaaacttctttctcatatagagcagacagaggattcctgagacgccctgagagatcaccgtcgcccaggcggctcccgccacccccatatgcaggacgagtatggtaaagaaatccaggataatgttcatgaccgaggacaccagcaggaaaaagagcggcgtcgtgctgtctcccagcgatcggataattcccgacagaatgttataaaggtatgtagccggtattcccataaatatgatgataatataggaatacgccccatcgatgatatcctccggcgtattcatccagatcagaatgttccggcacagcacacagaccacggccgtcatggtaaccgaaaagatcagggacagccagccaccgttggcaacaaaccgccggagggccacctcattcttctctccgaacttctgtgccaccggaatcgcaaagccgctgcacacaccgatgcagaacccgatgatcataaaattaatcgagccggtggagcccactgcggccaatgcgttaacgcccagatactttccaacgataatggtgtcaaccatattatacagctgctgaaacagcagaccgaacagcatgggaatcaaaaagctcaagatcagctttaccggcgatccggttgtcatatcctttgtctgcttctttgccatcgtttccgtcctcacttatttattcagattttcagttcttcgcaccacagaatcatgatgctacatcatcataatttacactcagtggagcgattttgcaagtgaaatttttccattttctgttggattttcgattttcgtgaattttatcacatagaagtactttcctatgatatcaaaaaacgcccgggcgtattgcccgggcgcattccttcaaatcttatttatcaccgtacagtgtaacaagctttgtcagatattcatatctttccttcgcatctgcctcgttcttagcgaacaggtcagctgctctctcaggattcttcatagctaaggaagcgtaacgaacctcgccctttaagaattcctgataatctcctgtcggagccttgctgtccagagtaaatttcttctcagcagccgggttgaaacggaagttattccagtaaccacactcaacagccagcttctcttctgtctgagccttgctcatgcccttcttgataccatggttgatacaaggagcgtaagcaatgattaaggacggtcccggataagcctctgcctctgcgatggccttaacggtctgcgcatagtcagcacccatggagatctgtgctacgtatacatagccatagctcattgcgatgcttgcaaggtctttcttcttaacgtcttttccgcctgcagcgaactgtgcaaccgcaccggtcttggtagccttggaagcctgtccgcctgtgttggagtatacttcggtatcgtataccatgatgttgatatccttgccgcttgcaagtacgtggtcaacaccgccgaagccgatatcgtaagcccatccgtcaccaccgaatacccactgggacttcttggctaagaaatctttgtcttttacgatggccttgcaggtctcgcagtcacagccctctaacgctgccactaacttgtctgttgcaatgccgttggttgcgccgcatccgaaggtatctaagtactctttgcatgctgcttttacttcctcagaagctgcatcagagttcataacggactcaacttttgcctttaagccgtctctgatcgcgttctgagctaataacataccgtaaccgaactcagcattatcctcgaataaggagttggaccatgccggaccctgtcccttttcgtttactgtgtaaggtgtggacggtgaagagttaccccagatagaagaacatcctgttgcattggcgatgtacattctgtcaccgaataactgtgtgattaattttgcgtaaggagtctcgccgcagcctgcacatgcacctgagaattcaagtaacggctgtttgaactggcttcccttaacagtagtaggtttgaatttatcgattacttcctgcttgatcgaaacggtctggccgaagtcatataccttctgagcatctgcgtagtttgcttccatgttgaccatggtaagagccttctcgcccttctttccaggacatacgttcgcacaggagccgcatccggtacagtcaagagcagataccgtgatagcaaacttgtagccaggcatacctgtcatgtcaagcatcttcattccttccggagcatttgcagcctcttctgctgtcatggcaaccgggcggataactgcatgaggacaaacgtaagaacagaagttacactggatacagttgtcaggattccatgcagggatgttcactgcgataccacgcttctcatatgcggaagaaccggatggtgtggaaccgtctacatactctgtaaatgcggatactggtaaggaatcaccctcctgagcgcttaccttagcctggatgttgttaacgaagtccacaacgtccttgcggccgctggttgcatgagtcatgtcaagaccttcgtctgtgcaggacttccagctctccggaacctctaccttaacaacgcccttagcgcctgcgtcgatcgcagcccagttcttcataacaacgtcttcgcccttacgtccgtaggtagcctttgcagctgccttcatcagttcgtttgccttctcagcaggaataattcctgttaactcgaagaatgcggactgtaagattgtgttgatacgtgtcgggcccatgccggtctcgataccgatcttcacaccgtcgatggtgtagaagttgatgttgtgatcagcgatgaacttcttaacctgtcccggtaaatgcttctcaaggccttctgcatcccatgggcagttcagtaagaatgtaccgccatccactaattcctgaaccatgttgtacttgcgtacataggacggattatggcatgcaacgaagttagccttatgaattaaataagtagatttaatcggcttatgtccgaaacgtaagtgggacatggtaacaccgccggacttcttggagtcataatcgaagtaagcctgagcgtacatatctgtgttgtcaccgatgatcttgatggagttcttgttggcacctacggtaccgtcagcaccgagaccccagaacttacagtttgttgttccttccggagttgtaaccagaggagcgcctgtctcaagggataaatgagtcacatcatcgttgatgccgatggtgaacggtgtctttgtctcgttattaaatacagcaacgatctgagccggtgttgtatccttggagcctaagccgtaacgtccggttaagatcttaacctggtcgaacttcgttcctcttaaagcagccactacgtctaagtataacggctcgccaagggatcccggctcttttgttctgtctaatacggagatcgtcttaacggtatccgggattgcttccacaagagcgtcagcgcagaatggtctgtaaaggcgaaccttaacaacaccaaccttctgtccctgtgctaccatgtagtcgatggtctcttcgatggtatcattgacagagcccatggatacgattacgtgctctgcatccggagcgccgtagtagttgaacagcttgtaatcagtaccgatcttctcgttgatcttgtccatgtacttctggacgatagccggtaatgcttcgtaatatgggttacatgcctctcttgcctggaagaagatatccggattctgagcagaacctctctggcatgggtggtttggatttaatgcgtggcggcggaactcgtccacagcctccatgttaaccatctcttttaaatcttcataatcccaggtctcaaccttctggatctcatgagatgtacggaaaccgtcaaagaagttgatgaacggaacttttccttcaagagctgccatatgtgcaacaggagttaaatccataacttcctgaacgctggattcgcataacattgcgcagccggtctgacggcatgcgtatacgtcggagtggtcaccaaagattgataacgcatggcttgcaactgcacgtgcagaaacgttgaatacgcccggtaactgctcgcctgcgattttataaaggttcgggatcattaataacagaccctgggatgctgtgtaggtggtggtcagcgcacctgcagataaggatccgtgaacagcacctgctgcacctgcctcagactgcatctctgtaatctgtactgtatgaccgaagatgttggttcttccgtcggttgcccattcatctgaagcttccgccataggtgaggatggggtaatcggatagatagccgctacatcagtaaatgcatacgatgcatgtgctgctgcatggttaccatccatggttttcatttttcttgccatttttgatttcctcctacaaatgtgaatattgtatagtttggttccccgaagggatagtgacctgcttactattataacaattatttaacaaattgcaaataagaaaaaaggaaaataacgtactattttacgaacaattccgggaaatgaaaaaaactgcccgctgccggcggccaactgtcctgttcataacagaaaaaggaccggatctcctgtctgatccggtccatatatcgtctttcaactaagcggactcggcggaaccacattctgtcccggactgtttccgctgcctccacccggcccctccggctgtactgcctgggtcgtggtcggctgtgccgccgatgtcggctgctctcccggtccctgtcccggaaccgtatccggctgtgccgtggtcggctgtgtcggcgctgtcgtcgtcggggtatccgccccgccggaaggtaacgtctcgccttccgaggatgagatggtgctctctccggaagcagactcatccgtggcaggtaccaccacaccagaagtattgcgcctgattgtggcaggcttgccgcggtacgtgctgttatggaagaattcgtcgcttaccacgacgccgtccttcttcgtgaccatgttcgtcacccagcggcttccctttgtctccgccttcacaatcttctcctctcccggctgaagcgtctggtcttcttcatagaccggtgccggagcatccaactcagccgtcttcttggaggtcatggagagcgtgactcccttttccagaatcggaataccgacaatggaaatctttaacttccggtctgcaaagctggccctgatggcaatcgccgtcgaagaggtattgacaaatttcatatcaggtcctccgaagcttaccatggcatcctcgcccggcgttacgtaagagggttcatagctgtgcgcatggcgctctgtcgtcgtaagacctgaaaaaataaccgcgttgtaaagtgtggaggaaacctggcatactccgccgcccggctcttcaaccagttccccgttaacataggctcccgccggccggtaccccttggcctccgagcgctctcccgtcgccttgttaaaggagaattcctcgcccggctgcaggattaagccgttaagggcctcggccgccagctcgatgttcttgttcctgtctttgttggctgtggtggtggtggtataggtaccaatcacctgatacagctccttggcctgcgccaccgtaatctccggagccgtctccctgcccgtggcttcgatcacggcgctgaaattcttattctttaactgagccagtatgtcagaaaccagtttctcctggtcgatcacaaatccgttttgctctccggagtagataaactttcctgcttccttgtcgaagccggacaccgaaccgtttttggccttcacgtcccacttggcggcagccttcttcgcttcttccgcagccgcgtcttccagtccgctcatatccagggtatagctttccttcggctcacccgtatagatatctcccagaagagaatccacctttgtctccagcaaatcagcgacctcatacgtatcatccttatacgtaaccttcatgccccactcatacttgtccagtatggcctttttcgcctgttccctggacattccggtgatggatatcccatctacggaaacttccttctggagctccgtctccggctcgctggtcgtctcaccagtctccgcttcagccggtttgcttcccacaaacttcacggcggccataattacaatcacggcaaccaccgcgataagaattcccagcagaatctttgttatatcgtactgcggacgcttctttctcttcgaacctcttccggaaccgctccgcggctggtaggagctcttatatcttgaggactgccccctgcttccctgacctgtctttctggaagttcccgttcccgtcttccgcgttccctgagaggaataagatcttgacgttccgctctgtctgttgcctgtctgactcatctatttcaccttttcacatgatagtgtatattacattgagtagtataccatactttgtgggaaatgctattacaaatttatgaattttcttaattatttttcgtcgcttttctacattttacagaacgtaaaaaacatgttactatagtattactaaagtatttcaaattggaggtaatcatggaacttatcgatctgcacgttcattccaacgcctcggatggaacgctctccccagccgcggtggtcgctctggccgcagaaaaaggactggctgccatcgctctgaccgaccacgacaccatagccggcatcccgcaggccatagacgccgcccgcggccttcccatcgagattattcccggcatcgagctctcctgccactacgagggagaagagatccatgttctgggactgtatgttaatccggaggatcccgcatttcttcgggaaaccgaccgccttctcatactgcgcgaaaagcgcaacgacgagatgatccgccgtttttcggaggatggcatggtcatgaccagagaagagctcaccgccggcaatcccgacacggtcataacaagggcccacttcgcccgcgtcatgatggaaaaagggtacgtttcctctatggatcaggcattcaaaaaatatttaaaatacggcggacgctggtgccccaaaaaagagaccatcgaaccttcccgcgcactgagcatcctgaccggctgcggagcgtcaccggtactcgcccatccgtatcagtaccatctgggcgatgcaaagctggaagaactgatcgtttccttaaaggaaaacggactggccggcctcgaggtctaccactcgtctaataatcagtatgaaagcgggaagcttaagaatcttgccgtgaagtacggcctgttcccaaccggcggttccgactttcacggtgccaataagccggatatcgccatcggatgcggccgcggcagcctgcgcatctccgccctgcttctggacgacatcaagaaggcgagaacaaaaaacttatcgtaagaaaggatttttattatggaagaattatacagaacaattgaagaaacgatacggaacagcggctgtccgttccctgccgacggcgaagagatttacaacgaaatctgcgacgagatcgagaacagggaaccgggcgcctacgtctttttctccaaaaagacggatgatgtgttttttgaatacagactgcagatttttgaggacaactttaacttaagcagcatcgacgtccatatcaaagaccagaattaccacgttgattttgattgaccccaagcagtcattcctccatcgaaaagactgccgccggctgctccctcgtaccgcgatctgccagccacagatccgtcagggagtatcttatctctccctgataaccaaccgtagtctccgccatggccagagaattcaacacggcttcttctaccgcttccgccgcggccgtaaaggccgtgtccagggagctttcttttaagacccggatcgtcagtacttcctgatccgtgctttccggaatccggttcgccgtggtaaagccaatcataatgtccccgcttccgtgtcccataaaggaaccggtccggctgagccccactccggctctcctgatcacgcgcttcaactgccggtcggaaagcggcagatccgtcgcgatcaccgtcatgatggacccccggtctaaatcagccggttttatctttttctccagtgctcttcccaccggttcgccgcagatcaccagattcttcgtacttccaaaattcgactgtaccagggcgccgaccgtatacgtgcttcctccggcggtaaactgcctggatgcggaaccgatcccgccctttaagccgaagcagacggttcccgttcctgcaccgacagccccctcttcaaaatcccgtttcgcatcccggactgccgaacggacttcgttaagtccgatgatcctctcccggatcatgtttaggcccgaatcattgcattctcccaccaccggattgatggtggtaacctgaatcccttcacgctcacactgttccgacatcagatcgaccacagcgtcatgcacctttcccacattaagcgtattggtcaatgcgataaaagtctccagcgtccccagttcttcaatctgaaccagtccctggctctttccaaagccgttatggatgtaggcggcggctgtcagcttttttcggtagggattgtcttcacacggcagaatcacggtaactcccgtcttatgttctgccgtattcacggcagcgtgccccaccgtcacgcctgccacatcgctgatcttattgaggggcccgggcgtcatatcgcccggtatgattccgtatgcccggatccttttcatcactgtttcctttccacgactaagactgtgctttcacttttccccggttctttttctgctcctgattcttcttttccagcctcgcataaaccgttcctctcagcagagaatacagcacggagcagagcgggataaagatcagcattcccacgattcccatggcgctgccgccgatcgtcaccgcaacgagcacccagatagacggaaggcccacggaattccccaccacatggggatagattaagtttccttcaatctgttgaaggataaagaacaccgccacaaacagaagcgcatctaacggtttcaccatcagcatcaggaacgccccgatcacacagccgataaaggctccaaagatgggaatcagcgcagtaaaggcgatgagcacgccgatcagcagtgcataaggcagccgcagcacggacagcgtgaggaagaacatggttcccagaatcaccgcctcgaggcactgtcctgtcaggaaatgggaaaatgtattgtaagccagaccggcaactgacagaacatgttccgtgacacggtccggcagaaacgcccgcatcagcttcttcatctgagccgagagcgtctccttctgcagcagtatatagatggcaaatacaagggcgattccaaaggtggtgacgccgctgacgatggaaaccgctgctgtgatcgtggaattcagcacggtgctggcccctgatgagaggaagccgatcacatcctcggaaaaagacttccagtcaatctggattccgttgatataatccaggatctccggattctgggcaaataaatcttccgcccccttcttcacccctgccaggaataccggaatactgttctgcagactcataaacgtctcaaacagctggggcattacaacgaaaatgactaacagcagcagacccaccacaaacagcagggtaaaaaccaggcctatgggacggcgcagtctgctgttttccttcatgggaagcattttctcaatcctgcgcatggggacgtttaagataaacgccatgacgccacccagtaaaaacggtgagatgaatccgaaaagcatcataaacacctcaaatacacgccggtagttcacgccgatcaccacgaccaccacggtaaatacgataagccatcgcagcttcttgatgttgctgtcatttaattccataaaattactcctttaccagtcctgtaaatgtctccagaatcgcctgcttcgacgcctgaaaggttccctgagccatcagggcgcttccaccgcctcttccgtttaactctttgtttaaggttttgctgagagccctcatgtctgcgctgctgcttccaatcgcgtactgatagctgccgtccactccggaacagacgaggaccacacttccccttccgccctcgtagagcatggtgcagtactggcgcagctggatcggcgccagcccttcctcgaacaccgctaaaggctcctggctgcactgaaactgctccattctggctgcaaacagctcctggtacagccggttaatcctgccgtcttttattccgttctcgttcttcagcttttccacagtctccacgactctctccggcttggccgagagcatcacggaaagctccgtcaccgtcttctgtttcttccggtaatccttaagggcatccatcccgcagagcatggaaacccggatgccgcctttgtagtggattgcaccggtgatcttaaaaatgccgatctctccggtggacatgacatgggtaccgcagcatgcgcagacatcgctgtcgggaatctcaataattctcacctggccggtcagcgccttcttgcttctgtactccatatgctccagctctccggcggccggatacagttcccggatcggcagattctctgcgattttccggttgacctccgtttcgatctcctctaattcttcggctgtgatcactccgttaaagtcaacagtcacctcctcgcttcccatatgaaatcccacattatcgaacccatactttttatgtaccagtcctgaaaatatatgttcgcctgaatggttctgcatgtatccaaaccgtctttcccagtcgatggttcccgcaacggccgtccctgcctccaggggtccgtccgtctcatggatgatctctcctgccttttcatggacatccagtaccttcaccggtcccagcctcccggtatcccccggctggccgccgccctccggatagaagcctgtccggtccagcatcacctggtacctgccgtttttcccctctctgcagtctgttaccaccgcctcgaacgctttgacatatggctgtctataatataatttttccatagattctcctcttttcccgtttgtaactaattatacacaagtatgggataagttcaatcatatgaattctaaaattttacgaaaaatgtggaaacagtggcaagcagggtcacatacatttaagtgtaaacaatttatttggaggaacaaatatgagtgatctggcagcaacaaattgtggatgtggatgtggctgtgaatgcaacaatggaggaagtggatgcaactttatctggttgatcctgattctgtgctgctgctgtggcggcggcggtggattcgggggcggctgcggctgcggcggcggaagtaactgcggctgcggcggaagcaatggatgcgatttcatctggatcatccttcttctctgctgctgtggcggcggcggtggattctgctgctaatacatgcagaaaaaaccgttccacgaaacataaagactgcggtccggatattccgggccgcagtttttcatttatccgtatccttcagcagggcgggaagcggatcatcaccgcccccgattcttatcctgtcccggtgcggccagcggattttctccatttcctccgcgtccggaatttcttccctgttttctctttacgcactcgtcgtcaatttcatatactgcattgccatctataatcaaacgatttctcatgtttatcactctcctgtaatactaatatatgcggccgcatatattgtcaacaagaaaagtaaggatatcatgttatgaacaacgaaaaaaattcccagccagttgacctggattccttaatcggtgataaccatttacagatgatgaaggccgcacttccctatatgagcgtaacagagcagcgttttatctccctctttgtcaaattcaatgagctccgccgcaccgtgcagctgtttgaagatgaggaggtggctgccatgggcatctgctccaccggagaaagcaccgaaaaaccggcgtcccccattgatatgctgggggccatcaaaccgtttggaacaccgaccgaacaggatttaatcgatctgatcatgaactttttccagggctttaagctggcaagcgcagtatccgacgcggttcccggatccatggtcccggatcccgagcccacggaaaatacggccaggcaggcgcagacaccgcctccgcaccgctccggcgggccgttcgggcgcatgtccttcgatcagatcaaaaattttattcctcaggaacagcagtcccggctggagaccatgcagcttatgatgtctgccatgcagcagatgagctgaccttaacgctacatatcactataaaagaatgaaagaaaggaagaacagcactctatgaatacaaactggaaacaggacccccgcttaaagggcatggatccgcaaaaactcgaactgctgaccacattcgccaaagaggtggaatccgcaccgaaggaccagctgatgtccacgattctcacacttaacctgaaggccaatgaaaaaggcatccatttttccgatcaggagacggaactgctcgtctcgatcctgagcgggggaatgagccccgccgagcggaaacgcatggataccttacgtatgatttctaaaaatttagcaaaacggaaataacattaccggccgttctcctgctccaaccggctgatatcggaaacaatgacgattctggtatcttcatcgacgcttgtcaccagctttttcatgtattcctcgggcaccttgacacagcccgaggtcccggtatcggccgtcccgttcatacagtgcagaaagatcgcggaaccgtttcccggcacacaatcgctgttataatccagtgccagtccataatggtaaaacggaaccatggccgccatatgctccgctgacttccagtctttttttgtgctgcgcgaatccaccagccggttatagtggctgctttccggatcgtccacccagtaatcggtatctgtcagccggtgatacggcagaatactgcccggattttccttcacgccaaacgccatggtaaaacgatacgttccgaggggcgtcttcttgtccccctctttcttatcatccgtcgctccgtttttcccgtatctccccatggtctcaaattcttccgtccagatcccctcttcattcttcgtatggtaggaaaggctgatatccgctcctccctgtcccacaaccaggatcaggctgtccgtttctgaagcggccgctatgttccccatgagctcctgttctccggcgttcttctgctctccggcattctcctgttttgcctctgccttttccgtattcttgtccttcagaccaatgccagggcctttttcctccgggccatcggtccgttcctgcggccggaccgcccgatcttcattcatccgtgcacaggccgttgttcctgcagtgccggagcatgcaaaaaggaccgcccctgtcatgaccagcaaatatctctgatatcgtctcattggtaatttcctccgattatcctgtcttctgctgttattatacacggtacggccctttttgtcatgcctgaacggcaatcttgtaacagtacagacggctcatttccgccgtctgtactgttgcgctattttaatcttacaacatgctgacaatatatgtatacattcttaatctttttagcctgctccccttcttcccccaaaatgatcggctgcgtgccggacggcgtaatgtacagcttaaatgcaattgcatcctggcctaccttcatctgcctgaccggacggtactcgaacgtcctgcgctcaattcccagatattcgtagatggcattctccagatccttatcctcaaagcacctggcaatatcctcctccgcattcatatccagaatcgctttcgcttcctcaaacgtcagatttgcaaaccggaaatccccgtcccccaggacatgggccagagtctcattgtcaagaagcaacaatgggtaacctacactcgactgctccataaaatacctccttcatctccgtttattataacaaatttctcaattatctgctattactattatcatagccatttttctctcttttgtcaatattttctgattattttatacttgttcgttaattatcaaactattatgtttttattttatcatgcaaaaaacacccttcggctgtccgcctccgggtgtctgctgctatttacatacaatattgataattcttcccggcacatagatttccttaacaatcgtacctgtaatcttatctgtaaccagcgccctgccggcctcgatcgcttcctctctggctgtgcctgccgaaagtgttatcaccgcctttgtctttccattcacctggacggcaacggaaatttcatcgtccttcatggcttcctcatcgcacaccggccactgggcatggaaaacggtatcgctgcctcccagctgctgccacaattcttcgccgatatgaggggcaaacggcgcaagcaggatcacaaatgtgcgaagtgtttctctgtcgattccgccggtcttctttgccagttcgatgaatttgttgttgtactccatgaaaccggagatgaccgtatttaaattaaactggttaaaacgctgttcaatatcaaaaatcagcttattgcggagacgcaccatctctcttgtgggttccgtctccctgtctttgctgtccatcacaagattccagaacctgtttaagaaacggctgacaccttcaattcccctgtcatcccattctgcgtccagttccggcggaccgacgaagagctcatacattctcagggaatcacacccgtaatcgcgaaccagctcatccggggataccacatttcccttggacttgctcatcttgattccattcttaccggtgatcatgccctggttaaacagcttcgtaaacggttcgtcaaaatcgatgacaccgatgtcacacaggaatttcgtgtagaacctggagtagagcagatggagtaccgcgtgttccacgcctccgatatacatatcgaccggaagatattgatccgccttttcacgggagacaagctccttttcattatggctgtccacatagcgcaggaagtaccaggaagagccggcccactgaggcatggtgtttgtctcccgcttggccggtgctccgcagaccgggcaggtggtatttacccactcatcgatagcggccagcggggattcccccgttcctgtcggctgatagctttctacttcaggcagtcttaacggaagctgatcctcaggaaccggtacgctgccgcagtgcggacagtgaataatcggaataggctcgccccagtagcgctgcctcgagaatacccagtcgcgcagtttgtaattgaccgtcttctttccgattccacgctcctcgatcatcgccggagcttccctctttaagacggaagactccattccgttccactcgccggaattgatcatgattccgctcgcctcggtgtaagcctgcgtcatatccatgatctccaccccatccctggcaataacctggataatcgggagatcgaatttctttgcaaattcgaaatctctgtcgtcatgggccggtacacacataatagcccctgtaccgtaatcagccagtacatagtcggaaagccagatcggcacctttgcaccgtttaacggattgacggcatagcttcccgtaaacacacccgtcttttccttatcctgaaggcggtccacattggatttcatggaagcttcacagatgtatttctccactgcatctttcgtctccggcacagccaggcccagggccagttcatgctccggagccagcaccatgaaggtcgctccgtaaagcgtatccggtcttgtcgtatagacctttattttttcttcccgtccatctacctggaaatccacttccgcgccataggattttccgatccattcagtctgcatcttcttgaccttctccggccagtccagtttgtccagatcgtcaagcagacggtccgcataggcggtgatctttagcatccactgtcttaaatttttctttgtcaccggtgtctggcagcgttcacagcagccgtttaccacttcttcgttggcaagcccggtcttacaggatggacaccagttaatcggaaattccttctcataggccagccccttcttaaacatctgaacgaagatccactgagtccatttgtaaaagtccggatccgtagtattgacctccatatcccagtcatatacagcggcaatctcattaatctgacgcttaatattggccacgttctcggccgttgattttgccggatgaacgcccatcttaatcgcataattctctgccggaaggccaaaggcatcccatcccatcggatggatgacgtaatgtccttttaatatctgatacctgctccagacatcggagatcacgtaccccctccagtgtcccacatgaagcccgctccccgacgggtacggaaacatatcgagacagtaatacttcggtttcttcccgtcattgacattgatgggattctttttccagttttcgcgccatttcttctcaattgcgctgtggttgtatgatgctgacattatttaccattctcctttctgactgcataatctggaacttcagatatcatggaagcattttcccattatatcaaaaacgcgcctctttcgctgcggccgttcaggccataacgatagagacgcggatttcttccacgcggtaccactctatttcatacagaatctgtatgcgctcatgggatacgtattcatatccttcccatcgtaacggctgggatgccggccgcacctacacaaaagcagcgcttccttcagtgagcaactccaaggcgagttcagccatccttcccaaccggctcgcaccaaccgccggctctctgcatgtttcagacagcttactgttcctcttcacagtatttatgctgactatgaatgtatcacacttgctgtagcgtgtcaaccgctatttatgattttcctccagttcccggcacagaccatgtccggcttaagacaccgatgcccggcgcggccggttaccgtctgcctcccgtttatgagagcaggaacagacccacagacacaaagaaaaacagaatcatgcccagatttaaaaacagggtctcaaaccgcctcccttttgggatcaccaccatcgccggtttccaggagatctcgcggcggtaaataatcagaaaaacgattcccagtacaacggctgcaagcataaagatactatatgccatggcaaaccagatattatccgctgcgtgaagcgctacaattgatcccagaaaattgataatcgcatggaatataatcgtataccgcagctttcctgtattgatataaacgtaagcaaacacaactcccaggccaaatgcatagaaaaactgataaaaattaccgtggctgagtccgaataagactcccgacagaatcaccgccactttatcaccgtaatgagcaacccggtcaatcaacagctttctgtatagaatttcctcaaagatgggagcagccaccaccgtcagcagaaagatcacacgcgtatccagattttcaatcagctcgctgaccggattcacgagaggcttcccctgaattccattcacgatactcatcagaacagttccgatgatattcccgatgtacataatgctaatgcaggcaaaaaaagcaaccaccagcctccccgcaccgaatggctgcttccggggtctgcacggagttcccatatccttcacaatcaaccagcatatcagcgttccgagcaaatacgtgggcagtgatcccagaatcacaatccaggtattccagtctcccatccagcccatacttcccagtactccgagtatcagccccgcttccatctgcagcagaaggcccaccaccaggaaggccgcgtatcccacgcccagccttgaacacgttttctttatttctcttaagtaatccatccggtatttacctcctgactcttctgaacatcacgtttccaagtttatcacatctgtcttctgttgacaaggaaacttggggaatcgcagagaccggtctgtttatattaaaagagacggaacgcacttctgttccgcctctcaatataattcttttcttttttacgtttatgattccgtcctgtcaaccttggacgcgcgctcttctacttcccgcttctgaacatcaccaggagcctgctcgtagcggctgaattcatattcatacgttcccataccgcctgtcatggaacggaggtctgtattgtatccgaacagctcagacatcggaacgtctgcctcgataacctgcttgccgttatggttggaattcatgcccagcacacggccgcgtctgcggtttaagtcacccataacatcaccggtaaacttatccggtacggtaaccttcaaagaagcaatcggctctaacagaaccgggttcgcctccataaagcccttcttaaatgccatggtggccgccatcttaaacgccatctcagaggaatctaccggatgataggatccgtctgtcagtgtcgccttcagaccgacaaccggataagctgcgagaggtcctcttaagacgcactctgcaacgcccttctcaacagccgggaaatagttcttcggaacagctccgccgaatacgctctcctcgaatacgtaaggcgtctccaaatcgccggacggctcaaaggtcatcttgacatcgccgaactgtccatgtccgccggactgcttcttatatcttccctgaacctcaactttctttctgatggtctcacggaacgcaaatttcggtttgctcagctcaatctctactttatagcggtttaacagcttgctgactaccacgtcaagctgctggtcaccaattccgtatatcagggactgatgattctctgtatccgtgaccacctttaaggtccagtcttcctctgtcagcttcgacaatgcgctggataccttgtcatcgtcaccctttgtcttcggtttgtaccgcatatacgtatacggcgtggaaatctccggcttatggtatacaatcggcgcggaacggagagcaatggtatctcccgtctgggttacggataacttggatacagcaccgatatcgccggcttttaattccggaacctcgatcgcgtctttgcctctgagcaggtagatctttccgatcttctcctctgtatccttgtttacgttataaatattggaatccggttttaaggtaccggtacaaatcttcatcagagaatacttaccgataaacggatctacaatcgtcttaaatacacgggcggaaagtgaaacgttatcgttatacttggccgtaaaacgctctcctgtggatacgtccacaccaatacactcgtaacggtccggtgtcgggaagtacttatcaattccctgaagcaccatcttcgcaccctgtgcgttaatgccggatcccagcataaccggtacgatattgccttctattacatattcccgaagtgcagaagaaatctcttcctgggtaaactcgtcgcctgagaaatagcgttccatatactcctcgctcgtctccgcaacagcctccatcagcgcttcacgcgcaatacccaggttcttctgtgaatattcaggaatctcgcattcttcataatcactgttcaccgtaaatctgcggcccgccatctttacgacgttaacaaatccgacgaacttttcattctcacgaatcggaagatggaacggtgcaatctttctgccgaactctttttccagtttcagcagcagttcacggtagcttgcatgatcgtcatccatattcgtaacgaaaataatacgcggcagtttatacttttcacaaagttcccatgccttatatgtaccaacctctatgcctgccttgcagttcaccacaatgaccgcggcgtctgcaacgctgattgcctcttctacttcaccaacaaaatcgaaataccccggagtatccagcaggttaatcttgatcggaccttcttcaccctgatactccagcggaatcagagtcgtagaaatggagaactgtctcttaatctcttccttatcataatcgctgatggtgtttccatcggtgatctttcccattctgctgacagctcctgtaatcagtgccatcgcctctgcgagtgtcgtcttacccgcgcctccgtggccgagtaatacaacgttacggatttgcttggttccatacacgttcataaacattcctcctgttcagtatttaagtctatgaggatattttactaaaagtgtcggaaaattgcaagtagaatgtgcattttgcacaaataattttacttgccaaaatatggggcttttacagggccggacaccaggcggcctgcggcctgcattcacgttcaaactcaaggaaagacgcgtgatacggggtctcattctgctccgcttcgttcgctctgttccagatctttagggcggcctgcagagtgatctccacatcatgatagtaatagatgcccgcctgagtatgggaaactacgtcctcaatcaaaagccttgcatcgtgattttcaaacagaacttcattcaaattattccttgtcagcttcatcgtattgatcttctccttcctgtcaggtttttgcctaccagaacatacgttcttttttctgtttttattgtaccagaacatacgttctttgtcaaccctgttattcatctttgctaatttacgttaaagcgtcaaagtttaacgtataaaagcgttgacaactttcactctttcgattacaatgatgcttaagctatttctgaatacttttaaagagagggaactgatatgattattattatgaaacccaatgcttccgaggaggcagttgggaaaattaaaaacctgatagaatccaaaggcctccaggcgcatctttccaaaggaacggaggtcaccatcgtaggcgttgtcggcgacaagacaaagcttcagggagccaacatcgagatggcggaaggcgtggataagatcgttccggtcaccgagacgtataagctggtcaacaaaaagttccatcccgaggattccgtaatcagagtcggtaatactcatatcggaccaggcaggctgaccatgatggccggcccctgtgccattgaaaaccacgacatggtgatcgagacggcaattgcggtaaagaaggccggtgcggagtttttaagaggcggtgcctacaagcccagaacttccccctatgcatttcagggactggaggaggaaggcctgcagtatatgaaggaagcccgggatgagaccggtcttaatattgtctgtgaggttaccagcctgcgcgccctggagacggcggtaaagtacgtggatatgatccagatcggagcccgcaacatgcagaattttgaactgctcaaggaggccggccgcgccggtattccggtactgttaaagaggggcttatccgcaaccatcgacgaatggctaaatgcggcggagtacattgcctccgaaggcaatccccacatcgtactctgtgagcgcggcatccggacctacgaaaccgctaccagaaacacgctggacatcagcgccgtaccggttatccgagccaagagccaccttcctattatcattgatcccagccacgcaaccggtgtacgcgcctatattgagccgatttccaaagccgcggtcgccgtaggtgcggacggcctgatcgtggaggtccatccgtgcccgtcctgcgcgctgtccgacggcccgcagtcgcttacctttgaacagtttgaacagctgaccgaaaatctaaaaccgtacgcagcgcttgcaggaaggagattttaatgactgattccaccattgcctttatcgggcttggtctcatcggaggctccattgccaggggaatcaagcgtgaaaatccggatacaaagattatggcatacatgcggacccgttccaggctcttaagcgccatggacgaaggtgtgattgatgtgatcctcgatggggcagatgagcagttatcccagtgtgatctcatatttctgtgtacccctgtggaatataacgcccgctatcttgctgaaatcaaaccatttttaaaaccaggcgccatcatcacagacgtgggaagcacgaagactgacatccatgaggaggtcatccggcttgatatggaggactgcttcgtgggaggccatcccatggccgggtccgaaaagacaggatttgagaattccacggaccatctgctggaaaatgcctactacatcatcacccccacccgcaagtcttccccggctgcagtggaacggctgatttccatcgcctcgctgatcggatccatccccatcgttctggactatcacgagcacgattccatcacggcggcaatcagccatctgcctcacgtgattgcttccagcctggtgaatctggtaagagatgccgataatcaggaggggctgatgaaacggctggctgccggcggttttaaggatatcaccagaattgcctcctcgtccccctagatgtgggaacagatctgcatgacaaaccgggcgcctctggccgctgtcctggagcagtatattgcctccttaaacgagacgcttgtaaagctgaggtccggtgacaaccagtatctctcccggctgtttgagacttccagggactaccggaactccatttccgagaggaaccagggttctgtcacaccggaatattcgtttacagtggacatggcggacgaggtcggcgcgatctccacactgtccgttattctggccgccaagggcatcagcattaaaaatatcggtatcaaccataacagagaacacggggaaggtacgctcaagattattttctatgataaggaagccatggatatggcgtggaaacagctggagcgctaccattacgacctgatctcgaataactgacttacggaggaacattatgaaatttaaaaaggtaaccccgcttaagggtgaactgcagatccccggcgataaatccatttcccacagaagcgtcatgttcggatcgattgcgaggggaacgacggagatcagccattttcttcagggagcagactgtctctccactatctcctgctttcagaaaatgggcgtagccatcgaaaacaacggggattccgtcatcgtccggggcaacggcctcagaggcttaaaaaagccggactccatcctggactgcggcaacagcggcacgaccacccgcctcatatccggtatcctgtcagcacagaattttgatgtgacggtaaccggcgacgagtccatacagaagcgccccatgaagcggatcatcgaaccgctttccatgatgggggctcagattgagagtctccgtcaaaatggctgcgctcccctgcacattacaggaaagccgctgcattccgtccactaccattccaaaattccgtctgcccaggtaaaatcagccattcttctggccggactctatgcggacggcgagacaagagtcacggaagatgttgtatcacgcaaccattcggagctcatgctccgctccttcggcgccgatgtgcggtgggaaggcacgacagcagtcatccggccggcggaggaactctacggcagacagattacggttcccggcgatatctcatccgccgcgccgtttcttgccgccggcctgctggtaccgggttctgaagtgctgatccggcaggtggggatcaatcccaccagagacggtattctccgcgtctgccgggccatgggagccgacataaccctgatgaatgagcaggacgcctccggggaacccactgccgacattctggtgaaaagcagcagcctccacggcacggtcatcgaaggagccatcatccccactctgatcgatgagcttcccatgatcgcggtgatggcctgcttcgcggaaggcaccaccattatcaaagatgcggcggaattaaaggtcaaggaatccaaccgtctcgaagtcatggtaaagaacttatccgccatgggggccgatgtgaccgaaactgcggatggaatgatcatccacggcggcaaaccgctccacggcgctgtgatcgacagccttttggatcaccgtatcgccatgacctttgccgtcgcagggctctgcgcggagggggagaccgagatccttggtgcggaatgtgtcaggatctcctatccggacttttatgaggacttaaacaggctgatgcggtaaattcctgctgccggcatacaaaaagtctgcagggaagacatttctttcgtccttcctgcagactttcattgtgggtcggatagacccagttgagtgcgcgaagcgcgcgaaatagaaaccacccgctatgcgggtgcgcggtgttggttataccaaaaatcactcagcctgatataatagaggtgtccaagccactattaaaaaggagagtgattttatggcgaagaaagccaatgaattagcgcatacaaagtggatgtgcaagtatcatatcgtcttcacccctaagtatagacgaaaagtgatctataatcaatataaagaagacctgagagatatcataaaacaattatgtaattataagggtgttcagatactggaggggaaattaatgccggatcatgtgcatatcctggtgagtatcccacccaagataagcgtatccagttttatgggctatttgaaaggaaagtcagcattaatgatgtttgaccgtcatgccaacttaaagtacaagttcgggaatcgtcatttctggtcagaaggatactacgtaagcacagtgggattaaacgaagacaccataaagaagtatatacaagatcaggagaaggcagatatcatgctggacaaattgagtgtgaaagaatatgaagacccctttaggggttagtcggtattcagatagccccttgaaggggcggcaacagaggtaaaagcacaaagtggcttgaacgaagtgaaagccagcgccttgagacgctggcctagtaacaaaggcttatagccgaagcgcgagccacccgttagacgggtggcagcgacttttaatatttgttgaaaaataatcttatgatacaaacattctttttattcaggaaccggctctgccgcctctctcaaaagcgatttcaccgcctcttttgcctccgtaaaccagatatctccaggcgcagccgacagaataaatccgatttttcccaacagggacgtcagatacctgacctccccggcagggcccatctttaaatatttctcctcacccctgcgctctaaatgcgcctgcacaccaaatttcatgcagtaataaacgtcctgccttacttccttcctgtatgaagcgggaaccgataccttatcgttgaccacaatcccggttaccgactgcctggtcctgcgggtaagaatcttcgtttttgaccggttcagttcaaagcccatggcgcccagaaacccttttacctttctgatcacctctgccgcagaaaaatctccggaaaatgtcatatcgtcacagtaccggctgtacgtaatactcctctccctgcaccagccgtccatatattcatcgaatggcttcatcacaagattggatatggcggccgaagccggcgagccctggggcagacagtcattcaggcagcacagagaggttaagagcgtccctactgaagtaggaaagtatctgctgttaaatgcgctgcgatgcaccactggaaaggtgatgcttccaaaaaaatctttgatatccagctttaataccaccatttttcccgtatggcaggccgcattctcccatatggacgcacccctgcggtaggcggccgcacaggatgagagttccagtccatccagaatatgatgcagaatattccgctgaatcgccttcagcagtggatccggcgcctgaatctgccttacgcccccgccctttttcggaatcctcaggcggctgtaatgcttttctgtatgattgctcacggcatacaggcaggaaatgaccttctcatcggtccactcctccccttccagcagatgaaaggacaaaagcatctccctgcagtgctccgctgtacagtatttccacaaatccggttcgtgcataggcgttcctcatcgaaatcggtaaaatagacaaaaaggatataagacggcggaaactcatacgaaaaaggatgccgtaagatgcgaagacgtacaagccgcaggcgtaagcacatgaaatgtgcagttgtacttcggagcagattacggtcttatgaccttaacttgtgaacttccggacaacgactcgctgcccggccggagcctctaagcaataccggaaatgctatgaatccccgccgtcctatgttcctttattctagcacagaaaaaaaactgccgcaacacctgcgtccggatattttctcattccacagcaggttcctcttcctgattccgctgcccgcccggcgttttcattacccggaccgttccgcgatcactccgcttctatctcctccaatttccgatacaccctcagtatctctcccatactccaggcctgtgcaaagcagcctctggatacggccggataaagcccgtcataaatctccgccagatggccggcgcagccctctcgcagcatttctctgaccgggccaagctgttccctcacttttttcgcagcctctttggaatcgtcatgaacttttaagtaagccagatagtaggctcctaacgggaatgtccagacagttccctgatggtaagccatatcgcgatttactacgctgccgccgtattcggcgcagaattccccgtctttgccgcttaaagaccgcagcccataaggcgtatataaatgctcatagaccgtatccactatacgacactccttctcccggtccagaatcggaaatggctgcgataccgcccatatctgattacagcgaatctgtctgtccgggtgatgctccgcggaattcgagatcacatcctttaaacagccttcgtcctcgagccagaattcccgcacaaagctgtttttcaccgtttctgccaggtcggtaaacaccttccctgactctgaaaagagagcggcaaaatgtccggctatcatcagggcgctgtgccactgtgcatttatctccaccgctttgccatgcctgggagtgggcagaaacccgttgattctcacatccatccaggtcacctgctccaggccgccgcctgccgaaatcaaaccgtcccggtccatacagatatgataatccgtccctttccggtaccagtcgatgatttcaaggatcaccggatatgcctctttttcgataaaatcgagatcgcctcccgcctgatagtactcgtagacgcttccgataaagagaagcgatgcatcggcagtgttgtattccggttctccgtctccctcaggaaaaacgttcggcatcagtccccggcgtctgtattggatgaacgtgctgagaatgcttttcgcagtctccatctgaccggtcacgatacagagtcccggcagggcaatcatggtatcgcgcccccagtctccaaagaacggatagccggcaatcacactcttaccacctgtcgactctcggtttaccacgtactggctgcagtttctggctatcagccgtgcctccgcatcacggaaaccggaattctcttccagttcctgctgccgcttactctcctgcgccatcatctcctcacaccgcgttctgccaatctctcctgcagtatagattatctctccgcatgccaaagaatgaggcggaacccggtaccggatgagatggttgcgataggcacctccgacggccggccttccgtctctggcatcatactcaaagtagaggtcgtctatgtactgctgcgtctgctccacaatctccccatccgtccagaagtttagattcagcactccgtcgctgatgcggccggctgccttcgcagctgacagggtaaactgccggcccggcatgcacttttctcccttctcgacgaactgaaacaggggaaccacctccagcagggcctctcttttcgtgcggttttctatctcatagcggattccaaccgtattctcctgctgcggcatgactacagttttcttaatctccacgccgcgcacccggtacgtatataccggaaaatactccatacagaaggcgtccaaatagcgaaatccctccgtattctcacaatagcccgcatactgctggctgcctaatgaaaagcagctgcctcccgtcataagcgtctcatccactctcgtcaccatatgatatcgaaggttcggcgcctgcaatgccgccatcaaaagggcgtggtcgccccgcgtattggagcctatgacggtctgggaggaataccctccaagaccgtttgtcaaaaggctgcactgctcctgcccccgatcaaatcctgtaaagctgtttcttccatattccagtctcatattcacccaacttcttaccagttatttacttcattacatctttatagaaaatctgcaccacctttgcctccatggtaacgtgtcttcccgttccgccttcaaacagccgtaccagttccaggaaagcggtcgatgaaatcttcttaaaatcctgttttaacgtatacatgggagttctcatatatcccatcagtgtgatgccgtcatacccggataccggccgtctcactcccatctcctccagggcgcaggccgctcctatggccatcagatccgaggcgcagacgataacatccgcttctcttcctcttgcaaacgtgatctccctggcctttttctcactgtagtccgcatactccacgatcagttccagattcctctcttccttcagccgtctcatggcagccagcctggcatccgtcatataaccgtccggcccgcaggcgatatacagcactgtgctgcctgttccgctctccactgccttttttgccacctcatactgtcccttatagtgatctaccgaaacagaagagatcatctggctgacaatcggtgaatccaccactactgctttgaattcctttgacatgatgacattgtagagcttcacattctcacgggcaaggctgtagacgataattcctgttatgccctggctctttaaataacggatcatatcgtcgccgctcatgtgtgcaaactgggaggtaaaaaaagtgactgcctccatctgatactcccccgccttctcaaacgcaccaaacagataaagaatatcgatctcatccactgcctgcttataataagtcatgtcaacgatcagccccacccggtggaaattctttttggacagagagatcgccgcagcgttgggaacgtaattcagtgcccggactgcctgttccacctttcttctggtctgatcgctgaccgagtcgtattggtttaagaccttggacaccgtagatttggagactccggccattctggctatatcattaatcgatgtcatacccacactccggctcttactcgctggccaccagactgttccactcctccatcgcctttttcgctgcttccgcaggctctaactgcccgtcgaatacaagcgccagtgccttttcggaaatggagtaatagtaatccatgcggtcgatgttgggcaccgggaacgctgtctcaaactgtctggagaatacggacaaatccctgtcctccaaaagctctggcaccgcgctgatatcctttaaggccgtcgtcttataattggtgtcatacaaaataatggcgcccggttccgatgccatatattccgccagcagcatggccgcatgaggatagtctgtataggccgacacatgagccaccttgagcccggcaaacggggttggagtcctgccgtttagagtgggcatggtcatgacgccgaaattaacgcccgcatttctaaaatccacgatattccatgggccgcccaggatataggccgtcttcccctgtttgaactgctcattgacaaactctccctttaaatcctgggattccaccggaagaatcttctttaactcctggtagaattcaagtcccttttcaaactccggcgagtcaaatcccggttcatccctgtccgttccgctttccccaaacagcttataaccatatgtagtcagaaaaccgtacgctgagtaaccgttggcggcatccatcataaaggcaaactggtttttcgccggatcattgaacgtctctgcaaattccatgatctcctcaaaggtgcccgcaggttcgtcccctacaatatctttgttatagaaaaagctgttggcttccacagataccggagctccgtacagcttgccgtcctgggaagcactcttaatcgcggcatcggagagttcgcttaacagccggtccctgacatcgccttcaaacgccataaccatgccggaagagatggcgcttcccagacggttgtgtgaaatcataaacacatccgcgccgcttcctgcgggtccgtcaagttccatcttcgtcctggcatccgtaaagcccacctcctcggccgtcacggtcacacccgggtacgcctccataaagcctttggcaatcgcttcgccgtaagcctgtttgtccgtccataagagaagctttgcgccttcctccggaatgattttaccggaaacatcttccggatcagcctccgcggccgaattctgtaccgcctccggcggcagttccttgctgcagccgcagagtgccgaggcggccataatggatgccagtaacagagaacataattttcttttcttcatattgtttcctcccttttgtatcgtttgataatatgaacgggtatccttcttccatcttctgattctgctgcccttactccttatttgcaccggcgctgaccccctgcacgatatatttctggaaaatgatgtagatcatggaaatcggtaccgccaccagcaccgctcccgccgcaaacatcgtaaaattggtactctcctgctcattgatcatcgcatacaggcccacagccagagtcctgttctcattcctggaaaggagcagattcggcaggatgtagtccatccacggcgtcatgaactgcgtcaccgtcacataggtaataatcggcattgacaacggaagcgtcacgtgaaagagggcgcggaacttagaacagccgtcgatataggccgcctcatccagtgaccgcgatactccgtctaagtaacccttcaccagccacacattgtacggaatcgcgcctgcggaatagatgatcaccagcgccaccggcttatttaacaggccgaaggtcaaaaacaggacgtagatcgccgtcatggacagaaacgacgggaacatggacagaaggaggagagtcataagcccagccttcttccctctgaagcggaatctggacatgacccacgccgtgatcatgacgatggtaacagagaccgccgaattgacgacggcgatcttcagcgtattggcaaaccagcttccatacttcgtttcccggaaaagcctggcgtaattggctaacgtccatttctccggaatcagtgtggcgctggccaggctggagctgttattaaaggatgatgagacaatccagacgatggggattaaaacgagcagcgatacgatgatcagttccagatgaagcagtgctgccacgaatacttttttaaactttgccatagaaaccaggctcctttcgtatcttccttatacctctttaaatgcgctggtccgtctgaaattccagaaggccacgcttccgaccaccaggaagattaagatgctcatgacggctgccatgctgtacatctgattatccagggtcagcttgtagatccaggagatcaggatgtccgtatctcccgcaaactggtaattggggttggcgggtccgccctgggtcaggaaaaataccgcgccgaagttattgaaattacctgaaaaattcataacgagcagcggtgctgtcacccgcaaaagatggggaagcgtcagaaaccggaactgctttatcgcggaggctccgtcgattctggccgcctcatacatccccgggtccatattggaaagaacgccggagatcataaccatgctggctccaaaccccagccagagattgaccaggattacggtaatctttgcaagcaccggatcggtcaggaacggaattctcgctgagatccagcccatatccagaagaaactggttcagcggaccgaactgcccgttaaaaatattgcggaacaccagaagacagatcattcccggcatggcccatggcagaatcatgatagtccggaacaccttcttaaacttcacgcattcgctgtttaaaatgaccgcctggagcattccgaagcagtagcaggaaagcgtggacgccaccgtccaaatgacagtccagcccagaacgccgaagaaggtactggaccagaccggcacgtgaaaaagcttgtaaaagttgtcgaaacctacccagtcgatcagattggccggaggcagattccccttcgagtagttggtaaacgccgtcagcacagagaatatcatcggcattaccgtaatgaacagtataagaacagccaccggagccagcacgatatacacaaatttctcctgataaagcttcttaaagtaattggctgatccctgatagatcccggtctcgtctatctcccttccggaacgccacgcatcccgcaggttccatacgtatatccccaggaacagaagcagcagaagccctacgatcacgccgctgatcataagcatcatggaatgatcgcccgtcttagcccccggcctctctcccagtgtaacgagtccccagactcctctcgtgaaaaagccgccgcagagacgcagttcaaacaccggtatctttcccgtcagccactcaagccagtatccggtctgcagttcgattccgatcacaagcgcctgaacgaaaaaaaacagaattcccttcacatgctgcctgcatattaaaaactggccgcttccccagataaaaattgataataaaagagattttcttgatttcacaatgccctccctgccacagctgatgccatagttcaattatgaatcctgcacggcatgatgccttacaggttattacggaaaccggttttcataagtattttataccactatacagagtatttgtcaacacaatatagagtaaattatccatttcataaattttcttactaaatacttgatttattttgttgaaatattataatagataacagcattcgttcttcctttcactgcgatacatttgcattacggaaaccggtttctgtaaacagaacaaaaaagaaaggacgatttaccaatgaaaaaagtaaattaccatactcacaccagactctgccgccatgcaggcggcgctgccgaagattatgctgcggcggcatggcaaaacagcctcgatgtgctgggcttcagcgaccatgcaccatttcccgacggccgttttgggctgcgcatgcagtatgatgagctggaaccctatatacgggatctaaaccggcttaagacggagtatcaggggcgggtctccatctgttccggcctggagatcgagtactgccctgacagtctggagtattacgagagcctgcttaagccggggcggctggattatctgcttctcggccagcacttctacaccgcggcaggcgcgctgccggtgaatatctatgagctggaggagaaaggcggcacagccgcttacatcgactacgccctttcaatcagagagggcttggcgaccggcttcttcaaggtactggcccatccggatgtgatctttatcaacgatcttgcctgggatgagaactgcagcctggcatgtgaaatcatcgtcgaagcagcacaggtgtccggcgccgtcttagagctgaacgccaacggaatccgccgcggaatgagggaatactgtgacggtgtgcgttatccctatccgcacaaacgcttttgggatcgcgtgtccggcacccggattccggtcatagtaagctccgactgccataaccctgatgtgctgtgggattcctgcatggaagaaggataccggctcggcagggaatgggggcttctcctcacggatgaaatttagcgccagacagcagcgcggccctgcacgaagggattttgatatcacagatgcactttactgtgatatcaaaaaaagcccgggagcgtccggaatcagatattttctgatcctggacgctcccgggctctccggtttacgtctgaacgtgttattctgcaacggccttcttcaccatcacaaaataaaggatgattcccacacccgtcaaaatatggccaatgccggcgattcccgatatagaggcatccatggcacggcttaattccaggccgcgcacctgtgcaatgcccctgacaatcagcatcaccaccgttaccgcaactcccgcgttatagatcccaaagaacaggccaaaccgcttctgctccgtcaccgccgcatgaaactcaaacagggcggccacaaggaacacgatcattcccagcaggaataagtgcgtgtgcacgaaggccagcgtcgtccttccggaaaacccgttaaacttcgtaaattcacggtagaaaacgcctcccgccatagccagcagcgcatatacaaacgcggcgtttatcagctttaataccgctttcttttttctgtcatttgtcatattacctctcctttctctgtcccgtctgtttcatctcccggtatcccataaccacgatccacacgtaggcgcaggtcttggggatcataagcgcaccaaccgccgggatggtgtccgcccaaagcacaaccggaatatagaatccgaagctgagcgtaatcgccagccacatgaagccaaagcccgaatccgccgtcttttttgccttccggtaaaagaggactatcatcagaagtcccagaaccgcaaacggaatattgcggtaaatgccccaggagagcggcgcgctggcgcttaaccagtcattgcccggcatgaagcacaggaatatccttacaatggccagcccccatacagcggcggtcaggccgttctttccctccacgcggtaccgcatcttccatatgtagtacagaattacataaaatacggtcatggtcacagaggttaccagttttccaaatccaagtgccgcagcgtgattcgccagtccgtcagtacagagggcgtaagcgcggggcactaagtgaaatgcgtctccgcatcctaaaaccaccgccatgattccaaacagctttatctgctttctctcccccgctcctgcgatcatacgcacgcccagcgcaatcaccgtgcataaatatacaatatcaaaaattgtctccattactgcctgcatcgtcatacttcctttcctgtgtccgcatctgtcttatagatcagacgcctcataatctcttcaaaataagccggatcctcctgatttttcaggagaaaaaccatattggagaaggcgaaggatacgaacttccggggtgtaaatgtctcgttccagacctccggcgccaccctgctgtcgcgctccagaatacggagcagcccttccttcatatgtcctaaataaaatgcctccagctctctccctctcttctgatccgtctggctgagcacctccatctcctgtaaaaactcttcgcgaaagctttccagattttcgtgcaggcggaaatagatatcgtggatacttccgataaaatcaccgctctctgtgtcaaaatggctgccgtgaaacacattacgccagaaatcctccataaccgccccaactaaatcccctttggaaggataataattgtagaccgtaccgatcgcgatgccgctctccgaggccaggcggcggatattcagattgccaattccctccctgcccgcaatctctttcgcaatcgcaagcagctcttcttttgatgttgccgatttcttcatataggacctccttcaatatgaacattgttcattatactctgtaactgtcattttgtcaaatagttctgccttaatttttcttgacatccactcttctttccgatagaatgtaatgaaagtaagtacttgcatggaggtggaatacatggatgataccagccagagaatcgtggacgcagccatggggctgatccgtgacaaaggatatgtcgccactaccacaaaagacattgcgaagcaggcgggcgtcaacgaatgtacgcttttccgcaagttttccggaaagaaggacatcgttctggcaggcattgaccaggaaaagtggcgggcggacgtcacccccctggcttttgaaaacgtcacgtgggacttgagaagcgatttagagatgttcatgaatgcgtacatggaccggataaccccggatttcgtcaacctttccatcggcctgcgcgctccccagatctacgaggaaacggccccgttcatcatgatgattccgaaggcctttgtctcctctctcatccggtattttgaacagatggaggagaaggggaagctgagtcacggaaactatgaatcctgggccatgacgattttctccgcaaccttcggttatacgtttctgaaagcgtctttcgacgacagcctgtccaaactctcacgtcacgattacgtcagggacagcgtcacagtctttctggaaggaatcggcaggcgggaagctcccgaacagtgaagaaatcacatacggtaccgccataaaaccgcggtaccaattttaccgctcatatgacagcaagtacttgcattcattaatttaagaaggaggcattgatcatgcaaatcacaggcgcacagctttttgtaaaagcactgaaggaagaaggcgtcgaagtcctgttcggttatcccggcggacaggccattgacttattcgacgcactttacggggaaacaggcatccgtctcatcctcccccgccacgaacagggactggttcacgctgccgacggctatgcccgctccactggcaggcccggggtctgtctcgtgaccagcggcccaggcgcggccaacttggtgactggcatcgcaacggccaattacgacagcgtccccctcgtctgtttcacaggccaggtccccaccagcctgatcggcaacgacgcctttcaggaggtcgatattacaggcatcaccaggagcatctgcaaatactcagtaaccgtccggacaagagaacgtttaggggaaataatcaaaaaggcgttccacatcgccacgaccggaaggcccggccccgtgctggtggatctgcccaaagacattcagagagaatacgggagcagctgctatcccgaccatgtgaacctccggggataccggccaggtttcgccgtacacggcggccagataaaaaaggccctagagctcttaaatcaggcaaagcggcccctcttcctggtgggcggcggcgtcaatatcgcccgcgcggaagaagccatgacgcggcttgccgaacgtaccggcgttcctgtcgtgactacgatcatgggaaagggcgccatcccatccacgcatccgctgtatgcgggcagtatcgggattcacggaagctttgccgccaactcggcggtcagcagctgcgatgtcctcttctccatcggcacccgcttcaatgaccgcatcaccggaaagaacggggaatttgccaaacatgcgtccattatccacgtggacattgatcccgcttctatttccagaactatcgccgtcgatatccccatcgtcgccgacgccggtgccgccattcatgcgctcctggaaaaagctgtgcctctggacacagacgaatggaggaagcagatcgatggctggaaagaaaaccatcccatcaccatgaagcaggaaggactgactgcggaatccgttatccggtgcatcaaccggctggaaggcccgctcctcgtcgctacagatgtcggacagaaccagctgtgggcagcccagtttctggagctggacaaggaccggcggcttctgacctccggcggacttggcaccatgggatacggcctccccgccgctctcggcgcgaaaatcggaaacccggataagacggtgatactcatcaccggggacggcggattgcagatgaatatgcaggaactggccacagccgtggtctgcgggctccccgtgatcatctgcgtccttaacaacggctggctgggcaacgtgcgccagtggcaggagatgttttttgaacaccgctattccgccacctgcctgcgccggagatacagctgccccgcagtctgtatggagcccggaccggactgtccgccgtacacgccggatttcatcaagctggctgaaagctttggaattacagggatcagagtcacgaaggcagaggagattcagccggctcttcaggccgcagaagccagcaaagacgcgccggttctgatcgaatttttaatcgcctgggatgacaacgtgctgcccatcgtaccgccgggcagtccgatcgaccacatgatcctggagaatgagaggggaagataacgatgaaaaagcgttggattaatctgtatgtagaaaatgaacccggtgtcctggccttaattgccggcctcttttccgggaaatcctataatctggaaagtctgaccgtgggaccggccgaggatgagacggtctcccgcatgaccatcgggctgaccggcgacgatcagacctttgagcagataaaaaaacagctcgcccggcgtgtggaggtcatcaaggtcgtagaccttacggagaccgccgcacactgcgaggagctgatgtttttaagaattcatgattgttcggaggaggagatccgggagctttttcgcatggcctccgtctttcacgccagagtcatcgactactccccatcttccattcttttgaaaagtgtacggccggaggaggaaaacacgcttctcatcaaacggatgcagaagcggttcccaaaccggatttacgcgatccgcggaggcagcgtcgccataccggctctcagccctatggattagcgcggatctgcactaacgctgaactgcttatgcattggaccccgcgcccggcttcggacctctttttcctttttcggcgttcccttcttcccgatatggagggaggcgaccgccaggccgctgaccacgaggaagccatagaagctgatgccccggctcaacaccatgacggggaggagctgggatgaacttaagaagccgccaaacatcaccaggaagccgctctccgacgcccccaccgccccgggcagcggaacggccgacaccgcaagactgacgatggactgaagcataataaagtttaccaggcctacactgcccaggccaagggccagacaggcacagtaggatgccatatacaggaaggtgagctggcagaaggtaagcaccgccgtcttcaccgcagccatcggatatttccgcagataagcgccgccctggctgtactcttcgatcatggaaccggctttttgcgcagccttttccccgtcaaaggaaggaatatggttcaacaggcggataactctgtataccagccgctccacaagcggcctgcaaaacagaatcagcaggataaacgccacggaaatcccgtttgccagaatcccaaaacagattaagagcttaagggccagcggcagacccatcagataagaaaacttagcggcacccatcactgctccgtaagtcagcgctgccagctgatacatggccgtaatcgtcagcagtgcgaatgaacttctcgccgcgctcatcccgtctcggaccatatagtaaagctgcatgggctggccgcctgtggaggagggagtgatcgagctgaaataaaaaccggcaaaggaatactgcatggctctcttccagggcacacttcctccccacgtcccggccagaagcctgatcacagccgcctcacagccgacaaacagaaccatgagaaaaagccccagcagtacaaaacgcaagtccgcgttctttaaaaccgcccacagggttcccatggaatggtcccttaacagtatgtagcatgtcactcccgccagcagcaccatggccgccatgcagagaagtgaatttttccatttcatggttttttgctccaaaacgattcttcctttctattttctgcaaacggttatccggaaaccgattccgaggggagtataaaccgataccccgcctcttttaacgcgggtatcacatacgcaagcgcttccagcgtcttctccggagctccgggtgcgcctcccgtgcgtcttcctccatcgtgaagacagaggatggacccatcctttacacggcttaagcacttcttccggatcgagcccaccgtggcttcccgctcccagtcttcggccatcacatcccacagaaccatcttcatcccgtatttcctcacaaagtgccaggaaaacagattcgtaagcccccagggcgggcggtaccagatgtcggagatgccttttctcttcataaattcgcagccggtgcgaaaatctttttttgtatgcagatatcctctcaccatggcgttctggtggtccatggaatgaaagccaaccacatggccttctgacagcatgcggtcaatcagcgcttcctcttttaccgcctctctggtcaccacaaagaaagccgccttcacctcctctttcttcaaaaggtcgaggagccgcccggtatactccggatcgggaccgtcgtcaaaggtgagcatcaccgtaccgggaactccggttcttcgcagtaccgccggatttctgtgtttatgatacagggccgggatcacggaatgcaccgtaaatccaccggccagcagtccgaagcccgcagccagtctgctccagttcttcctcagcccgtacataatgcgccctccggtccttcgatcagagcgaggacctggccgatcacggtctggtcgtactctctctttaaacggtttacatttgccttcatggcgtccagaagcgtgtcatcctgaacgatcttgctgatctcacggacacagtccatgggatttttctccagtatcattccgatgccgcggcccacgataaagcctgtgttgttgatctcctgctggagaaacggttcaaataccagcaggggcgttcccgcgtgtatcgtctcaaacagggtgattccgcccggcttcgagatcaccacatcggcctcctgcatatagcggtacacctcattggtataaccgatcacctcgatattctcgtatttcccgtgaagctttttgtagatttcctgatttttccctgtgatcaccgtaaccctgatgtggccggagtcgttgagttcctcgtagaattcattgctctcaggcaggattccgagaccgcctcccatgatcaggatgtgcttcttcccatccgtctctcccggccgctctgatccgtagtcgaattccggtctcaccggaattccatagacgtaaatcttcgtttcctctacgcccttttcaatcagcttcgtccgcaccatacggtcgggaacgaggtaacagtctgtggcgccgttgatccactcggaatggctgctgatgtccgtaatgcacgtaatcagaggcattctgctgcccgtgaccgccttataccaggacataatctgggaacagaggggcagcgttgagatgaccgcatccggctgttcctcctccagcagattttttattttctttaaaaaccacggaagaaaaaccggttttaaatccggccccttgcgttccatatgattatagtatttattatacgttccgctgcagtgggtaaccatgacgccaaaggcatgataaaccttatcggaataataaggcattgcgtactcaaaaatatcgcggatcacgatatcagcctcaggattcaccctcgaaacacgctctgccagcgaaaaagcggcagaataatggcccataccaaattttccagtcaaaaaaagaagcttcatatccgcacctcatttcattcttctttatcctggttttagtatgagccataaatctttagaaacggctgtaaaatttctgaaattttcttcagaaattcttatcatgtctgctgtttttttgaaaaaaatttctcattctattgtttttccggaagcttcatcaacgtatgatagcggtagtcgtggctttcatacgtaaagcttcctcccatcttttcaatcatctgctccgacgccttgacgccaatcccgtagctttccacctcgatctcctcgtcccgtatgggattttcgatgtttaaacagacaaagccgtctgaaagcctgacctccacggacacgatgccgtctctgcgcgcgtatttttcgatattcgtaccaatattattcaggacgcgttttaactggaccacatcggtctccaccgtaaacggcgtctcaatcttatagtgcacctccgtccggaaaccgtgttcctccagggattccgtcagatcaccgatcagctgcccaaacagttcatttccgtcgtattcctcatttttcagggaaaagcggtctcctgtggcataggaatagctgaataaatcgtccatcaggttcttcatatggtatgcctggcgctttgccttctccatatagaggacggattcatctgccgtgcatttgccggccgtaatcaaatccagatagaacagaaccgaagtgagcggcgtcctgatatcgtgggacagggctgtcacgatctcgctccgttccttttcaatccggtccttttcctcgatctccttgtgcaggctttcgctcatctggttgatgctgtctgccagggaatagagttcatcccgcccttttaagggaattacataccctctggatccggtctccaggatgtggattcccttctcaatctggcggatatatgccagttttttctgaagcagcacgaggaacaccacgacgaagcagaccgcactcagccccgcccccagtacaaggatcagcgtccggaacctggcttcaaaataggcccttatcaggatctccccgtccccgtcggcaaacttcaccggataggtaaccgcagtcccgtgacggtagagatacccatactgaaatcccggatgctcgtccttaagctcggtcttcagcttctcattatcccggtccatggtattatagtagacgcgttcccgctgatataccgtcagaaacacataccagttctcagagttccagtctccgatggtctccccgtctccgatctccacatgattttccgtgacaaaatcctgaaattcctccgccagaagcttcgtatgccgctcgtaataattcttctggtccgtcatcatgccggccagaagccccatggcgttcgtcaccgccacatagcagagaaaggcggccgccgctgcgatcaccacatcatacagtgtggcaaggcttaagcgcgtgggattcgccattttcttaagaaaattaatcaatataatacccccgcccccacatggtctttatgtattccggattctgcgggtccttctcaattttcctgcgaaggtttctgatatggaccattacattgttgttggcagagtaaaagtacggttcattccagacactttcatagatattctccgaggaaaagatctttctccggttctttaataagagaacgagaatacagtactccctggaggtcagattcacatccctgccttccacggtcacggtccgtgtgtcctgatccacagtaagatcccccagcaccagacggttatccggcgcggcgaagctctttccctggtagacgagataccgtctcagaagcgatttgcacctggaaaggagttccgaataggaaaatggcttcgccagataatcgtcgcctcccgccgaaaatcccatggatttatcggaatcctgggtgcgggccgtcagaaacaggatgggagccatcgtcttttttctgatctccgaacaggccacgtagccggacttaaccggcatcatcacatcgagaatgattaaatcaatggtgtcgtccgccagcctgaccgcttcttcaccgtctcccgcggtcaccacctcgtacccttctccggtcagaaggatctgcagaatttcaatgatctcctcgctgtcatccgcaatcagtatccgctgtgccatcgcgcagacctccttccccgatttatcgtctactgcaccgcaatgtggcacatcttcatcgcgtttaaggcattttcatggctttccggcgtgactcccgcgcagcaggaggaatccacgagaaccggcacctccgggatggcggcctttaccagcagtgcattggagatgacgcagatatccgtacagactccgatcagcatgacagactcatacggccgttcctgaacgtattccatgagggcggtgcttccaaaggtgttcttctcaaaccgtttcccctgaaattcctttagagaagaatccagttcccagccatcggtccccttgatgcagtgaggcaccggcagattctttccttcctgggtgtccatatacttatcatcgtgggtgtccagcgtaaaaatcacatcgtctcccgccgcctgatactcctcaatcatcttttttacactgggtacaatcgcctgcgcctcggaacttcccagcgcgccgtctataaaatccttctgcatgtccacaacaattaagagcttcatttgttaaacctccattttacagatatttgctttagtttaccacaatttaatatccttaggaagatatttcctcgatttttcccacaggccgtagtatactgaaagtaagaaacggcttctgcgccgtaatgaaccagaaagaaggatatcagtatggaagagaaaaaaaatccctttgcctccctgtcggataaagaactggaggccatgttaaaaaggctggaggactccaatgaacgccaggcctcctacgcgaaaaagcagtaccggatgtctcagatcaccgctctggccagtattctgatccttgccatcgtcatctatacctctgcaactatcatcccccgtgtcaaccggcttttcgacgatgtggagacggtgatggacagtgtaaatgtggtggccaaagagctggaggaggcgaatttgggccagatggtaacggacatcgacaacctggtaacctccagtgaccagagtgtgaaggaagccctccggcagattaattccgtggatatccagacgctcaatcaggcgattttagacttatccaacttaatcagcccgctggcacgctttttcggaaaatagaggaaatacagaagaattttaaattagttattgacaaattcactttgacgcattaatataataagcaataaaataaaccgttgaaaaagaggagtaagctatcccgcaatatttcagagagtcgccgccggtgtgagtgcgatatagagcagacagctgaatggacttttgagggcggtcctgaaccatttggtaagtagggatcgacggagaccacaaccgttatctggtggcatatatgttagtatatgaaaaggggacttctaaggaagtcaatttgagtggcaccgcggattgttaattcgtctcaagtatgttatcgcgcatacttgggactttttttatgtttttaaagcaaaccagaaaaatcaggaggaaacaattatgaaaaaaacaacgaaagcactcttactcgcagccatgacagtaaccgcactcgcgggctgttcttccaaaccggcggatcctgctgccactgccacagaggctgtcactacaacggccgcagcagataccaccgcagcagaagccgcagacaccaccgccgccaaggacgcttccgcagaagacggcaagtcctacaccatcggcatcggccagtttgcagagcacggttccctggacaactgccgcgacggatttttacagggactggctgatgaaggaatcgttgaaggccagaacttaaccattctctatgaaaatgcacaggcagacggcggaacagccagccagatcatcaacaactttatttccaaaaaggcagatttaatctgcgccatcgcgactccgatcgctcaggcagcctacggcggggcgaagaaagacaacgttccggtcatctacacggcggtcaccgatccggtcgccgcggcgcttgcaaatgaagacggaacaccggtcggcgaggtcactggaaccagcgacaaactccccgtagaaaagcagctggaaatgatccgtcagattcttccggatgcaaagaagatcggtattctctacagcaccagcgaagtcaactccgaaaccgccatcgccgaatacaaggcagcagctccggattacggctttgagatcgtggaaggcgccgtaacctccaccgccgatatcccgctggctgcagacagcattttggaaaaagcagactgcttaaacaatttaaccgacaacacggttgtaagctctctcccgatgatcctggataaagctgcaaagaaaaacattccggtattcggaagcgaggtagaacaggttaagatcggctgcctggcttccatgggtctcgattacgtcgatctgggaatccagaccggcaaaatggctgccaaagtgttaaagggcgaacagaaagccagcgagatgaacttcgaagtcatcgaggaagccgcattctacggcaacagcaaggttgctgaaaatctcggcattacccttccgcaggatttaacagattccgcagctgccatatttaccgaaatcacacagtaatcaattactctcccgcccggctcactgcccgcgtaactaaaatacttctcctggaggaacgcaatcatgtcaatcatacttggcgtatttgaagaaggcctggtctatgccatcatggcactgggcgtctatatcacctataagattctggactttccggacttatctgtggacggaacatttccgcttggcggagccgtaacggtcacactgatactggccggagttaatccggtgctcacgctgttcgccgcatttgcggccggcgtcctggccgggtgcgtgacgggattcatccacgtgaaattaaaggtccgggatctgctgtcaggtatcattgtcatgactgctctctactctgtcaacttaagagtagcgggtaaatccaacgtccccatcttcaacagtgactcgatctttgaaaatggtttcgtcagccgtatgtttccggacagcatcagtaatttcatcgttgttatcattctcgccgtcattgtgatcctggtaaagcttctgctggacctctatttaaagacacggtccggctacctgctccgggcggtcggcgacaacgacacgctggttacctctcttgccaaagacaaagggatggtaaaaatcgtgggtctggccatcgccaacggcctggccgcgctggccgggtccgtctactgtcagcagaaaggcttctttgaaatcagtatgggtaccggcaccatcgtcatcggtctggcaaatgtcatcatcggtacgaagctgttcaaacgcgttggctttgtcaaatccacgacggctgtcgtcatcggttccatcatttataagggctgcgtctctctcgccatctacttagggctggaggcctccgatttaaaactgattacggccgcgctgttcctcgtcatactcgtactcagcaacggcagggaaaagaaggtgaagagtcatgcttgaattaaaaaagatcaataaatactacaatcagggaaccgtcaatgagatgtgcttattcgaggacttcagcctgaccataaaggaccgccagttcgtctccgtggtcggaagcaacggctccggcaagacctccatgttaaatattatctgcggaagcattccgttggacagcgggcgcatcatcatcggcggaaaagacataaccagcatgccggaatacagacgtcagcgccgtatcggccgcgtgtaccagaatccggccatgggaacgtgtccccacatgacaatactggagaatatggccctggctgacaataagggaaagcccttcaatctccttcccggtacaaaccgtcagagaatcaattactacaaagaacagcttcattcccttggactggggctggaagataagctgcacgtaaaggtcggtgttctctccggcggccagcgccaggctatggctcttttgatgtccaccatgactcccatcgaatttctgattctagatgaacacacggccgcactggatcccaagaccgctgaggtcatcatggagctgaccgaccagatcgtcagggaaaagaacttaaccacaatcatggtcactcacaacttacgctacgccgtggaatacggtgaccgtctcatcatgatgcaccagggcaatgccatcatcgactgcgccgatgaagacaaggccgccctgaaggtggacgatattctggacagattcaacgaaatcagcatagaatgcggaaactgattcctgccgcagatcagacaaaaaaataccggtgacggaagaacacttcaaaaaggtattcttccgtcaccggtatttttcgtctgatcccttaatccagtctttccagaaccatgatctcttcctcttccccgtaaaacgcgatctggttctttccacgccctttggcgctgtagagtgcctcatccgcgtgcctgtagagcaattcaaacgtattcccatcctgtgggctgaatgcgattccaatgctgatggatacgatactgtcctctccgtccatcgtcagggcatatacctgacggcgcacctcctcggcccggaagctggcacactcgcggttcggtatgtgctccaggaacacgacaaactcatcgccgccgaaccgggcgatcaggtcgtcagaccggaatgcaccagagagaatcctcgccatcttctttaagactgagtctccctcctgatggccgtacctgtcattgatctccttaaatccatctaaatccagcatcatcagacaggacaggctgtcctcgtgtttcagggcctgttccaccttctcctcgatatttcttctgttgtagagacctgtcaggggatccctctcggaggaatacaacagctccatcttccgttttgtctcttcatccacatcccggacgtaggcgaaagccaccggatttcccgagacaggctccgtcaggagggagatggtacacgtcatccatttgtaatcatccgatccaggatacgccgcccgaaacagttccttttgctcccgttctccggtgtaataggcggccagcatacgcttggcctgcatctgtccggcgatcctgtcatggtccgccgggtgaatgtaccggcacatcttctccacgaatctgctgctgtataagaatccgcttccgtcttccatccagtctttcccgtgaatggtacaggccagcacctgctgctttacgagatcaacagaccacatggcaaccgcctccgagagaagcgctgcacggtactgctcctcctgggcaaactgcctcctgattctccgctcctccgtaatgtcctccagtgttccgatggcattggccacctcaccctttccgacgatcaccggagtcacggacagtctgaaatacgtatcctctgaaaaggaggtgcctcctgcaaattccagcggatccggctcttttccctctgccgccctctttaagatcatcctccacttctccagatcctccggagccaccagcccacaggcagctccttttgccgaaacctgatataggaccggtggaaattctgccgtcttcaccaccggaggggaaataaagctaagactgtcatccttgggcacgtattcgaatgtagtgccggtggaatgaagaagcgccagttccagctttttcttctccagctccagcgccgtcttggagtccaggattatatttctcgtcttcctgaaccataaaacgatgactgccagttccgccaggaacagcaggagcatcttcaccgtaaggtacagagccgtcttgccaatgtgttcacggtaccagttagagaccgtatagggaactacggtaagcacgtaccagtcattgatctgagccggcgcgtaatagacgatccgcttctctttcccgtaagtgaacagaaagacgccccgctccttccgctccatcttctcctgcagttcttcgacggactcctcccccatatccgtatcacttcgcaggaaactgaaatagtcccgtccgctgtacagactgtccgcatggctggtctgcatgatcaccgttccgtctgactttaacacgtagctgtagcttccggaattaaatccgttggtggttaccatatccaccatctgctccacgatcatgatccctgcaattccgccttctacagtctctcctcttcttaccggtgcataaaaggcgaagacctcctgtccggttacgctggatggaaagacatccgtcatcccgctttcccctctgcagattccttctacatagcctcccgtcgaatgcggaagctcctcgtgctccaccgtatacagtcctccgtcagcagaaaccagtctgatattggcaaatccacacttctctttcagctgctcatagactctctgacggctttcctctgtcagttcaggcgtctcagacaaaaaatccgccgtataccgcacttcctcaaatactctggtcaattcgttctttaccgcggtctgggactggtcattaacgtccgcaagatgttctgtcgtcatgtccgtcatcaaatggtcgacacgcctcgaaaaatcgtacagaaacagatagatgaaagccagaactagcacgacaagcagcagcacggctctcacatgattccggctgaagctgttttcctttttcatattttccctcctcgtttcctacaggtcgccatttacgaatcaagcagcaaaaatatgtcagggatggccccttaaaaaactctgtatgaaaacccgtctggggcggcagcttttcttgttacgcaaaaaggcttcagacagattaatctggctgaagccccaacatctcgtaaggttttagcagctggctgcccatacggccctttagctttgcgtcactgcctttcgacagttttgccattactatatataatagttttataataccgtcttgtcaaccagatttttccagtttcagcggctcatttcgctctgaggacccttctggttgtgctcacggataatcatgttcatttcctctaaatccgaggtgggcagatcgccgggaatcgtgtttttcagcgcgctggccgcgttcccgtaacgcaccgccttcatgcagtcgccgccgctgcttaacagtccgtacaaagcgcccgcgatataggcatctccgctgccgatccggtctacaacgtcaatattgcggtacggctcttcctcatagtattcgtccctggccgcatcatagatcacggaaccgaacgtatggctcttcgggctgtgcaccactctctgggtggaagccacgatggagatggggtattcctccgtaaagctcttcatcatctccctggccgttcccgtcttctgaaaggtcagccgggcggtgtcctctgaacagaagaagatatccacatacgggagaatctgctcgatgcactccctggcctcctcgcccgtccacaaattcccgcggaaattcacatcgaaggatatgatggttccgttggatttgaacctgcggatcatatcaatggcagtccttctcgtgttttcacacagcgccagggtaatacccgtcgtgtggaaacaggttgccgcacggaacatgtcctccgggaaagaatcgatgcaaatgctgtaaaaggaactgttctttctgtcgtaaataaccttcggttttctggggtgcgcgccgtattcatagtaatagaggcccagtctcgcgtcagagctgtggtcatagacaaagaaatcatcactgattccataggagcgcactttatttttcacaaaattacccatatcatgggccggaagctgggtcaccacgccggtgtgaagccccaaaagggccgcgccgactgcgacgtttaactctgctccccccacctgcttctgaaatgagtctccgcgcacaagacgttccactccggccggagacaggcgcagcagcagttcacctaaacttagcaaatcaaatggtctgtcactcatgattaatcttcctcacttttaaaaagaggggccattctataaaagcttttaaaagctgattagaatgaccccgctgtcttattttttatctctgtacacgtcctgaaccgtctccgcctgcaaggctgtcaacgtcttctctcgtaactaagttgaagtcgccgggaatggtgtgctttaatgcggaagcagctaccgcatactccagagcactcttataatccttaccgtccaccatgccgcagattacgccggctgcaaaggaatcgccgccgcctacacggtccacgattggtgtgatgtggtactttctggagtgatagaactcacgtgtagcgccgtccatgatgcaggctgaccagccgttatcagaagcggaatggctctcacgtaaggagctgatcacatacttaaagccgaacttgtcgatcatctgattgaagatgtcaacgtaaccctgcagctccagttcgccggaggttacatcagtgttgcccggcttaaatccgagaaccttttctgcatcctcttcgttgccgatgcatacgtccacgtactgcattaagtttgtcatgaccttctgagccttctcggaagaccataatttcttacggaagtttaagtctacagataccgtaactccgtgagcctttgcagccttgcaggccgcttccgtcagctctgcagcagagtcactgactgccggtgtgatacctgtgaaatggaaccagtcggcgccttcaaaaatctcatcaaaattgaaatccgcctcggttgctgtggaaatagaagaatgagctctgtcataaacaacagtagatgctctcatggcggaaccggtctccaggaagtagatacccagtctctcaccgcatcttgcaatgtgctttgtgcatacgttgtactttctcagtgctgctactgcgcattctccgatcgggttcttcggaaccgctgtcacaaactctgcgtcatggccgtaattagccagggaaactgctacgtttgcctcgccgccgccgtaatttacgtcaaattcatctgcctggataaacttctcattgttcggggtagataatcttaacatgatttcgcccattgttactacttttgccattattttctctccttaattctattttcaactttatctgaatcgtctgtcttatgcgcgtgctgccgcaaccgcttttacaaattcctgagcttttgccgtaactgctgcaaaatcgcctgtcttagcgccctttgttaagctgctgcctgttcctactgcgtaagcgcctgccttaatccacttgtccacgttgtccacgtcaacaccgccggatggcatgaactcgccctgaggaagcgggcctttgaaggagctgatggctgccggtcccatgatattgccagggaagatcttgatgatgtcacagccggcttctaatgcggtaatagcctcggttggtgtcattacgcctggaagcatcggcactctgtaacggttgcacatcttaatggtctctacgtttaaaccagggctcacaacgtagttcgcacctgccagaataacggctcttgctgtctccggatcgagtacggtacccgcaccgataacaacgtctttgttatctctatatttttcagacatctttgcaatgaattcaaccgggttgccttcatccatcgtcatcgtaatctcaatgaagttgatgccgccggcaataatcgcgtcaaccactttctcgccctgctccaagttctttgcacgaacaacggctaccaggcagtcttctttcatctttgctaaaacctgttcttttttcatgattgctctctccttcttattcgcatatacgaatgtctttcataattgcgattcttataattgaatattaatcgtttctcttcattttgtcaacaggaaatctttatattttcgaataaagaatccggcatgccggacttacgcggcggaacgcggccgctgtcactcaaaatagcccaacagtctcgaaacttcccgtccttttgccgctacaagtgcccccagcgcctcataatcctccgtcggtttgtacagactggacacgctgatcgctcccaggcaggaaccgtcccggtcgaacacgggggctcctacacactgcatatgctcttccatctcccgcgcgtcgaaagcgtatccacgctcccggaccttctccagctctttcaaaagctgttctcttcccagtattgtccgttctgtgtgcttcacaaatttaatccggtttatcacctgctctctcgtctcctcgtcactgtatgcaagaatgacctttcccagcgaggtgcagtacatgggattcttcgaacccaccgtcgccgtggtaatgatcggattctccggttcaaacttgcatatgtagacaacgtggtggtcggaagggattccaaaaaacacggtcttgcccacttccttggaaaatgccttgagtaccggttcaatggtgccgataaaatccagattattcgtatagttaattccaatgcggtaagccatcagcccgatggtatagctctgcttctgccccctggccacattgaccatccccatctcggccagcgtcgtcacaatatcgtaggcgctcgtcttcggaagattcagcttctcgcagagatcatcgagcgtagctccctccggtgttctggatatcatcttcaatatttccacggttctctgtgtcgttctgttcagtttcatggtttgcctccgttcttactcctttagtatacctccctgtggctttaaaaggcaatatgaattgctctcatacgaagtatttgtaagtgtttacaaaaatattacatgattctgtgcaaaatgtcaaagtgtttgaagatacgcccaaatacttgtgggagggagagggggaggcggggaagcgcgcagacttctcgtttcctcggcggcaggaactaaagccggaaggcaggaaaaaagggcggatcgctgcaaactacggagaactcctgaaggacttctcctccgtgtgcgctcgaaagttggctttgaggccaactttcgccacccttttttcctgccttccggcttaagttcctgcgagcctcggaaaaggaatcctgcactcttccccgcctccccctctccctcccacaagtatttgggctgtgtattggctccactagtaaaaaaacaaaaaccatacaacaacaacaacaacaataataataatagtaacaataaaaacaacatttgctgcataatcgcctttcccagctcccgtggtacacagccccgcgtcattgcgtcaggcccaggctgcgggtggaggggagtgggcgcgctatggttattccagtgtgccggcatctggatacgaatcataagaaagtccgagcctggcgaacacgcccgtatttggcgtgtacgacaggttcggactttcttatggtgagtaggaagcaagacggacacggaataaccatagcgcgcccgctcccctccacccgcagcctgggcctgacgcaatgacgcggggcgtaccccctcactttacagaccccagcatcccttctacaaaactcttctgcataataaagaagatcgccgcagtcggaaaagtggctgttacgatagctaccatgatcattccaaaatccggagtataggcggagttcatggcggaaataatcagcggcagggtcatcttgtcgtcggtctgaagtgcgaccaggggccataagtagctgttccagatattcataaaggtgataatggtggccgctgcaaaggttgagcgcatgacgggacagtaaatcaggaaaaatgatttcatttcacccaatccgtccactctggcggcctgaagaatttctttcgaaaatgattttgtattctgacggaagaaaaagatcagaaacgcggttgccatggaaggcagaattacagacagaaaggtgtttaacaggccccattgtgcaaacatgcgataacgggggatgagcagtgtcgccatggggaccatcatggacatcagaagcagcgccatcaccttatccttgatccggctcttgtaaatttcaaatccgtatccggccatggcggctaccagcacagtgagtatcgtggcgattaccgtgataatcatggaattcttgattcccgtcacgatgtttgtagtggtaaacagcgtatgaatattggtaagaagctgattccccggaatcatccggccactggtgatgtcgacagaggcattcgttgcgccgacgatcatccataagaacggaaagatggacagaaaagacgcaatacataagaacacgtattttccaacttttttaatcatgtttgttgcctcccgtcactttaaactggattgccgtaagaataacgatcatcaggagtatcgcataggaaaccgcggaagcatatccgaaatcaggagtatacttgaagcagaggttgtagatatactgtgacatcgtaatggttgcgttgcccggtcctccctgtgttaagtttacgacctcgtcgaacagctgcaaggttccgctgatcgaggtgatgctggtaaacagaataatcggttttaacagcggagcggttatggaaaagaacttctgtaccacattggctccgtcaatctccgcagcctcgtaaatttcaggatcaatattctgaagtgcggacagaaagaagatcatgttgtatccggtccagcgccaggtgattgcgatgataatcgtaacttttccccagaaggcatcggtcagccaatggatcggtgactggatcacatggagcgtcattaacatctgattgataaaaccactgtcggaaaacagacttttaaagagtaccgcataagctaccagagaggtaacacacggcagaaagatcgcaatgcggaagaagctgcggaatttcagtttcttgtcatttaaaagaactgcgtacagcatggccagaagcagcatgaccggcacctgaacaatcagatagagaaatgtgttttttactgaggacagaaatatgggatcgaccagaagccgtttatagttagccagcccacagaaatggagattcatccccattcctgtctgaaatgaattggctaacgctcctatcatgggataaaagcagaatactactataatcagcgtgccgaaaccaatgaataaccatcctttgataacgctggatattttcttactattcattgttttcctcccaaaggtcttaccgggcctgtgcctctgcctgaacctgcatactcttcatggcggcgtcaatgtcctctccctgcaggatcttctggatttcagccatcacaatatcctggaatgcgtacgtatacgtaccataatttacattcggaatctcttttgtaatggaggcaatctcctgatatatcttctggttgccgaagaacggaatttctttattatatacatcgctctcctgagacggtaagtacgttcccacgattcccttctcgtccagcagccggttatatagctctttgttttctccgaaggtcgattttaagaaatccagggcaatatcagaattttccacgccgtttaaaatgtaccagctgccgccgcctaagttggaagcgttggtagcccccggcgtgctgtccagtctcgggatttttgcaactctccataaaccgtcctgtccttcccctttcataatagaaggagtaaaccagcagcctttcatctgaaacgcaacttcacccttattcacgccttccaggagaccggcccatccgctgtacgttctgaccagatcttcgtccgtgatggtcttaatgatttgcagacactccttaagcgcggcattgttctccatgttcggagtcgttccgtcctctttcgtaaaccaggttccggcagactgcatggtcagcttcattaattcgatatcgctgggatccatggaaatcatctttttccctgtggcctctttgatctttttgcccatctcgatgaactgagaccaggtcaaatcctgcatgtcttcctccgtataccccgcctgctcaatcatatccttgcggtaataaagaacagcggctccgttgtcccacggaataccgtaggattttccatccagcgtcatcggtccttttttgtatgcggcaaaattatcatagttgatctcggaggttaaatccataaacgctcccggataagattttaagaatgactgaatccggtaatcctcgatgggcaccgcgttcggaagaccttttagggatccggatcccaatcccgtattcagcttctggactacatcattctggccgacttctacaatgttaatctccacatccggatggtccgcctcgtagatctccttcgccatctccagggcagcaatattaaattctttatcccatgcccagaaggtcacagtctttttatcccctgtggaggtaccggccgcctcctgtttcgccgtctcccctgtctgagtccccgtgttatcagccggtgccttgctcccacaagcggtcaggcccgcagccagcgcaactgcagctgcaaacaaatacatttttttcatctctgtcttctccttttctatatgatgcctttattttatcgttatatctcacaaaaatatcgcattttatttggcatattacagcatcatgtgattaaatcaatacgaaggcgggagaaaaaaagtacttttttataattttggtacttttttcaggtgatacggcagccggaggctgaccgaagtaccggtcccgatcacgctgtgaatggtgacgccgtattcctccccgtagatcagacgcagccgctcgtggacattgggaattccgattcccgtcaggtgacgccgcctgtcactgtttaataaatccgccgtctcctcctgtgacattccgtctccttcatctatgatttcgcagattaagtcatcacgctgctttttcgtaaaaatccggattttcccctctttcttattctggaacgcgtgaaaaaaggcattctcaataaatggctgcagaatcagcttgggcaccatgcattccatctcttcctccgccagaaaatactccacctcgatgctgtcgccgtaccgcacctgattaataaacacatactgccggaccagatcgatttcctcccgcagcgtgatctcctcctccatgtttccgatcgttttctttaaaatggcaatcagcgcattaatcgtatccgaggccttctctgtattgttctcccacgtaagatatttgatggaagccagtgtattatacataaaatgcgggttgatctgcatctgcagcgcctcaatctccagccgccgcccccgctcctgttcctctatcagctgccggacatagctgtcaatctcatccaccatccggttatagacatccgccatctgccttacctctgaatttccctttacaggactcactttttcgaatctgcggtttttgaacgtatccaactgctgaataaagaagttgagaggcgacacaatgcggcgcataataaggaaaaccacagcaatggccgtccctgtgatcagaaaacctgcaaacaggatattgcgcctgactcctgcgtaagacctcaaaagggctgcttcctccaccgtattgaccatgtacatatccagctccgggatgtaacccgatatgacaatctccggtttatggttcccctttacagtccggtaggtctccccattctccctcattgactgaacgagcgagagcagcttcggctcctcacgccccaggctgtctttcccgttgcctgatacgatctgtccgtcggaagagagaatcaccatgcggctgccctctggaacagcctcgctgaacatctgatagaactcctcctccggaatcgtaatataggccgtggcaaagctttcactggaagacggcagaaacagccttctcgctgcaattacacatttcctgtcctgaaaatcagcggtaatcccatggctttgatacgtatactgaagccgtcggcctgtttcgctgatcttcgcggagcagggcatctcctctatcgcctccaccggcacagagattcgttcccctgtaaacgagaacgcactgccctggttgctgaccgcgaccagattctcagctgtgccggaaggcacagaatcgtaatagaccttcaggatatcatacgtcttgatgaatttttccgtgccgcaggcgtcggcggcaagaaaataattctttaaggccgggtctgtctccaacagccttagcagcgttaagtaagagttattgttttcctctacgtttttcttgatattatccatcagctttgcatttaaaaaggtggaggactggataaagagatttttcgtaatccagtccgaactggccatcgtgcagacatttgtcagaacaatgctgcttaccactaccagagacagtttaaagaaggttccccaccgtatctgactcttcatagcgtttccccccgtcttttcgcccggttccggtatgtatgcggagaatatccggtctgcttcttaaagacctttccaaaatagctctgatccgtatacccaatctcctgcgcgatctctgacagagaaagttccgaggaggaaagcagctctttcgccttttccacccggatcgagttgagaaattcattgatcccctgccccatgtgggaagaaaaataagaggaaaggtacgagtaattcatattgaaatctgcagccagcgtcttcagtgtcaccggttcactgtaatggaggtacagatactcagtaatccttaagtaaagaccatttcccctcgcctcctctgtgatctgctctatctcctgataaatcgcggtaatggcatcaatgagtccatccaggctgtctgtggtgccaatggaggtcagaaaggacagctttctttcctccagctggggaggacagaattcattctcattcagctcgaaaatcgtattgtagagcgtgctttccatcagcttcttcacggacacctctccgaccgccatgccccgcagagagtttaagtaattcaccagaaccgctcctgcagttcctgctttctgctgacgcaccagatcgcacacagttttctgatccagagctggaagctgcggcagcccggtttcccgcagatcgagatagtctttccggctatcgaaaaaacggtaggaaaacagctccgatagtttttgcgcctccgcctccagtgagtctccctttccgtagggcgggcttataatcatctcaatattgcgcagataatcaataccgtcagccatcatcttatgcagcttttcctcaaacatttccggataaaagcagccgattgtatagatatatacctggctttttttcagcatgaagctgtcaagataaaaccgtccaaatgcctctttcatcagttcttccatatggccgatcgtaagctcctgtttgttggttgctccctgcagaatctttcccggctgaatggcaatcagatagtaggaggcatagccgtcactcgtttcccagctctcctcctctttaccggcttttccgggatctttggcgtggatgacccccttctttctgcctatgtggcggagcgccttaagcagataatcggattccagctccggtttcaggatataatcgaacactccatacttaaaagcacttttgacgtattcaaaatcctggtatccgctcagtatgatcgtggacacctccggatattttaaattcacggtgtgcagcagctctaacccgttcatccgcggcatcatgatgtcgcagatcatcatatgaggcaggctctgttccagaaaatccagcgcctcctccccgttggtcacttcaccaataatctcgaactcatcaccctcctgttcgataatatagcgaagcgcctttctgaccagaagttcgtcttccacgatcagaattttacatttatcaccctcgtatcccatgttaccgtattcctccctgtactttcccatagtcaaacatctgctgtctgcggaaataatccttctgtactagtataactcctgtaagcatttacaaacaaccacggttcttgtacagaatttgttaaaattataatctggggattgtattatttatcagttgattgtataataaaagcaatatgtaaatacttacattttctcgggaggtgatgttttgaatatctacgatgtatcggaacgggcgaacgtttccatcgccaccgtttcccgcgtcattaacggaaatcccaatgtcagtgagaaaacgcggaaccgggttctggccgtcatggaggagctgggctacacacctaatgtatttgccagaagcctggggctgggtaccatgcgcaccatcggcatcatgtgtgcagattcttccgacccctggctggctggtgccatctactatctggaacaggaactgcgccgaaacggatacgattccctcctctgctgcagcggttacttaccggagacgaaaaagaaatatttagaactgcttctctccaagcgggtggatgctgttatcctggccggctcccattacgtggaggcaaagcaaaaggataacgcgtatctcctggaggcctcaaaagagcttcctgttatgctggtgaatggctgtctggaaggaaaacagatttacagcactgtgtgtgacgaccggaccgcggtttatgaatcggtcaccagactgattcaatccggccatacatcggtcctttatctgtacgcaggcagttcctacagcaatttacagaagctggccggttatcacgatgcctgtgcagcagccggtctgatcatccgcgacgatctgatacgtatatgtcctaaggatttggacggtacggaagagcttttacaatctctcgccgcagccgggatcaaattcgacgccgtcttcgctgcggaagacgtcatggcagtgggggcagtcaaatacgcatgcagggccgggatcaaaattccggaagaaatgaatatcatcgggtataataactctatcctggcacgctgtaccgatccggagctgacgactgtagataataaggtggaatcgctctgtactactaccgtcactaccctcatgaaggtcttagaaggcggaaacgttccggtgaaaaccacgatctccgcagaacttatcaaacgcggtactactaatttttaatctatatatctatatttaaggaggattttcaaatgaaacagtttatggacaaggattttttactgtctacggatgcggctttaaacctcttccacaactatgcggagaagatgcctatcgtggattatcactgccacatcaatccgcaggaaatctacgaggaccgcaaattcgacaacatcactcaggtatggctgggcggcgaccattataaatggcgtcagatgcgttccaacggcgtagacgaaaaatatattaccggcgatgctacagacagggagaaattccagaaatgggcggagactctgccgaagctgatcggcaatccactgtaccactggagtcatttagagcttcagagatattttggatttacaggatatttaaacggcgacaccgcagaggaagtctggaacttatgtaatgaaaaactcagccaggattccatgagcgtccgtaatttgatccgtcagtctaaagtaaccttaatctgtaccacggatgatcctgccgatacgctggaatggcatcagaagctggctgcggatgattcctttgaagtaaaggtactcccggcatggcggccggacaaggccatgaacattgaaaaagctgattttgccgcttacatggcaaagctggcgaaagcagccggcatcgagattactgattttgcttccctaaagctggcgcttaagaaccgcatggaattcttcgcttcccagggatgcagcgtatccgatcacgctcttgaatacgttatgtacgttccggcagatgacgtcgaactggataccatcttcgcaaagggtctggccggcgaaccggtctcccgcgaggatgaattaaagtataaaactgcattcatgctcttcgtggcaaaagaatacaaccgcatgggctgggtgatgcagctgcactatggctgcaagcgcgacaacaatgcgatgatgtatgccaacctgggaccggataccggctttgactgcattaataactacgcaccatcagcacagatggctgatttcttaaacgcgctcagtgccacagacgagattccgaaaacgatcatctattccctgaatcctaatgataacgcctccatcggcaccatcattggctgcttccagagcaaatacccgggtaagatccagcagggttccgcctggtggttcaacgatcacaagacaggcatgactgagcagatgacttccctggcaaacttaggctgcctcggcaacttcatcggtatgctgaccgactccagaagcttcttatcttacacgagacatgagtatttcagaagaattctctgtgagcttgtaggcggctgggtagataacggagagtatccggatgatcagaaggcgctgaaagagattattgaagggatttcctattacaataccgtgaagtactttggttttgaagtgtaatctgtaattctaattcaaaagtgctgccgcatccagaacgggacattcgggtgcagcagcactttttattccgaaaacaacttctggcagactcatgaaataccctggagtttaatactatgatcggcaactaccatttttaataagtctatgtcagctttcatctcccgtatactatcacctgcggcctcaaaccgattcgccgcaggaacaaaattttcgagaatcaacctgatctgcggccttatctcgttttcgagacttaatttaatcatggtaagaaatgaaacaaaaatatatagcgggcaaacttggagtttctcctgctaacttcagcagattaatagcctccgaaaaggacagcttaagattaatgaaagccaaggagattcttaataccatcggatacgatatcgatataacaatcgtacctgcaggctctcaggtgaacgacagcccttcagacgggccggataatccactgcttatcgatcctgctgcccctgcaacagcctcatccgtttcatctgctcccccagaagtctgactccgcgctcgtacatctccattgtatcataatgcctgtattcacactccagcgcctgtaatacagccatataaacgtcgtaccacagtgccctgcgctcctcagactctgtcagacgctctttgccgtatccttttcggaagcagatatccacatcaaaggtccggaagccaacctccagcagcggatcgccccacaggctccgttcccagtcgatgattcccgtcacacatatgccatccgtaaagatattgcctgcccagatatcccagtgtaccagacaaggggttttcacctcttcaaagaatcttcggtctttttcaaggcattccagaatttctccggcggataccttcagatccaccgcccgtgcctctgcatcctcgattcccatttccatcatccgccggaataccgggaaccactcctctccctgacactcctgctgaccaggaaggccaaaacgcggacagatgatctcattgatccgccggtttacttcccctgtctcttttttaatggcatttatattttcttccggcaggttctcacggatagaatacaggctgttccccctcagtttttccataaggaaatacggggaagggcagattgaccggctgtcatcatacccataaaccagcgggaccggaatatccgggttcgccgccgccattttcatggactccgtctcggcaaacataatatttttctcataagacattaccggaacttcatcgggaggagccaccttcagaatcacgctcctgccgctcagcagcgtaatctcataggctacattgaaatacccttccgtcagctcctcatattccgccatccggtcatctgggaaaaacttttctgctatcttttgaacaatctccctgctctgccggttctttgtcagactctccacgctgcacacatctcctcatatttcaccagaaattccgcaatcagatcgatacagccttccacatccttctcatccgccatctctgccggatgatgcatatagcgcagcggaatcgacaccagcaccaccgggattccctctccggcaaaatgaatcttatccgcatccgtataactcagtctgctggctgcctccgtctgtacctcaataccaatcccggaagcacattcccgcatcatgcggtttaatcgtttggagacaatgggactgttgcagagtaccgggcctccccccagcctcacctcaccggagtccgccgcattcatacccaaacagtcactggtatacgtcacgtccaccacgacagccagatcaggcttcactctggctgccgtccagcaggcgccgtttttcgtcgtctcctcacccactgtagcagcgctatagacgccgcttgtacagcctcgctttcctgcctttttgaatgcctccatgataatatataccccaagcctgtcatccagcgcccggcttacaaaacggcctcctgcaattttctgcattcccgtgtccaggataaccggagcaccgggattcaccagcctgcacgcctcttccttcgaatcaacgccgatatcgacaagaaagtccgaagtttttaacccgccttcttttttgaataaatcacggtacgattccacaacgccgaaaacaggcccctgctctgtcataacctttacccggtggcccggataggtagccggaatgatgcctccgcggtcgataaccagcagccttccctgttcattcactgcggttaccatgagcccgatctcatccagatgggctgtcatcagaattttaagacggctctccgggttcaggacgcataccgtgtccccgatttcatccgttcgcagttcatcggccagcggctccatatactttcggacaaccgcctggccctcttcctcaaacccggacacggttaccgcttccaggagctcctctaaaaacctttcgtctgtcatatttatcaagtcctttcttttaaaccaaaagcaaatgcgcccttaaccgtttagttttcttacactttccctgatcaccaacttcgccgggatcaacgtctgaatcgcgatctctctgcctgttaaaatccgctctgccagcattgacaccgcctgctctcccataaaatccatatggagatggaccgtggtaagcggcggcactaaatacttggcggccggtatatcgttatatcccaccacactgatatcttcgggtatggcaagccctttttcattgacagccttgtaacagccgatcgcaagagaatcgtttgccacgaatacggctgtcggccggtccggcagctccagcagctccttcatcatctgatagccatactttggagtataccctccaatcttaacgtattcctcatggaacaggccctcctgcttcatgaagcgctgataagcataagtccggttgtccaccacctcagcgccgtccgaatccgtctcgtatcctccgataaacgcgatctttttatgcccctgattcatcagatacttcatcacctttaatacggatctctctatatcatgaatgacagagtcaaatttctccgtatccggaaccgcgtcggcaaaaaccgtcggcttccggaaggattcgatccgctccatcatggactggctgaatgtccccaggcagataattccctccagagcagccaggtcttctctcgtatcactgctgttaatccgatacttcttatacccttcctccgccagcttcttttctatcgccacacggacagaaagatagtacgtatcgtccagctcctcttccagggaataggaatagagaacacctatcttcagcttcctcttcctcttttttttatcctttacctgataatcaagctgctctgcaacctcaaaaattcgtttccgcgtctcatcctgcacgttcagcgtctcatcgtaatttaaaaccctggaaaccgtagcaatggagacaccggccttctccgcaatgtctttaatcgtagccatacactcgtcaacctcttattccccagatataaacaaatatcacggcaggcctgcgtctttctttttcctgccgtgatacaagtataacatacctatgatgtcttatcaattgcaagccgataaatgggttgccgtcaaaagatcctgaaacgttctcaaatgatagtctgccagttcgcagtctgccgcatcgccgataccggctcctgtcatacctcctgctttggccgccgcaagaccggccctggcatcctctaccaccagacagtcttccggtttctcaccgatcagctttgcagccagcagaaagacttccggatccggtttggagcgggtaatctgattcccgtctgaaacggcgtcaaagtagtccccaagtcccagctgtcccaggataaagccggcatttttgctggaggaaccgatagccagctttaaccccctctttctcagctcatccatggtcgccttcacctccggagccaaatccgccggtgacatatttttaagcagctctttgtaaatttcattcttttctgttgtgtatcgttccttttcctcttcgctcatagtgccgtcatacttttcgagtataatctcgaagctttccctgcggctgactccgcgcagccggttgttgatggtctcgtcaaagcagatccccagcttatccgccacctgtttccatgcctgatagtggtatttgtccgtatggcagatcacgccatccagatcgaagatgattccgcggtatttcataattccacccctgctttctctttctttggttctgttgtttcctgttcttttttcttctctccggagtaattggataagattacagccgccagaatcagcacacagccgccgatcatccggattgtcacatgctcgtgcagaaggatgacggaaaacagggtgccgaagacggactccatggaaagaatgatagccgctttcgtctcatccacatacttctggcagttcgtctgcagaagataggtgaatgcggtactcactacccccaagtataacacactgagccagcctgtggaagtagcatgcacagtcagctgtccctgcactgccaggaacacagcggacagaagaaacgccgtcgccatctgaaccgtgttcaaaacccggacccggtatttcggcgcaaactcgccggtcaaaaaaatctgaagtgcaaatcccacagcgcctgccagtgtcagcgcatcaccggcgcccagtgaaaaattcccgctcagcgacagaattcccactcccacaatggccatgacagctccaaggattccattgaatcccaccgttttcttatagaccaggaaggcgataaacggcaccatcactacattcgtagccgttaaaaacgcgtttttggatggtgtcgtgtactgaagtcccacgatctgcagcgcaaatccggcaaacaacgcacaccccatgaaaaatccggcccggatctcttcttttttaatttgtttcatacccggcagagaaattccgcccaggattacggttcccagaaaaaaccggaaggtcatgatctggaacggggtcagactatccagcgccatgtcactggcaacaaagccgccgccccagattaccgtcacaaggatcagtccgaatatagccagatatttcttcatgacagtcctcctgccacagttttttgtccttccaggatcaccaccttcccgttcattcggactgtcaccgggccgccctccagcaccgttaccgttacgcggttgtccggtgatacggcgatttccagcctggagcctctgtggtgaagtttgaaggaaagccctttccactccttcggcatatggggacggatatcgatgacgccgtcttcttccagtgatacgcctgcgaaaccgaacaccacagtctgccacacaccgccggcgttggccgcatggattccttctcttgtatttttctgcaagtcggtcaaatcgataaacgccgcccgctttaaataacggtatgccttcgactcatcacccacatggagccccatgacagaatagatgctggggctcaaagaggaaccgtgaagcgtccttttttcgtaataggcatagttcttccgcttcgtctcctcgtcgaattcttctccgagaaggtggagaagcatcaccacatccgcctgcttgataatctgggtctgatcctttggcacggtctttaaaatctccggccggatgggccagtcattctcatcacaggcctcaatcgtcacatctttcagattaaaatatccctcaaactgctccagaagaccattttccgttccctttggaagatacattttctcccttaccagagaccagtattccagttctttgtcccctatctttaagcggctcttcagttcatcacagacttccgcttcgtctttctcccattcctttaaaagctccaggacatagcctaagttccatcttgccagatagttggtgtacagattgttgtccaccggttcatgccactcgtccggccccgtgacacggcggatttcgtagcggtccagctcccggttgtattcgcaccggctggcccagaaacgggccgtttcgatcaggatttcggcgcccttttcccgaaggaagttccggtctccggttatcttcacatagttgtagatcccataggccaccgcagcagtcacgtgatgctcgtaaaccgccacatagcagcggtagcaggttccatccggctctatggtccagtccgggcactgctccgtgccgtcatctgccgattcccatgggtactgggcgccgcggtatccattcttcgccgcattggctcttgccgcatccagaaggtggtaccggtagttttccagatttctggccgtatccgggaacacgcaggcgaaaaacggcagcatgaacagctccgtatcccaaaacgcgtggcctccgtattcctcaccgcttaagagcttcgcccccacgttgaccctgtcatcgtgttcgctgcccgtgctcatcagatggaaaatcgtaaagcggacggcgcggtccagttcaaaatcgccctgaatctcaatattggcgtcgtcccacatgcgggcgtacacctccatatggcggttcatctccgtctcgaagccgtcggccagaaaatctgcgatctcgtctctcacccggcagtggagttcataatccgggacctcacgttccgtatagacggaggcgtattttactacctccaccgtctttccctcctccgcgtcaaaatcctgaaactccacagcagtctctccaaacgcgccgaagcttcggttcttcatcacggctctcccctcggagtaagcctccataaagctcccggttcccacgcagagctttctgtccctcgtagtcacctccacgtaagctcccgtatcggtaagcgtgcggttttccagcagcctggtgtgcttcactttaaaacgcggggcgtcacagaagtttatgacggagccgtcaatgatgttttccacctcgatgatcccgctgtagtttagcggcgtcacaaaaagacggattcccatgcggtgaacgttggaccggctcaccatccggattccttccacctcggttcttctccccttcttatcttccaggacaaaccgttttgcaagcagcgaatgcttcatgtccagagccctggaatattccaggactctgcacgtctcgatgccaatcagctctttctccacatagagctttatgcccagccagtccggtaagttggccagttctctcataaaggtctctgaccgatcaaaaacgccgttgatataggtacagggaatgctctttgccgtccgctcctcataggcgcccctcgtccccagatatccgttggaaaggcagaaaaggctttcgtattttaaattttcctccggatcgtagtgatcctgaaggatcatccacgagtcatcgctcaagtaattccttatgtgttctgaaaatcgctctcttatcacgtcttttccacgcttccttcctttaatccagatattttattttcgcctgcgccacatcttctcctgcaccgatcacccgcatggtgaaactcagcgcaaaatcctggcgtctgactttatatgcctcctcctgctcctggccgcagctgttgcttcccaggccggaatggagatagtccatatgaatgattacgtcatccgcctttttgatctgccacggatactttgcttcttccagactctcctctgtgtaattatggatattcagtcccagaggccgctctgccgtcaccagaaggctgtgctccccgtcgcccagagagtaccataagacctcctcccggtggccgttttcctgcggagacacgtaattaacagacataccgtccacatcggagcggtaaactcccatccatgcggcttccctgctgtccgcgtaattctcctggaatcccaggccgtaccatgcggcgttctgaagttcctttgccgccttcatctgaattccaatgcggggtaaaaatcccggttccgcctttcctcgctgaatctgctttccttccaggcggcaggtcacagagccgtccccatacaccgtatagtgatagtcacataagaacccccacgactggtttaagcagccaaaatacgtaccgatcatcacatcgatgcggtcgccgcgttcttctgtccggaaatactccgtttgttcatccggaagctggataaaatacttgttcagccagtcatccttcttatacatatcattgtcgatcgtggcccggtaaaccgtaacctccggccccgccgtcacatacgtctttccgtccaccgtaaagcgttccagccggccatagatcttatggaatacaacctctgaagattcgccctttaccgtataaaagattccgtcgtcttctgccgcaaggcgtctgcctgtttcgtggagtacggcggtctctaaatgttcctttaacagaaactgccccctggatatctcatgtcccttaggggcgtaggctgcacattccttcaggcacaccgatatatttaaatagtaatctgtgttgcgttccggtataaaaggctgatatggaatttccaggcagcagacctctcccggcccggccttcaattcttcgatcatcccctcttcctgaacggtctcatcacaggaaatccaccatttcacgcaaagatgagacaggtccttaaaatcataccagtttttcagagcaatctcccggccgctccccgtctttttcaggatttccacaggggcaatcacctgccggtactcggcaagcgccggcgaaggggtacggtccggcatcagaagaccgtcgatacagaaattcccgttgttggggaaatccccatagctgccgccgtaccggtaatattcgtgtccctcttcgtccttcgtgaagaatccgtggtcgtaccattcccagataaaaccgccctgcaggcgcttgtatttccggaacacatcctggtacgcttttagacagcccgctccattccccatcgaatgaccgtattcacacatgacgtggggtttatgattccccttctctccgcggccgatctcctccagcttttccagccaggtgtacatggtggagtagatgtccgccgcttccgcctcgaaatcgccctcgtagtgaatcagcctggacggatcgagggaccgtacggcctctgcactctttacgaaattacagccgaatgcagattcattgccaagagaccacataatgatggagggatgattaaaatcccgctttaccatgcggacggcacggtccacgtacgcggtttcccacgccggatcgtcggagatccatgtatagttttccacccactcgaacccgtggcattctaaatccgcctcatcgatgacgtagaggccgtattcatcgcacaaatcatacaggcagtcggcagcaggataatgggagcagcgcagggcgttgatattgtgctgcttcatcagcacgacatcggccttcatctgatcgtaagtgacgacgcggccttcggtcggactgtagtcgtggtggttgactccatttaaaaggatggcggttccattgaccgtaaaattcccgtctctgatctctatggtacggaagccggtccggactgtgatctcatggccttcaaacgtaattttaacctgatagaggtatggagtctccgcagtccacggctttaccgttccggcttcggccgtgattcttatttccctctgatctttgcaggaggcaaactctccctctgccatcagacgttctccgtcaagcaggctccatgtcccctttccgtctcccttcacctctaaatcgatgaccgcatggccgcatccgcaggcagcgtccagcccggccgtcacgcggcagtctaaaacagccgccttcggctcgttaatcagctcgacgtccctgtaaattccggaaaaccaccacatatcctggtcctccagatacgttccgtccgaccatttgtatacacggactgtaacatcgttttccccctgcttcaccagagaggtgatatcaaactccgcaggcagacggcttaccttgctgtaaccggcatggacgccgtttacccagatatcgcaggcactgtccaccccgtggaatttgagaatcgtgtcttcctgaagccatgcatcgtccaggaaaaagcttcttttatagatgcctgtaggatttttcgacggtacatagggagggttgaccggaaataagtacaggacatccgtataatgcatatgatcgtatccgcgcatctgccatacggaagggacgtcgatggtatcccagccctctccgcttcccggttcaaaaaatccggccggtgacaattccggagcctccagatacagaaatttccagtcgccgtttaagctcacatgtctggcagaatcccggtagaaagaggttcttgccctgcgtcttccgatcccggtcattctctcatcttcccaccgtttctttttacgtctttccatagttgtctccttttatttaatcgctccgcttgttccctccacgatatgcttctgcgcaaagaggaatacgataatcggaggcagaatcatgatgactgtaatacagagcatcggaataatctgcgtgctgtgaacgcccttaaaggatgccagcccgagagccagggtaaatttactcctgtcctgtaagaaaatgagcggtccaaggtagtcattccacacggtaatcatgttcagaacgccgactaagattaactgcggcttcataatcggcatgaaaatccgccagtaaatctgaaatgcgttggcgccgtcgatcctggccgcctcctcaaagtccttcggcactcccatcaggaactgcctcattaagaagatatagtaggcggaaccgaaccaggccgggatgatcagcggcttcagcgtgttgatccagccaaaaatcttaaattccatgtactgcggaatcatcgttacatcccacggaatcatcatcgtggaaagcagaatcataaacagaacgttttttcctttaaactgatatcttgcaaatccgtaggctaccagagaacaggataaaatctgtcccgccgtggttccaaccgttaccagaatggagttccagagataccgcccgaacggctgtgccttccatgcatctaagtagttatccaccagccattttttcgggaacagtctgggcgggtaagcgatggcctccgcttccgtcttaaatgtggtaaacagcatgtagatgaacggcgacaggaaatacagcgccatcagagtcaaaagcacgtagataatgatctttgatttcttcgacatactcatagttacttcctgcctttcctggtttttttcgaattcttggcctcggtctcatagaatacccatgcagatgaggacttgaatacaagggcggttaaaaacaggataatgacaaacatcacccatgcgttggcgcttgcatatcccagcttatggtgcttaaacgcattattataggtaaacattccatagaaatacgtagattttaacggtcctccgtttgtgagcagcatcacgagggtcagttgctggaacgcgctgattaacgacgtgatcaggttaaacagaatggttggcgtgataatcggcagcgtgatggaaaagaactgtctcgccggactggcgccgtctaaggaagccgcctcgtatagatcgatgggaatactcttgatatccgtatagaaaatcagcatcatggttcctacgccaaacgcactcgccagaataacggccagaagcgcccaggaaggatcgaccagccagttgggaccctcgattcccagcagagagagcagatagttcagcactccgtagtttccgtttaagatccagccccagatgatggagatggcaacgccggatacaaccgccgggatataaaagatcgttctgtaaattttaacccccttcaccggctgcgtgatcagcatggccagaaacagggcaattatcatgttaaggggtacgaagattgcggcatattttaatgtgatgaccagggatttgtaaaactgtttatcttttgtaaacatctccacatagttccccagtccccggaatgtcggggtggatgtgatcggccagtcaaaaaagctcattaccagcgacaggattaaagggcccgccgtaaagacgatgaacccgatgatccatggcagaataaagagatagggagttacctttccagggaattttttcttttccatattttacctccatttcagttccccgcgcgggactgcccggcgcggggaatacctgcagtttactgcatctcggataccgcctcattcagtacgacagccggatcttccatggtactcgggttatagacgcgttcaaaggttaagtccagagtatctttcagttcagaccagttgtccacaataaagctggcaggcgtgtaaccgctgctctgctccagcatggagtagaatggagcgttggccggatcttccagtattttctcagactctacgacagacttgagagccggaagttcatatccgattctggccttgttcatctcctcgcctgtccagtactttacgaactcccatgcagcatctttgtgcttggaatctttggagatcgaaacgcctgaagagcttaagatgctgacggaatcatgtcctgcgcctgcaaatgccgggatatcgacgatcccataatttaaaccgtcttcatcgaaagaggcaatcgaccatgctccgtagatatacattgccgtctggccgcttcggaactcgtctgtaccattcttctccgtggcgatggcgtatccgtccttctccatgttctggaacatggagactgcctcgatcgctttctccgaatttaagtttccatccagatttccgtcctgatccacaaaagcagttccgttgctccataagtacatctcataatcgtagggatccggcttcatctggaaggagaagcccttcacgccgtctaccttctcggtgattgtctttgcagccgccattaagtcatcccacgtccagtcattggttggctcagcaactcctgcctgtgcaaagatgtccttattataaaacagcgcgtgtgtggtaaaacctaccggaatgccgtagaccgaatctcccttggagttatatggccacagagcatcatagaagttgttcttatagtccgccccctctttttctatgtaggaatccagcggttccaggccctcgtaataggacgggtaatcccacatgtagagcacgtccggcgtatctcccgatcccatgccggcgctgatctttgtatcgtactcgcttccgtaagcttccagtgcaacctcgatatcgtcatggctggcattaaactgatccaccagtgcctgctgtttatccagatcttccgcattgtcccacgatgcaaaacgaatctttaccttgccgccgtttgcctggctgtcggccttcgatccgcatccgctgagtaccgtcacagccactaaagaaagagccgcaatcaccgcaattttctttttcatatatatttcctccttaacatttggtaaatacatcgtagcacactctagtaaaatattcaatattttactaagtaaaaatcacattttcaatattatgcacgattttgtcaattgctttttgtgcatattttataataaaaatgactattttttaactaccaacaccttttcgggaccatttatgcttttttcaaggtaaaattttactattttactttcctgattttatttttttaccgcgctgcccggctgcaggaaattaccattctgaaagagacctggagaaccggaaagcaaagggcagccctgaacttctattcaggactgccccttctatttcactctgtttttttctgtttctccttatcttccatataacatctttcaatcaatcatcatacctgtttttacataatcgttaatatagatttgctgcctgtttaacaagtttctccaggagtttctgcatatttcccacaacgggatgattctccagcccatattcccccgctacctgtttcatcttcggaaaggccagccaggtacttccggcctcatcctcccaaactgcaatcttaagggggagttccagtgcgatgctctgatccgcctgcatgagtccggtccccaccttcggcgcgccgaataccagcactgtcgtgggtctcagctccagccctgcctctgccgcgttcttcgcatggtcaaactttgcaaataccggaatgtccagagctttcagctgcttctcaagacgttccgccgtctcgtctgccgaaaattgtccttccatcaaaaagagccggttgtcatcgtagttcgtggacagcagatcgccaaacgcaccggcgatctttcttcccagattcgtaaaatccactccctctttatttgccagaagggtgacacagaccagttcctccggatgggtaaaccggcttagaaatgaggagaagcccggcacagaacccttgatatccatcagtcctctgtgatggtaaaactgccatccggcactgccccaaacggtacggccatccggaagcgtccacggagcataaagcaccgcccggttctccggctttttgatcagaacgccgcccgcaaggccgatatcccagaaggagatatcctgcgccgacgcccacacatcaccaaaaccgcggagcgcagaggaatgcagctgcggatatacgcttccgtcactcctgtaactgactgcagtctctgccgggtcaatataccggccgtctgtcttgaatatctggtgtacgtattcgctcagggataagtcctcctgacggaaggcaggcaggccgtcagaaaatgaggtatgcttcaggcccagcagctcaaactggtttttcttcacaaattcctgatacgtcataccacttaccttttcaacgacctctgttagaagaaggaaatttgcagcactctgttccacctctgttcccggctcaaacctgaggggaagatcggccatcagagctttcagctcctcaaatgtccactctcttaagagactgaaaccttcctgattcctgtaatctgccagtcccgaggcatggtgaatcaactggcggacggtaatattcttccagtgttccggaagtccctccacatagtcagaggctggtacatctagctccacgcttcccgcctcataaagctgcataatcgccacagccgcataaccctgggaaacagggcctgccggccacagggtatttacagaggcaagacgtttctgcccggcatccgaaaagccgtatcccaccacccgcggaatatagggcgcctgaacgatcgccagggtcagacccggaatctcctgttccttcataaattcccataccatctcatccacggtttctccaagatacgatacatccgcgctgcctctcatcttcctctctgtgtgttctctcgtgttcattcaatgctccttttccaagccgggtaccactgtagcggctgtgcttcctgccgttgatgtagttttggcggttactcgtctttaaaaactgcgtgatctggttactgttacttttttaattacagtttatactgtaatagtactcgttacagttatatttgtcaagaagcttttgatattttttttaaaacggtaaaaagcggagcaccgtctccggcactccgcttctccacagtacagcagtccgcactgtttttataaatacagaatcaaattgtttcaatccacgctcaccaccttagaggatgggagaatccttgctaatatttgttaaacaataaccttaaccggacatttcgccgcgcacttcccgcagttggtacacttctcatagtcgattaccgccacattattatccatgtggatggcatcgaactcacactgcttcgtgcataaggtacaggcgatacagcctgattcacattttgcctttacatctttgcccttgtcatgggagctgcactgaacgaggtgctccgccgtatacggcacgagctcgatcaaatggttcggacaggaggccacacatttgccgcaggccacacatttctccttatcgacaacagccacaccgtcaaccacgtgaatggcgtcaaaggcgcaggccttcacacaggagccatatcccatacagccgtagacgcaggctttctctccggcgcccggtacgactgtgatcttcctgcagtcgtccataccgtaatagttgtactgaaccttcgtcttatcgcaggtacctttacactttacaaaagccactttcttcactgcgtttccgccgtccacacccatgatggcgccgattctgcccgctgccgctgctccgcctaccggacaggcatccacggccgcttcaccggcggcgattgccttagccagagcgtcacagcccgcatatccgcagccgccgcagttattgcccggcagctcattgcgcacgagaatctctttttcatctgtttctactttaaatttttcgctggccacacctaagaagacaccaatcagaataccgaggatccctactacggctgccgctatgataatacctgttatcattttcgtctcctccccctaaattaatccggaaaatccgaaaaacgcgattgccatcagtcccgcggtgatgagcacgatcggcgatccctggaaggaatacggaacatcgttatgctcaattttctcgcgcacaccggccagcattacgatggcgatggtaaatccaacggaagtaccgacgccgttgatcacgctctctaaaatgctgtaagacttctgtacgttggttaatgccacaccgagtacggcacagttggtcgtaatcaggggcagatacacgcccagcgcctcatagagcggcggcatggacttctttaagaacatctccacaaactgcacgagtgcggcgatgaccaggataaacacaatagtctgtaagaattccaggtttaagctgaccagaatccccttgtaaatcacgcttgttacaaacgatgcgatggtaattacgaaaataacggctgcgcccatgcctgcagaagtttttacgttcttggaaacgccaaggaatggacataaaccgaggaactggcttaagactacgttattcacgagtgctgagccgaccgcgattaaaaacaattctttcatctatccatcctcctattcttcttttttcgaggtagcggcctttaattccgcttccttcttagccaggtcggctttcttcgatgccagggcatcctcctctgcctgtctctttcttgtctccagaatctcatggttggacatacaggaagagccggaacagttcatacagtcgccgccgcacgccagtctggactggggaacggaaccgttggtggccgatggagccttgaacttattctggagcgctgttaagacagccagcacgaagaacgcgcccggagccagaataaagatggaaatatggaaatcctccggaataatcacatgtccgaagaatgcgcccgctcccaggatctcacgcacgagaccgatacaggttaaggcgacggtaaatccaagacccatgccgattccgtcgaaggtagatgccatcaccggattcttggaggcgtatgactccgcacggccaaggatgatacagtttaccacgattaacggaatatagatacccagagccgcatttaaacttggcacgtaggcctgtaaaagcagctgcacgatggtaacaagggttgccacgatgacgatgtacgcaggaatcctgacacggtcgggaataatcttgcgaagcgccgcgatgagcatattggaaaacatcaaaaccacggttgtggaaagtcccatacccagtccgttgacggccgaagtcgttacggccagcgtcggacacatgcccagcatcaggacgaaggtagggttctcttttacgatgccgttatataaacgttctgtacatttattcatgatcccacctcctattgcggtatgcagttagctgcgaagtaaagagccgcatctactgcatgagtcactgcgtttgaagtgatggtcgcaccgctgatcgcgttgatctcggaatcggaagtgctgcccgtcttcgtcacagtaaattcttcaactgtcttatctttgtactgatccttgaatgcaggctctgtcgccttcatgccaagacccggtgtatcgctgatctccagcagctccacgccggtaatctttccttcgtttgtaataccgacggaaaccttgacggtaccgccgtagctgtcgtcagaagaagccgttataatatggccgatcacattgccggaagcgtctaccgcctttaatgccacggtcacctccacattgccgtactcaggcttctgttccttcaaagtctcctttgaaagcactacctgatcctgaatcgcctggtcaaacaggaaatctgtcgcatccggataggccatctgatatttatgaaggctttcctttgcctcagccatctgaatcggcaccttggtgatctgatacacagcgccgagaagcagaccggaaatcagggtaattgcaaataaaatccatgcgtctttcatgaatccgccttttttcatcttacttgccctcctttccaaacgcctttggaagggtaatcttctcaatcagcggcaccagaatattgctgatgataatcgcataggaaacgccctctgcggatcctccaaacaaacggaaaagtccggtcagcacacctaagagaataccgaacaggatctgtcccttcggtgtaatcgggctggtcacataatcggtagccataaagaacgcaccgaagatgataccgccgccgcataagtgagcgagaacatatgtgaaatcctgctgtccgaaaataaacacgaagacagcaaaggtgattaagtaggccgccggaatccggatggtaatgaccttcttgattaataagtaagctgcaccgatcagcagggcgatcacggatacctcgccgatggttcccggtattttaccgatgaacatggccggaatatccactgcctggcctgcctttaaggctgcgagcggtgtggggcttactaccacatcattgtatgtgaaggtagtcatcttgcccgcaaatgcaataagtaagaaacatctggccgccagagccgggttcatgaagttctggccaaggccgccgtataactgctttacaacaataatagcgaagataccgcccagtaccggaatccacagcgggatgcctggcggcatgttgagcgccaggatcatacccgttaccagggcgcttccgtcgctgatcgttaccggttttcccatgagcgtctcatacacgtattcgctgagcacacaggagagtactgttgcaagaatcacaagtgccgcttttattccgaactgatatacaccatacgcagtcgcaggaatcatggcaatcgcaacatccagcatgatattacttgttgttacctggtccctgacatgaggtgatgatgatacgtttaataatttactcattcttcaccctcctacgctttctttctgcttgccgcaaccactttacgcatttccttaaaggcctgggttaaaggtctctttgcaggacacacatacgtacagcagccgcattcgcagcattccataccattcaatgcggtaaaacgctcgatatcggaacgttccgccgcgtccatcatcatctggggaaccacatggctcggacagacacttacgcatcttccgcagcggatacaggcggaaggagcatgaactgccacctcatcctttgtcatagctgtaagtgcggatgaggtcttcgtcaccgggatctccaggttaaacagcgcctgtcccatcatagggccgccggaaatcactttttccggttctgtcttaaagccaccggaagcctctaagagctctttgtagctggttccaacccgcacactgtagttctgcgggctggcaatcgcatctcccgtcacggtaatgatcctgcggatcagaggagttgtcttgcagaccgcattataaatagaaataaccgtatccacgttgtccacgatacagccggcgtcagccggaagcatggaggaattgatctttctgcctgtaaccgcatagatcagggaacgctcaccgccctgagggtacttggtgaggagcggacataccgtaattctcggttcatccttgaccagctccgtcatctttttgatagcctccggtttgttgttctcaataccgatgacccctttggcgttgtcgaacagcgaaaggatgacgtttaatcccttgacaatgctttccggttcttccagcatcatgcggtaatccgaagtcagatacggttcacactccgcgccgtttacgatgatcgtgtcaatcgcggactcatcctttggcgtcagcttaacatgggtcgggaaacctgctcctcccagaccaacgatgcctgcctcttttacaatattacggatctcttccttggataaagtcttcggatcacggtccctgccgaagccctccaccgtctcatatttgccatcattctctacaatgatggaaggcaccatggcgccgtttgcaaccattctcggttccagagccttcaccgttccggaaacggaactgatgacgcaggccgatataaatccgcccggctcaccgatcttctgtccaactaatacatggtcgcccttcgccacaagtggcttcgccggcgcgccaatatgctgggacagcgggaaaaccatctcgccttttggctgcagtaccgatactggtttactctccgacagttccttcccctcgtaagggtggatgccgcctttaaatgtagccaaacccatctaactaaccctctttctatacattcttaatctctcccggcaaaatatcgcaacctcaattttgccatcttgtacagtataacataattcaggaatcgaaacaattgaaacttacacattgtatactgtgttctttatggaaattcttccatttatcagataaatgcagggtagatttgtctccaatccctgttaattttatgacaaaacttattaacccaggttatgttatgtatttatataaatacaatcatcttaaaatatttctgccgcagtgccgccgtttccctttttattcgacaaatccgttctgctctgccggttactattgtgaaatttttattcatttctccaattttctttcagaaaggacgaaagaaaccaaatattttttaaggtcatcgaggcagttatatattagaaaatttaataaatatccagcttcctgactgccgcaagcagttctgccaccttgtcccgggctaccacctcaaaacacgatgcatggtcagaatccgcataggaatacgacacttcctcccccaccgtagttggatcggcgatccagtccttacaggaactgtgaagctgccggacgcccgttttttccgccagttctcccgcatttcccgcatggatgccgctgccggccagtatctcgattcgctccccaaaccgttcctgcagttcctttagcagtctccagccatcgggggccttacttttcagtccgctggtcagaatccggtcaacccccagcgaaatcagctgctccgccgcctgaaacggatccttcacacagtcgaaggcccgatggaatacggcttctccgcctttgtccttaatggccttcaccatcagctccgtctgagataaatcaatggttccgtccgccttcaggcacccgaatgcaattccgtccgccccgtgtcccatcatcatctgacagtcaaaaaacatctgtttaaaatcagacacgccataacagaaaccggcgccccgcggtctcgccatggcgattacctttaagggtgtttcccgttttaccagcagaagctcggccatggaaggggtcagccctcccagcgccagcgcgctgtttaattcgattctctccgcgccgccggctgccgcctccagcgcgtcaaagtaactcccgcagcagatttccaccgtaatttgtcccatgctttccttcctttctccattggcttctgccggaaagagtgcgcattttcccagcctgcgcctctcctccggttcgtgtacgccacacagagacagtatatcaggttgaaaatgccctgtcaatttttacggcagttcctgacgcaggaaaaagaggcagatacgctccgcctctttttcctgtgcctgatcggctacttcgtcgtaatccgcatggatccgtcatttgccgttataatgatatttttttctgctccattatattctcttaagtcttcgccctccaggcttctgtcgttaagccggatattgccgtacttcattgtcagatcgtaattatactctgtctccgtgccagccagttccagtttgatatctccgtacttatttataaaggtaccgtttttaatgtccgccatcttgatatcgcagatgccgtcagactgctctacgcttagggaatccgccgcgaccgcgctgcttttgatacttccgtaattgttaaccacggaaatattttttgatacaaggtccatcatggtaatccggctgtcggatgcctctatatccagccggtcagaattaattctctccaggctggtgtctccgtatttgttaatgatatcgagtgatgtgaaggtcccgtccgagcagcggatcactccatctgaagcgttgagaaacgctgactcggccttcacgccgtttagcctgatgctgccgtatttggatgtgagatccagggtcccggcatccggtccggcatagacgacgtcgctgttactggtataaagtttgactgtattcatgggggtgttctccggcacgtagatcgtcagacttccactctcatgtacgtctgctgtatttaccacgaaaaagccggctgatccccatgtctcactggaatttgcatcaggaacgcaggtaaaggtcaggattccgttcttcaccgtgtatacagggtccttatctcttatatacaggctgtattccagataacaggaatcatctccggagggttttacggtaatgctgccatagtctgccctgacgtccatggaggtgaacggatcaatctccgttttctccagctctaccagcttcccggcattcttagttctcacctcccggttggtatagagcccgctgcggccgatccagaagcccggttccccgcccatgacgaatccggccagcgacagtcccagcccggccacgatacagatacccgctgccgccagcgtaccgcgcattactttattcatgacttatccccccttgtcagcagtctttttgtaaatccggccatgccccggtaaatatacttacagcttgcgcagccggcacagatcaaaagcagtcccactccggattctcccaaggccgtgcccagaataaagattccgctggccatctgggctggaaggaaatagattcccgccacagcgctcacgattccaacagccacaaaaaccactccgcagataagaagggccgcaaatatggaaaaaaccataataaccatagccagaccaaagatgacgacagccagcaaaagcggcaggccaatcggtgcggcgcacagtgccagaagaacgatccagagtgtggataagcctttcctggcagccttctccggtttcggctccgccaggcgcttcagtgcaacttcctttacgatctgagttgcaatcccttttgcatctcccagttcttccatcacttccgcttcccgttccggtcccgcgtcatcaaaatattcgttataataggaaagagcctcctcccgttccgccttcggaagacgcttcagcgcctgctccagctccttcatatactcattcctgttcatcctgttcacctccgacgagaatttcatccgctgcagctttaaactcgtcccactctttcctgtagaacgcaagccgtcttctgccttcctctgtaatcctgtagtatctcctgtttcttccctggtactcctgatcgtatgtctccagcagcccggcctccaaaagccgcttcaaaaccgggtacagggaggactccttctggctcgcgatgctcttcagccgctgggcaatcatatatccgtatgcatcttcgccctccgcaatcgccagtaccatggcatccagcagcgccggcgtcaactgatacaccatctcatcccgcctcctctcctcacctctgatccttctgtaagatccggcatatatatttcattttcctatattatatttcatataatatatatattgtcaacgtatatatctaataataaactatgctttttcttaagtaattctaaagctttgaaaggacaccggctgcctccgccgcaaaaaaagcagacgggacgctgccgtataccggcttcgcgtccgtctgcttcctgtctgattcatctgtatttatttatgcgccgtgctgtggccaaggccgttaatccagttcctttaagccggtatagagttcgtaataccgtcccttctgagccagcagatcctcatgatcgccccgctcgatgatctctccgttctccagcaccatgattgcgttggcgttgcgcacggtagaaagccgatgggcaatgacaaatgtggttctgtccgccatcagacggtccatgccgtgctcgatgtgcttctctgtgcgggtgtcaacggagctggtcgcttcatccaaaatcagaatcggagccttggaaatagccgctctggctatatttaaaagctgtctctgaccctggcttaaattcgctccgtcgccttccagcacggtatcgaagccgtgcggcagacgcatgataaaggagtatgccgaagccgtcttagccgcctggattacctcctcgtcggtggcgtccagcctgccgtaccggatattctccataaccgtccccgtaaacagatgggtatcctgaagaaccatggcgatattgtgacgcagattatcgcggctgatgtgacggatattgacgccgtcgatggtaatagaaccgctctgaatatcgtagaaccggtttaacaggttggtaatcgtcgtcttacctgctcccgtggagcctacaaaggcgatcttctggcccggcttcgcatagaggctgatgtccttaagaatcgtcttatccggattgtagccgaaagtgacgttcttcagctccacataccccttcatcggatccagcaccgccgcatcgccgtcatccaccggctccggctcctcgtccataaccgcaaacacacgctccgcaccggccagagccgagaatacgttgctgatctgcatggagatctcgttgatcggcctggagaactgcctggaaaagtttaaaaatacggtgagtccgccgacgtcaaatcctcttaaaacacagagcagaccgccgattgccgctgtcagcgtatagtttaactggcttaaattactcatgaccggccccatcatgccgccgaagaactgcgccttgatcatgttgtcccgcaggtcctcatttaaaatttcaaactcttcttccgcaatgtcctcgtggcagaagacttttactaccttctgtccgctgatcgtctcctcgatataaccgttgacggcaccgagggaggtctgctgtgcggagaaatacttctggctcttgcccgccacataaccgcctgccttcatcatcagcggaatcataaatacggttaccagcgtcagccagatattggtataaatcatcagcgccagcgtaccgatgatgcttaaggcgccggaaaacagctgtaccagggtgctgctcagcatctgccctacggtatccacgtcgttggtaaatcggctcatcaggtcaccattattattcgtatcgtaaaaacgtaccggcagcttctgcatcttcgtaaaaagctcatctctgatcttctgcagcgcgttctgggctacggtcagcatgactctcgactgtgcatagttggctgcaacgccgatcagatagatggccgccataaagaccagcgaaccggccaggccggaaatgcttccccggcttccgtccatgggagcgatatatttattgataatcggcctcagcatataggaaccggccagggttgccactgtattgacaatgacacagaaaaatgccagccccatgtgaagcctgtagccatttaagtaggacagcaggcgtctgatggtctctttgctgtttttcggcataccgcccttcccgtgctgtctgccgtgtcccgggccgcccatgggaccgcggcgctttgccggggctacattcctgccgtagcgccgttttaaactctctacccgtttctgattgtccattatgcgctcgcctccttctcccggtctctctgtgaatagtaaatttcctggtaagcttcgcaggtcttaatcagttcttcgtgggttcccattcccacaatcataccttcatccagaacgataatcttatccgcactctccacggaaccgattctctgggcgataataaactttgtcgtttcttttaaggtagtctggaagcactcgcggatctttgcctccgtagccgtatccactgctgatgtgctgtcatccagaatcaggatcttcggtttctttaacagggcccgcgcgatacagagcctctgcttctggcctccggaaacgttgacgccgccctggcccaagtccatctcatatccctcctgaaaagaggtgacgaatccatccgcctgggcgctctcggcaactgcacggatctcctccatggtcgcatcctcattgccccactgcaggttttcagcaatcgtgccggagaacaggacatttttctgaagtaccatgccgacgccctctctcaaattccggattgaataatcccggacatcgatgccatccaccagcacctggccgctgtccgcgtcatagagcctggggatcagctgaacgagtgaggtctttccgcttcccgtggaaccgatgataccgatggtctctcccggattggcagtaaaattaatatgatccagcaccagctcgtcggtgtccttcgcatactggaaacagacatctctaaactcgatccgtccctctgtgactacggcgtcttttcttgccgcgtgctcatccgtcagatcaatctccgtatccaggacctctctcacacgctttaacgacgccatggcacgggatgcctgcaaaaataccatggataccatcattaaggacatcagaatctggacaatataggtggtaaacgcggtcaaatcgcctaccggcatggaaccgccgatgattaagtttccgccgtaccacacgacggccagcgtcgtaacattcatggccagcatcatgacaggcatggtggcgattacgatcttcatggcccgcaggctgccttcctttaagtcttcgttggtacggcggaatttttcctcctcataatcttcccgaacgaaagacttgataacccgtacattggtaagtgcttcctgaactcctgagtttaaccggtcaatcttcttctgcattacctcaaaccgggggaatgcggttcttaagatgacagcgatggcaagcaggagcagcggaatcacgaccagcagaatcgtcacaaggcggctgttcattaagtatgccataatcagaccgccgatcagcatgcccggtgcgcggaacatcagacgaagactcatcatcagcacattctggatctgctgaatatcgttggtcagcctggtcacaagagaaccgctgctgaaatcatcgatgttcttaaatgaaaactgctgtaccttgtcaaatacatcttttcttaaatcagagctgaaacagatggatgcctttgatgagaaataggccgctccaattccgccagcagccataacgaaggccgtaaccaccatcacgccgcctacggcgatgatatagctggtatctctgttcgccacgccattgttaataatcagtgacatcagcttgggaagcatgatctcaccaaatacttctgtcagcatcaaaagcggtgccagcagaaatgcgccccaatagggctttatatatttccagtatcgcttcacgttatgaatcctccctttttgtcattgtttttgccgttatgtcggacaaattcgcataaacgcgctccagatacccttccatgatctgaaactcttcctctgtaaagccgagaaacatctggttttccacgtttttaaagaactggcggctgtgttccaccacatcgcgtccttcttccgtcaggcagagcttattatagcggttatcctcctgatccacgatcctcgtgatataaccgcccttctccagttttttcaccgacaccgcgaccgttgccgcagtgacgtttaaatactccgccagctccttctgagacgtgttcggatgctccgccattgctgtcagaatctgatgctgacttctgtagacccctgtcttattcagccgctgctccagaatactccggtgaagcttcataatcctgatatactgcgtcagcacgcgatgtgccggagatttcatccactcgctgtcatgacacggtccgctgccacaagatttcattgttttccacccctttcttcatcatatggtaaataattaggtatgtgatagttagctaattaataattaggtattatactcttactctgtaaagaatacaataggataattatgaaaattatgtgaactgtaaaaagaaaaaagaggccccccggcccctctttgtcatttctatatattatgtagagattgtaaagccgctgtcacatgtccagcgtaaccacggtccacctgctgttctgcattatgaggaagcagggccgcttcattttatagcgatagtagcgctccatacagtttacaaacaaacggtatctcatcaggcttgtacaaacaggataaatcgtcatggtttttcctcccttatcattctgttatagtttatgcaggaaatgtgcctgttatgaccacttttttcggtggatcatagcagccccatctttttatttgacctgttgactataataaaacgctgaaaggtaatcacgggaagtattttaaatattctttcattgcaaacgtgatcctgtttcttattgcaggctttatatttttataaatcgtaatacttttgatacttgtttttctttgagcattcctctacaatgatgctgtgaactatattgttatcgaaaaggagggctgcatggatgaacagtttatttttgattatctacatcatagttattatagctgtacctgttgtcttttttatcctgggatatttcttagtgaaaatggccgttaaaaatggtattttagaagcctataaggagatccacaaggaccagccgtaataaataacgctgctcccgggaagacaggctgactgccggtacgaagcagtcagcctgtcttcccggaagcaaaagagcaactcacgctgtttatctaacgcctgatagacttcatcatccaatatgcatctgcataagtaccatcctgatacttcatattgtttggtaaggttccaaaaatttcaaatcccatcttcctgtagagggataccgctctctgattatcagctacgacttccagctcgatctgctccaggttatgctctctcgcaatttcaatgagtttcccgatcatggcctttccgatgccgcggccagtatacttttgatacaatgcgattccaaggctggcgcgatgcttaaatctggcagctcccatccccatcagggaacaattaccggcgtactccccatctacaaatccgagaagcatgatattctgatctgactcattctgattacgtataaaggtccgctcgtcctccagcgttaaatcgatctcttccggttcttttactaaatatctggtttcaccgcatgtcgtctttaagaaatccaacaacatttcagcatcttcctcttctgcatttctaagaagaagctgcggtccgccaagatctatgatttcttcctcagctctcatacacatccctcgtatttttgctaaacaacagtaaacccttttgccgccagacacgcctcaaccgcccggatatcatccgcatggaaaatcaggatcggtttattggaatcgcggttaaaggataagtaaacgtaatccacattgatattgctctctgagagagccattaacagatgatgaagatttcctacttcatccgccatctcgacccccaccacatcggtaagcttgcacaaatagtccgctttttccagtgccgccaccgccttgtccggagcggatacaaccatacggataatgccgtactctgcgctgtcattggttacagaaccaaggatattaatgttttcctcctcaaggattccggtgacatgcttaaatgttccctttctgttttctgcgtaaattgataattgcttcagcattttcttatcctcctgattgtttgctttgccttgccgtccagggtatctctgtcactttacaggatttcacccagaatctctttcagttttttaatctcctcctcggacagagtcgttccctttcccatcttttcgtgttccggcgcccagtcacggatatcatacttggggaccccgccgttccagctgattaaattcacttcttttctccagcctttggcgttctcggacagcacgccaagctcttttacaatatcatatttaatatctgccatcctctgctcctctttcttcttttatgaatgcggccatacggccagcccactggcctttcagaagctctgctccacgctcttacgtatttcatccgccgacggaagcaccagatcctcgtccatgccggcatctgcctccatgaccgctttatagtactgatgaaccgttttattgacggttataatccgggatttggagggcatacgtgttactgcttcatcgaaatcctgcgacccgcacgcctccatggcatccttgatctgcagataatacagaagcagatgttcccgcttctcgcccggaatcagctcttccagcagtcttcccaccttgtttctgtgctttgcaccgtaacggaaatagcgatacagcgcttcctcttcccgctttctctgctcctccctgctttctatggtaattcccattaatttaatcataatcgcctccatatgctgatccatagtcctgagtttaaggccgtgtacattcagaatatcagtcttttcataatctgtcaattgtaacagcttagcccttgacaccattcctgtttcgtgctagtataaggatacctcaaaagaggcaccagtccggggtagtactggtttcgacaggggccatgcagctggtgaagctatccgcatgcgatgcgttaaatggcaaacttaaatataaacgctaacaataacgaattagcactggcagcttaatgctgcttgtcggccttagggcactcacaccttaagaatccggcatcgacgatgtgagaaacgacttatgcaaagctttgagcatatgggcgtatgatgaagctactgaactcaccagggtgtcagttttcgggtgacagagggaatgtaaaacaactgactatgatagtagaagaacagggaattggtttttggacacgggttcaaatcccgtctactccactcagcttttcatataaaacagctctccggttggagagctgtttttgtgtctttcgatggttctcacggaagcctgcttctagaatccttttccagccagttctgaaacgatctgaacgtagcactccaccacatcgaagcctttataatcttcccgttttaaatcgatcatatccccgtgggagattccgcggtgaccgctgctggcaaacacggtgcgaaactctccccaacgggcggattccgtgcttacaagaccgtcattatcgccttccagaggctttatgagacagtaaggaatccacagcagcggatcgctgaaacagtcgcgcatcttcgaggcatagctctgatagaagacgccgggtacatcggaaaccgactcgttaaacgccctgctggacgctgtggaaaactgatgagtcgccgtataaaaatccggatttttatccccaaatctggaaaacgtccggtcaaagcatctggcgaccagacggtagagaccttccggaaggcggatggcgtaatcgacaaaccggcagccgtgatgcggcgtgctgactgtcgtgagcgacgccgtgtaaggcgccatccccagtttactgatggcgtagcgcgcatccagtccccccttggagtgtgcgataatattgaccttttcacagccggtctcctccaccacctccagaattttctttcgaatgtcctctgcattacaggcaatggttcccagcgcctcctgattgccatagtagacagacgccccatatcgcaccagttcacgcggaattcttccccaatagttaaagtaatgaagatcgcggaaaccgataccgtgtaccataatgagcggatacttcgtccggcacagatctgattccgcacgggtcgatctgaccgcttctttataacaggcataatcgtactctgcccgcaccaggcgcatggcgtggataagaaccgccagattgacaaccggaatccacatggccaacagcattaaaacccgcatcctcacacggagacgcgccgaggtaagatacatcctcagaattccattccagagaagaaccagaagagccgcggcggcaaataccgtattgccgatcagaattcccgccggccacccggccgcatctgcattgccgtgaagcagacgcggatagaggatcataataaccagacactgaaccgcgatgccgtaaatcgcagcaaagcccagagtacggccgccgcgcatgatgaccagacgcaggccggcgtggtttctgtcgcggtacggcctgatattaaagtataaccagcaaatgcttaagaagatggcccccattacggccgcagcaggctgtgccggaaccgtttcttccaggagacgtccggtaaacatgccgtaaaccagcagaggaagattcgataccgccgcgatcatcactcccaggtacagcctctttaacacttttttcgccttcacgagtttcccgccctcccttttctttcgttttctatccaatccattcaccgtgttcacaggctgcccgaaagcacgttcagacacacgctagcgttcgcctccgtatccgcgtccctctttgatatccagatcccgaaacagcgcggcgacagccgcttcatactccgccgcacgttccgccttgcggattttctttccgtatttttccgaatccggaaacagaaacagcaggtaaaaccagaattccttcattttaaacaggacattcctgtcaccggaaatcgtctcccggtacccctgataaaccatgtcgtgaaattccctgatccgttctttgtccggaacccccagcccctttatctcaccggccagaccgggattggcgagcagcccccggcccatcatgatgcagtccacttccggaacaccggcgcggaactccttccagtccccggcagtaaagatatctccattgtaccacacttcgtttttgctggctttcacagccctgcaaaacgctgcgcggtcaggcgtattcttataaaaatcgcttcgcacccggggatgaatgatcagttcttttaaagggtacttattatagatctcgagcagttcttcaaattcatccggtgatgccattcccagtctcgtttttacggagaggcggattctgattcccgaacatacctcgtcgaggaacgcatccagttcttcctttttcgccaggaaaccggctcctttgtatttggaaacgacggttccggagggacagcccagattcaaattcacctcgtcataccccagcgcctcgagctcgcccgccatccagatgaaatcctccgcacggtttgtgagaatctgcggaatcagggtaattcccttgttgtgttccggaagaatatcgttccgctccctggaagagaaacggtgattctgattgggctgcagaaatggagtgacatacagatccacatgaggaaacagcgcgtgatgggcgttccggtagacatagcctgtgatcccctccattggtgcaaaacagcagcatggttccttatgatattctttcttcgcttccatcaccagactctcctccgcctttcaatccttttattttcacaaaatagctgacgatcagcaccacatccgcgccgagccaggccaaaatttccgcataaaagatcccttcctggcccatggcaacaggaaggagcagtgcggctcccgttctcatcagaaattccactactccggacagcatgggcagaactgtatcccccataccctgaatggaagaacggaccacgtgaagcagatagaggatagggaggcagacgctcatgatcgccagataatggtaggcgatttccatggttttggcagcctcttccggcgttcccgtaatgaaacagccaagaatcgcctgcccgaagaccagcatgacagccgcgatcaccgctgaggtgagcatggctaaaagaaggcctgatttcatcccctgcctgattctcttaatcttcccggcgcccagattctggcccacataggtcgtcatggcatagccgtaggaggttgcggctatttccagaagtccgtacagcttgttggtcgccgtaaatcctgcaatgaaaaggactccgaatccattgaccaccgactgcacaatcattccgcctaccgcaatgattccgttctgaaatgccatgggaagtcccaataccatcagttttctgcagagatacggttccagatgaaaatccgtctttttaaaagaaagaatctgtaccttcagcagactcttcagacagtataagctggagcaggcctgcgcgatcagtgtggctgcggccgccccgccgattccccagtgaaatacgagcacaaacagcagatccaggccgatattgaccacagaggccacaaccatggcgtgaagcggcgttttcccgtctcccatggcgcgaagtatggaggccagcacattgtatgccatgacgacaggaattccccagaacatgatccttaaatacaaaagactctgcccgataatttcatcgggcgtatgtaacagcagcataaccggccgcgccgccgcctgcatgagcaaaagcatggccagcgatccgatacaggccagaaccgctgaatgggcgatgacctgccgtagttttttataatctcccgctccgaactcaaaagccatcaatatggcaaacccctgggaaatgccctgaatcatccccaataccatccagtttagccagtccgcggcaccgagcgctgccagcgctccgactcccagcgcctggccgaccaccatcgtgtccaccaccgtgtaaaactgctgaaatacattgccaaacatcagaggcagtgaaaacgcgaaaataagcttcagcggatgcccctccgtcattgtcctaattttggccattccatttttctcccgattctcttttttcctttgatcaatcccttatatttccagaatgattataacctgtcaaagcaaaaagtgcaatctgaaccggcaggagtccgggagtaaactgcaccaggagagatcagggctgaaactgtatgggctttacctccggagtcagcggctccatctgatattccggaaactgatcgattaaatctcccaggcacagggctgtgctgcggacaatgtcatgggccagcatgaccacatgctttcttcccagcgccgtctcccgcgcatttgcaatcagttcttccggctccgatctcttaagcgcatcctccaggctggcattccagtcgaaataaataaagcctctgtccgtcatttcttttataatatcctgacagactgctttattgtaggcgttaatgctcccgcccgggaaacggaaaagcttaactcttaccccggtgacttcaagcactgttttataggcctcgttaaagtcttccagatagcttgccgtactctcgtacagctgtttgtaatcatggctgtagcagtgaatcccgatggtatggccttccgccacaatccgtcttgccacctccggatttttcttcacattttcgcctaccacaaaaaatgtggcctttatattccggtccttcagcacatccaggactgcggcggtattctcagcggatgggccgtcatcaaaggttagatacatggtttttggatggaaaaaggcgtcgattcccctggcaatcccttccgccagcttctcctggtattccggctgggaaagtttttcggcttcctccgggctggacaggaatcccgtctcgatcagacacgcgggcattttcgtccatcccgtcaccacaaagccggcgtctccccgcagttgcctctctctggcgcctgttcgcttcacggcttccccatggatcagctgagccagccgcctgctgtcacgggattgatctgtcccgtcataccatgtctcgattcctgacggttctccatcttcatacgtattctgatggatgctcacaaacgcctccgccccgcttacgtttgccgcctccgcccgctgctccttcgtcagatacgtatcggagcagcgggtcataagaacccggtatcccgcttcctccaaacattcccgcagcttcttcgcgatttccatattgatgtctttctccaggatccctcccgcgtaactgccctcatccgtccctccgtggcctgggtctatcataatcaggggatgatccggatccgtttcggcagtctgaaatgacaggtcctgcgaggcagaaaccgtttttttcccggatacagtctggtttccagccgccagctggttctttgccattaccaggatcaaggatggcagctgattctccgctgcagtcgaattctccataacagccggattctccacaacgatcggattctccgccgcatcagtgccggaaaaactccccattgtctccatggccgtaaataaaaacacagccgcaattcctcctgccgctgccgctgcaaaatcctccagccatcttcttcccgttttcttcccgttcttcttataacggttttttcgctcgtatctcatcgcccggttcctccttcactcaaaaaacatgtccggaggatttttgtgcagccagtaccgcttcgcaccagtattcccatttcgcccgctgccttcccggctgctgcacaaaagctcctgtgtcatccgtctcaatgttccttgattccagattacacgggagctgcatcaaaagatcatcatttttgcatcaaagttgcatcatctcgatatttttacaaataattcctgaataccgtcgtaatagccgaccgtggcggtcgtatctccttttcccgctccggtaagcttatactttttgaaatacggagtcatttccatcagaggattgtttccctcatagggaagaggggccaaaagccccaggtaaccgctccaattctccgcaatcccgtccggatccatgtcctcccaggtaagttccgtcctgacgtaaaactcataaagcttaccatcatccgcgtcgatataagcgtcaatcaggcggtttcccctgtcgttatttttctggatattggaaaggctgaccttccacacggctacattattcctgggctccagcacatcgatcgcggaataaaggacggcgtcataggcggcagcgtttgcatctcttacggattcgggcagaattcccagcttctttaacgtatccagcccctcatttacagcctcaaagagctcctcctcttttatctcacggtcggacggacctctgtgattgacaataaacgcatatgtccccgcggttcccccgtaggtttccccgggggcctcctgcctctctgcggtatactgcccgctctccggaagcgtctggctgtttaaggcttccgcaagtatatacagcttatcgctgcggcttaaagagtaacggtagccctctccttctccctccgcatcttttacgtggatctcatttaataccgatttgtcgcggtatccggatatggcttccggaccccagatggccagaaccataaccgtgacagcaaacagcagaagaaggaaatttaaagttgtctttttcacatctcaccgcctccctcttccttactgcgcctgacggcagaaccgccgtcttcccacggtatgacaaaactgaagcaggagcctttccccggctcgctctcaatttccagcctgctgtgatgcagaagcaggatctcctcgcagagggccagccccagaccggctccatttctgcttctggagcgcgatttatctaccatataaaatgctttcgttatcttgtgaagctcttcctccggaatcccgactccgtggtccttcacggagaaacggtagccctccgaaagggcatatccgtccacatcgacaggactgccgggctccgacgccttgcaggcgttatctaaaagattgatgagcacggacttgatcaggctggcgtcacaccggatcagcccttcatcgtatgtaaaatgaaaatccatatttttcttcgccgcatacatgtcgtacaggtagaaaaacagtgattctgccgagaccatctggaaatcgatctcctggcgctttgtcacaataatgtctaacagacgcagtgacatcgtctccagtctccgcccttccgtgtaaatgtaattggcacacataaagcttttttcctcatccagccggtgagaccgcagcatatccgcgtagccaatgatcgcggtaagaggagtcttcagctcatgggcaaatgctcccacgaaatcctccctcgcacggatctcctcttccagtttgataatagtatcttccagagcattcgccatgcggttaaagtcctctgtcagctgtccaagctcatcgccgcttacgagtctggcccggtaatcgtaatcgcccgccgccatacgcttcgtagcccgtgtcagcagccggatcggtcttgtcagccaggaggatataagatgcatgagtacggttcccagaagcagaatcacgaccgttaccctccggtaaaccacgaagcccgtggcccggtcgcgaaacacctctgtgacgtctctcatcgtctctaaaaaaagcttcttatccagcgcctccactgcggcagccgtctgaatataatacctgtcatccagccggattacccggtaagtcttcgtattttcatgcagcgcaagaagaagcccgtcatcggctgcaaaaccttcggccgcgtacagcacctgtttctgatcgtcggaaatccgaagcatccgccccgtaccctgtccgcccgcctctaagttggaggctatctgccgtgtcgtatcctctaaaagcacgtcatatttggccggaacattgagagctgccgtctcaaaggcaaactttaaaatgctgctctcatcgagagcctggccggcttcccggtccagggcgcgttcaaacacgtaattgacgaaatagaacccgctgaagccaaacgcggccgccatgacaatcatcgtccataaaagcagtttcagtgaaaatttcatcgtcctacctcaagccggtagcctaccttatatacggccaccagccgtggatattcgccgttttcccagttaagctttttccgcagccgctggacatgcaaatccagcgttcggctgtcgccggaatactccccttcccacaccttctcgtacagcgtctcccgaaacagcgccacattcctgttccgcagaaaaaggacgagaagcaaaaactccttgttggtcagttccaccggtctccccgccttcttaacggtccgcgcctccacatcaaccaccacatcgcctgcggacagacgccgttccgtcttattgtatctgcggagaaccgcctccaccctcgctaccagttccaccacatcaaagggcttcaccagataatcatccgctcccagcttaagccccttcacccggtctctcacctcatatttcgccgtaataaatataacgggaatttccatgggacgaatgtattccataatatcaaagccgtctattccaggcagcataatgtccagtaaaataaggtcgaatttttcatgttcaatgatttcgaccgcctctgccccatcctgaacggctctgcagtgatatcccgcctccgacaggtttaaatcgatcagatcgcaaatcggtttctcgtcgtccactatcagtatttttatcatgattcctgtctccacccccaataggccctggccgtttccaccagctcctccatcgtgctgtcgtctttactcagatactgttttctcaattctgtatccggatagaatccgccggtcttctggtaatagatggagtaatcattttccagaatcatctcgccatcttttccctcgtagctgtaacgcgccagaaccgccagatccttcataccgtcgccgtcgatgtctctgcaggcgacgcctttaagtgcatataaattttcgtaatcgcccatgggctgaaagctccatacaatgtcgccctgttcgttgacaaggtaaaccataaacacggtatattccgccatccggtatgtaccgggaaccaccagaagactgcccagcttctcaaacgttctccaggagcttagctcttctgccatcgcaaatccatgctcttttaattcatccagagtcgatgccgtatagagaaattccgttgaatacccatccaccagaaaagactcgataaaccggatgcttttgttcattccaaaccggttaatcttgtcggaaaggcgccagtcgcggtaaaaaccgtgttcattctgaaacagcacatcccctaccttatatgccttgcctgcggcggaatcgttcttttcacaggacgtaatcagaaggatatccatcttatcatccccgtctaaatcctgaaaggagacggctgaaatcccctgattcagctgccggagttctcctctgacctgattgtttgtctccagctggtccgtactgtaaaccgtatttccgtcttcatccgtaaaaaacagaacgagccggtgatacgtccggtccaaggccggaatcatggaaacgtcgccaaacgctttgacagtcatggagaatacctgattttctatgatatcaaaaccatatgcggcaatatctgcttctttctttacgctgcttaagcgcttctgatatgcatggcaggcgctgagtatgtcctgctcctctgccgcgtggacggtaaaacgaccataccagggcgaaaaaagcacggacagacacaggaggcctgccgccgcgcgggcataaaagcttctgtatttcaatggaatcacctgacttttctttaagattcatacggtatcggcaaggttcaaacagtaacgtaagtatagcatgcaggcgaaaatatttcagccttttttgacttttgccgtcaaaaaatgtagaatagtcaaaaacggaggatacctatgaacagacgaatcgctgaatgcatcaatattctgggggatttttgcggaaaaagagacgttgacgaactgacgaaggaagaattaaaaagaatatacggaattgaccaggcggatgtcatggtgctgttcggcggcagcatcctgtgcggcggcgatgtgctggcccgggcgatccggcagcaggcagcaaaacactacgtcattgcaggaggagccggccataccacagaaactctgcgggcaaaggttcaccaggaatgccctgagatagagacggaggggcttcccgaggccatggtctttgctgcatatttgaaggcacgctacggactggaggctgattatctggaatgctgttctacgaactgcggcaacaacattacctatctccttaagctccttaaggagcatcagatttccttccgctccatcatcctggctcaggatgcttccatgcagcaccgcatggaagccggtctgcgcaagtacgtgcctgatgatgtcatcatcatcaattatgcggtataccaggcccacgtcgtaatcagggacgggaaactcgtttatgagaatgatattcccggtatgtgggatatcgaccgctatctcacgctgctcctgggtgaaatcccgcggctttctgaccggacggatgggtatggtccattgggcaaaaattatattgcccacgtcgatattcctgcccgtgtcactgcagcatttgaagagcttcaccataccttccgcggcatggtacgggaggcaaatcctcagtatgcctcccgtcaggaataacagaaagcagaacaggagtcttactgaagcattctccctccgcgtccaatcctctctgcgatctccacaaggccaggcaggcaggcatcgaagaacatcttatacgactgacagaagtactgatgatgcccgtgctcttcctgtctggttctccggcagccgccgcggcagagcgacgcatatctgcattctgcacacgcctcctctttctgcagggagctctcgataaactgaatctcttcccgcttcctgtcgatcatttccactgtgtccgtccggaaatttcccagccggtactcgtccagaacgtagaaatcgcatggatatacgcttccatccgcctctaccacatactgcatcccacagattccccgcatgtcgcaggattccggcatctgccccaaaagaatcgcaatatagttctcaaactgccggatatacggctgttttccttccttcaaatcacggaaccacagttcaaataaatcgatcaaaaaagtaccgtacgcttccggcgtcagcgaataatcgcggccgcccggctcttccataagcggatcaaggcaggcgataaactggagataatccaactggtttttccggtaaaattcatacgtctttttaatatgaggcgcagtctttgcatgtaccacggaaagtatgttgaagtctactccggtcttcttaagcatttcaatattctccatgatgcgggtaaagcttccttttcctgccggagttttccggtaatagtcgtgctgtttcggccccccgtccaaggatacgcccacaaggaaatgatttctcacaaagaactccgcccactgcttatccagaagtgaaccgttggtctgaattgcattaaatatcttcacatgattgacgttgtatttttcctggaattcgattgatttctcaaaaaacggaagcccgctgagcgtcggttcgcctccctgatacgcaatggtacagcttccctccgaataggccagcacctgtcggatcacctcctctaacgtctggaccgacataaacccgtaagccccctgttcccgtttggacatcgtatcataataaaaacagtattcacaccgcaggttgcaatttcctgacgatggtttaatcagtacactgattggcggcataagcaccctccctctttcgtgccggcactcatgccggcgtccattgatcataaacatactgataaatattataatggtttcctgcggtaagtacaagagtaaataatcgcacggcagaatccatggaacagggacagggggcgagtcccctctatggccttccaatctccctgaccatctcttccagcgtctccatctccaccgctccaaacatcgccaggcttcgcagcggcatgtcctgaagcattgccagcatcatccggctgacgtcgtcatcccctgagtaccggcccgaatatccctcaacaaggccgcccagaagagcttttcctttttcactggccatgatttcttttacggttgtatttaaggtaatccggccgtcatccggtgttaagggcagttcatccggaaacaggcgtttaaactgttttctgtctgctgcgaaatggccgtccttaactgtttcggcagcatcatatccagggatatgggaaagttcctttcccggaagcatcagatccttttttagttttaaatcgcggctggaggacgccgcatagatctgataggtgcccgcttcaaccgtccagcaggagcggttcgtatcgtagcaggaaaagcttctcctgtccagcccgattaccacctcccttaactctccaggctctaagaacactttttgaaagcctttcagctccctggcggcacgcatcacccctgactgtgctttcccaatatagagctggacgacttcactgccggaggtttctcctgtgttggtaacagtaatcctggcttcgcctttctcctccttttcatcccacacaatctccatgctgtcataagaaaatgacgtatatgacagtccataaccaaagggaaaagctaccggtttttcagcccagtcgtaataccggtagccgaccagtatgctttcccggtattccacatccttcccctctcccgcgaagttttcgcagcacggagtatcttccagtgagagcgggaatgtctctgccagacggccggaaggattcactgttcccgtcagcacatccgcgcaggcgcttcccacagcttccccgcccaggtatgtgagcagaatactttccacccggtctctccacggcattaaaatggcggaaccacagaggagaacgacggttacatggggatttaccgctgttaccgcctcaatcaaggccgtatgggactttggcagatttaaatgagtccggtcgaacccttcgctctcataggaatccggcagtccggcaaatacaaggacgccgtcccgccctttcgcacaggcagcagcttcttcaagcagtaccggattgattgtatcctgttccagttcataccccggagcgtattcaaatgctattcctgattcccggagagaatccagcacgcagtcgatctgatgcggatgaatcctggaactgccggccccctgatatctcggtgtttcagcaaatgcaccgatcactgcataggaattctcttttttcagcgggagcattccgtcatttttaagcagcaccgcagattctgctgcaattcgccgggcaagaatatggtgcgccgccgcatcatattcttttttatggacttcccctgccctcataatcacagtgaggagacgctctgccgcgcggtctaataccgcttcatccagttctccgtttctcactgcatcaacaattttcttgtcattataaggatccggtccgggcatttcaagctcaagcccggcttttaaggctttcactctgtcattcatggcgccccagtcggtcattaccagcccctgaaagccccactcattccgaagaacctctgtcagcagccattcattctcacaggaatacacaccgttaatccggttgtaagaacacatcaccgtccatggctgcgcctgttttaccgccttttcaaacggggcaagatagatttctctcagcgcccgctcatccaccaccgaattgctgacaagcctggccttttcctgattattagccgcaaaatgtttgagcgacgttccgattcccttactttgtacgccgctgatccaggccgctgccatctcgccggccagatacgggtcttcgctgaagtattcaaaattacggccgcagagcggagaccgtttgatgttggtaccggggcctaagacgaccgcaacctcctcctgaacgcactcctctccgatcgcctgacccatatcatacagagcagctttatcccagctgctggccgaggtgaccgcaggcggaaagcaggtggctttcacgctctgattcagccccagatgatccgcctcaccggcctgcttacgcaggccgtgaggaccatcggttaccatgacagaagggattcccagtcgttcgatcccttccatctgccagaaattctttccggaacacagaagtgccttttcttccagtgtcatggctgttaccagatcttttatcttatctgtcatcgttttcaacctttccctctctcatccagttccgtccggatctctgcatatttttcattggtaatctcatagaatgccatagaaatcagggaggctatatagccgagcaccggcattccgaaacgcaggaacacaatcatatttaacacctgcggagtctgttcctggtttgccacaaaaccaaccagtcccagtaaaaagctggcgataaatccgccgatcgccatcccgaatttattgataaatgtcagggaggaggacatcagcccgtctgctctctgcccgaatttccactcgccgtagtcagaacactccggaagcatcgcccaccccagattgctcggaatacgggaaatgaatccaaatacagccatcatactcataaggatcgttaccggcgccgtaggcttcagccacatcaccaccagcgggataatggagaacaggcttccaaaccagtacagccgtttttttccaaataacctggataacgccggaagcagcggaaggagaatgattcctgcaaacaggatggcggaggcaaccttgggaactaagtctactctatttaacacatatttaaagtaatacatatttacggcactgtaggtggcgttcgccagaacatcggttccgaaggcgatcataagcatcagcatgggtttgttttttatcagcagtttcaaatcctttgccatgttcattggaacacgctctttgtccatatcgcagacatcgtacttctttccgccccatgcgcagatccagaatgcggcagtcgttaaaataccgattaatgcgccatagacagcccagccctgttttccgccgccaaaggcctccaccagcggaagcgccatgatggtgatgataaactgggatacggttcccatgccctgcttccaggaaacgatgacggttctctgatacggatcctgggacatcaccggtgtcagggaatgataagggatattaactacggttgaggccagtgaataagcgatatatacaacgtagacatagaccaccttcatatttggtgataagtccggtgctgtaaaaagaaggaagatgaggaatccgaggacaggagctccccagataatccacggcctgtattttcccattttcgagcgggtgtggtctcccagcatccccataaccggatcggtaaatgcgtcaatgaatcgggatatcagcatcagtccggatactaccatggaactgattccgaatatatcggtataaaaaaatgtgagataagacatgacaagaaaaaatgcgaggtttgaccccagtcccccaaatgaatatttgaaaacatccaaaaactttgcctttgcatacttcgtttccatacgtttcttctcctttatatatgattgttttcattcgctttatcaaccataacttcgcggtgcaccagtaccggctttttcgcactgctcacagccagcgtgtaaactctttttccattctggcatccttttgaaatggaaccacatcacatgtatcctgataaaattccagaagcttctctttcatttccatgatcacagacgcatactcaggacatctgatacggttttcagtctccttcggatccagaatcagatcgtagaattcgtcctcttcatagagtcttctgacatatttataatcccttgtccggcacatcgtggcttttccattatacatctcatcagaggcctgtaaaaactgccttggataatactgaccgtcgggatccggtactgcctggcctccggtctccttgcagtggtcttctccttttctgaaaccgccctcacagaataccgcctggcggagcgcctcttcccgctgctccatgtaagggatcagcgatcttccgaactgtgtatgttcagccggcagctctgccaccgcctccgcggttgcatagaaatcgaccagttccgtcatttcctgactgattccatggcgtttctgcatatctgcaggcagcttcacaagaaacgggacattggtcagacagtcctcaaaacagttctgaaccttttctaccagaccgtaatccccggtataatctccgtgatcgctgaaaaagaagacggcggtgtcgtcgtagatacctttttccttcagcgccctgacaacctggccggtaagatcatccacccggctgcacatccctaaataaacagcccgcagttcatcgtattctgcctcactccattccctcatgttctgcagggccgccagttccctctgcattctggattttcccgaatatccttccggcggcaaaatccgttccggcagcttcctccggtcaatgcggctgaaatacggctcgctgacctgatacgtcgggtgtggaagcatcagcggaagaaagatgcaaaaaggccgctcttcctcatagccccggataaattcagctgcgccctccgtccagatctgatctaaatccctgtgctccggcagctttccccggtagaaggaataaaagttctttcctccccgctccccccggaatgaatccttcggaagttcatccggcctccggtcttttccgattgtaaaataagtatcgcagtagcttttataatactccggatcctgcgcgggcagcaagtcatttcgctggttcatccagacatggtaaccgtgattcttaaggcgttttaaaagtaccggctcgtactcatgcatcatgtggttcatggtgcggtgtccggccacatggggataccagccgctcataaagctgcaccgtgagggggtacacaccggattctgacagaaggcgtgagcgaaggatactccgtcctttgccagttcatccagattcggcgtaaccgccgccggattgcccagatggaacatggaatccgcccgcatctgatcgggattgatgattactatgttcggacgttttttcataccggcctcttttcatcgaaccccagacggcgaaaaagttccttcggagcgtcatttttctccatgtattcacggatatacgccttcatctgttcgcgcaccgtctcatcctcaagagaatgctcctggccaggatcctcttttaaatcaaagagcagagagccgaatgacgtcgtatcccccatgtgatccttactctgaatcttcatgactttacagccctttgtaaaggaaaacggctccgccagttccattcccgccagttcctcaggctggaacatgcacctcatgtgagtgggcatcagcgtgtattcataagcaggaatctcaggatgctctgccgcgtgcatatacacataacggccgtctgtcacatccacctggcttccatggtatccgaacaccgcatatttccgaatcgcttcatccgaatccatcacgccggtaagcggctttccttccatgtccttcggaatctccataccgaaaaagtccaggagcgttggcgctaagtcgatagtctgaacgattgcacgtctcctggccccggcgcattctcttcggcgcggatcgtagatatagagcggagtgtgagcaatctcttcatagattggcatgctggtcttcccccaccagccgtgttctcccaacaggaatccatgatctgtgttgacaatgagcatggtatcgtcccatagatggtactgatccatcatatccagcacctttccgagatagcggtcgcacttggagagcagcgccgcatattcgtaacggacatgctggattgtattttcatcctctgatgtcggcgcgtaaggcggccagtcggcctccgctgccgcatctcccagaaatgtatggggatagagtgccttgtcctccttcagggaatagaacggttcgtggggatcgaaggtctcgatctggaggaaccagtgatccgcctcatggttcttttcgatgaactccagcccctgttgaaatgtgactgcctgggatgtcttttcttcggcctccatatagctgcggttgacggcatcctggaccctcatccgtctgtaaggagggtaactcatcatgacctccttgtttttaaacacagtgctgcggtcatactggtacgttaaatctgctttccagagatcgccttcctgtcccctggaaatctcccatgacgaataccggttgtgataggtacagcctccatcctcccagtagtgctgatggtcgctgaccagatgggtgcagacgcctccattttttaacagttccggcatcgagtcgtcaaacggctccatcggcccccagctcctgtggaaaaagttaattctgcccgtatgcagctcccttctcgccggcatacatggcatgcttcccacatagcaattctcaaattggacacttaaattcgccagtcttttgaaattcggcgtcttcgtccagtcacaaccgtatgattccagtaaatctcgtctcagggaatcatacataaccataattgccttcatgcaactcctcctgtcttatttttctgcatctgttttctatatctgcactctttttgcaactatttgaaaacgctttcagaaaacgttttcaaaaaagagcggtcaaaaggctgcttatgaaagctgccttattgattctctgtcaaaaaatctggtctcatattctctggacatttcatctggagagcggtcttctatcatgtccagcaaaagctccgccgccccgcttcccatatcctttgccggcacatagaatgctgaaatctgcggaaacatctgccgcccttcgccattcttatgttcgacggacaggatggacacggtctccggcacagacaaccgcagttccccgcacacacttaaaatgatctgggtcgtctcaatccccggagaacagatggccgtatagccgcctcctgtcacatactttctcatatccgctgtcagctcctgtctgatatctgtcatatgcggaagaatgattgctgccagttccagatcttccatctcatcttttgccctgttgacgatagcggacaggtagttctggtggccgctgtaaaagtagaggatgatcttccggtgtccatatgcatacagagttttaatcatctggtgtctgtagctctcatactgggcatatacattaatccccttcttatgaaatcttttaccgatatacaccaccggatactcttcctccagaatctgctgaaacgcctcttcctccattgatttgctgttcagtccgctcaaaagcagtccgtcaatttttctctgcctcacatactccaggaagcggggagtccccttaacccggttggagtattcctccgactcactgatcaataccatactgtaattatgtcttgtgagaacccgttcaattccttttaacagctccagattataggaggattcaaacaccgaccctgaatggaacggaaaataaaccccaatgatattagacctctgctttaccagacctcttccgaactgattcggctcatattgataatattccatcgcctcttttacagcccggaccttcttctcacttacattggcgctgttattcagtattctggaaacggtggagatagaaactcctgcccgctttgctacgtcataaatcgatgctgtcatgttatacctcgatggtgccgttctttgcattctgttcttgaaagcgttttcaaactttctggatttataataacaaaaagtgattatgcaaacaatatgcgtttcatacaaaaaacaagattttatttgtgcattttttacatatcttctctttgtctttcttcagcactgtcctcctgtttccgtatccagagaacagcaaagaatcccacaagtgggattctcttctctctgcggatctataactgatttttcaccagacgcactacgttccagctgtgcctgccaaatacagtggtaaagacgccgttctccattctggaagcctctgaacgcacagggcttacggtatccggtgcctcctccgtattagcggctttcatatcatcgtgggtaagcacgatatgctccttcacctgatacccttcaaactgacggaaatcacaggagacttccgcatcgtcctccagatccttgtttacagcaaacattgtaactgcctccgcctcctcatcccagatgcatacacagtctaaggtggatacggtgccatatgtacggctgtcatacaccggcgccttgatctgagtcgtcaaaacggtgcctttcccgtaaacactggcgtgcatgtagggataaaagatggtctgacgccatgcgccggtatccgacgtcatgatgggtgcaatgacattaaccagctgggccaggcatgcaatctttactctgtccgcatgtctcagcatggtgatcagcatgcttcccactaaaagcgcgtcttcaaagttatagacatcctccagctgatgaggcgcctgggtccacgcctgaatctccttgtcctgttcgttgctgtgataccatacattccactcgtcaaaggacaaattgatattttttccggcgtgtttttttgccttcactgcgtcacagatcgatacaactccggaaatgaagtcatccatccctttggaggaagcgagaaaatccgccgtatcaccgctgcggtttccgtaatactgatgcagggataaatagtccacctcatcgtaacactcgtttaaaacctggtactcccattctccgaatgtcggcatggtcagactggagctgccgcaggccacagtctcgatctccgggtccagccatttcatcatgcgggatgtctctgaagcgatccggccgtactctcccgctgtcttatggcccatctgccacgttccatccatctcattgcccaggcaccacagcttgatatcatggggtttggcatagccgtgtgattttcttaagtcactgtaataggtgcctccttcgaaattacagtattccagcaggtttttggcatcctccggccccctcgttcccaagttgactgccatcatcatctcactgccggccttcccggaccagtccgcaaattcattcagtccgaactgattggtctcaatcactctccaggccagatctgttcttgcaggtctttgcgcctttggccccacactgtcctcccagtgaaagcccgatacgaaattgccgcccggatagcgcacaatcggcacctgaagttccttgaccagttccagagtatcttttctgaatccctgttcgtcggaacacgcaaggccctcctggtagatacctccatagacggcacgccccagatgttcaatgaaagaaccaaatattcttttatcaacgctgcctgtcagaaaatacttatcaatgataatctctgcttttttcattctgttattctccttttttcactgtatcctgatactcatatcttagcaggttcccgaaaaaaagccattgacttttctccgaagcatttgattttttctccgattatgcttatactggtattaacatggaaattactgccaagaaagtcgggtaacagaagaaaaatcagaggagggaggcgcaatcatgcttaatttcgaaatacatttctgtgaatacaatcggcaaaatccgccgaaagaccggatataccgtccaggaggcagtggagattacttattcctgctgctgaaaactccgatgaaattctacttaaatcaggagcttaacctgacccgtgaaaatgcctgcatcctgtatacacctcagaccatgcagcactatgaggctgttcaaaagttccggaacagttatatccatttttcctgctccgccccgttggccgagcactttcgtattccgttaaacaccattttttaccctggaaatcccgatgaaattgacgagtatatcagaaagattcaggaggaacggatcgcctcacgtccttttgcagaggaaaaagagtattttctgttgagcgagatgctgatagccatcgcgcgggccatggccggagcgaatactgacatgacagaaaaccgggaactgtatgagatttttttaagtctccggcttgatatgctgcgcagctatgaaaagccctggaccaccgaggatttatgccgcagagcaaatcttgagaagagccagtttttcgcctgttaccagagatttttccagagtacccctcatgcagaccttctctctgtccgcctggaaaaagcgaaaaatctgcttacgaatgaggcgcttccaattaacctggcggcacggcaatgcggtttttctgacattacccacttttcccggtattttaaaaaagaatgcgggtgttctcccaaggagtacgcccgcaggtggaaggaacattgttcatcctaatttttatctttcagagaagtgcggcagaaggcttcagacccgcagcatctttctcacgagagagagaacggctccggcggtactactgagaaaaagagtgccgcgatgggcgttcaccgcttccaaggctgccgccgccccagccgccagccccttccatgcctcctccccggccggaatccgcggcaggatcactgacgctgctgccactgccgccatgcagagaaggaatggcagaaagcctcttcccgtatcgtatttcttcatgcgcacgccgccaccggctccctttttagacggaatccagaggcaccagatcagtcccataaacagggtaatcccggcaaaaccgacatagagcgccattccgtaattggcttccgctgccatcaaacggatatctcctaacgcctggccatgctcccagaaggactttgccataatgaataccattcccgccatcaggaaaaatgaaaccagctgcatcactctcgccatcatgacagcagctgtcactacgctttttaccatcatctctccaagaccggcgccgtccggatctgccttttcggttatccgcgattcaacatcaggaatgcctggcccgccgtcactatcccattcccactctcccacgttcggcattctgccagctgccatgccacgggaagacggccgtatgttttcctggatgccgtgcttctggccgccgttgccgttcttctggctgtcgctcttctgactgccgctcttctggctgccgcgttccaggctgttactcccaccgctgctgcgcaggcgctccacctcagcctccagctttttcatccgggcttccctttttttctgttcttttgtttctgcttttatctctgccttcgtctctgcctttgcttgcgcctttgcttctgcctttcgcccttccgtgccttctcttgactttttaggctttgcagccttctcttttggcttcggtctttccgccattcggctctgcggccggcagctgtcgctgtcagctgcttccgtatctgcaggagttcgcctggtctgagtttttaaccggctgataaaaccggaacgggcatcaccgggctgccggtcagcctcatcctctaattccgccagctcctctgccagtctctttctcatttcatattcttcagccgactctgccatataaccgttctttagcggtgctccacagctgctgcagtaatttcctgatgtttcatgtccacatttcgggcaaatcataccatcaatcctttcgtactcttccatgataattaagtatactataatcaccgagagggaactattaagtttctcttgcaaatttgagaattattatgtaacaattcacgtagcgggaaaattgattaaaaaaacagaaagaatagattgacaccacggccttcttatgagatactggattatatagttttgattactacatatggaggttttaatatgaagactgctatcctgattgattccggctgtgacgtatccgacgagctgattcaaaaatatcatatgaaagttatgcccctgcacatcatttaccctgagaaggattatgttgacggagtcgatatcttccccgagacaatttaccagagattccccagggaaatccctacaacctcgacccccagtcctcaggatgtgaaaaatatggcggaggaaatcaaatcggagggatacacccatgtactcgcatttacgatatccagcggattgagcggcacgtataatacagtcaatcacgttctggcagaggagcatgaactgacctcttttgtactggataccaaaagtgtctctttcggcgcgggaattctggctctctgggctgccatgaagatggaagaaggtatggactttgaccagctgacagaggtcctgcccgggaaagtaaaggaatgtaagatattctattatatggatacactgacctatttaagaaaaggcggccgcatcggactggtcacctcagtagtggggagtatgctgaacctaaagccgattatctcctgcaatgaagaaggcgtttactacaccgttgccaaaatccgcggttcgagacaggggctttccagacttctcgcggaagtgaaggcattcgcaggtgacgctccctgccttacggccctcttaaacggcgacggcaaagaggcggcggaagaactgcgccccaagttaatcgccggtattcctcacggaacactggtaatggaaaaggccataaccgcttcacttgcggtgcacacgggaccagggctggtcggaatcggtgccctgaagctgtaggcggcagatacgaaagatgtcattcagggaggtgtcaggacgctcagctgcacctccctcactctgctttatacccggaacctgtcgtactccttccagcagtccaggcagagtttcttcccgtcctgaagccacatcctgtattccgcggaagtctcacatagaaacaattcatcccatcccgatactccatcccaatcctgcctctgtgctttcccgctgtctccgcagcaatggcaagccccagcccgtagccgctgcagctgcttctggcgctgtctcccctgtagaaacggcgaaaaatcagggaacgtttatcttccggtatggcttctccctggctgttcacccagagtctgatccgccttctgcccgctgtctccagtttaaccactgtctttcctttgggaagagagtatttcaccgcattgtccagcagggccttgatcagctgtcccatctgttccgggtctcccagcatctgcacctcctcatccagctggtactccagctgcttttcctcctggtagaaaacaggctcaaaggtcagcaccttttccatcaccaggtcgcttaagctgaagacagaaaaggtgccctttttctgcgtcagcgcatcattctttgccagcataagcaggctttccaccagagaacgcatctccctgcactcctgcatgatgtgctccagccatttatccgcctccgcggatatgcctgtgtactgttcagaaagcagttcggtgtttgccgtgattacggtgagaggcgtcttcagttcatgggaggcatcggccacaaactgtttctgcatacgtatggattcttctaccggcttaaccgcccaccgggaaaagaaataagagagaaccagaaacccaagccagatcccggcacaggccagaccaccatacttcataactccgctccgcagcgaatcctcatacgaggtatctgcaaacgcaatcatatatccggttgggcggctgacacggagataccggagatgatacccctctaagatgcccatgtcctcctcaccggccatacttaaccatgccatctgctccagaaaatcctgtccgggaaacgattcgtaaccgccttcccagggagttaccatgccatcctcccccactataacggagaaatacgggatctgagccggtgaaatggtagtgaaaatcaaaggatgctcctcctgcgacacgacctttgcaagcgcctgcctgccctgggcgccgacccgtttttccataataaacgcagccgcgcagaaggtaattccgatcaccgccgttacaatcagcatgttatagcagataaatttcagccgcagcctgcttatctccttcattccagtcctcctccgttcttctccgtgatccggtatcccagcctgcggatcgtcacgattaccacgtccgcctttaaaaactccagtttttttctcagaaacgatatgtagatctccacattgttatcaacggcctcgccgtcgctgccccagaccttcgacagaagcgtctccttggagaccaccatgtcgcggttcaccagcagaatccgtagtatgtcgtattcctttttccccaggcggatgcttttttccggtcccttcagcgtatagtccgcctggttcagcgagatatttcccagatttaagcattccggaatcatctcgccccggcgccttaagatggtcttcatcacagccagaagctcctgcatgtcaaagggcttggtcagatagtaatcggctccgctctctaaccccaggatccggtcctccgtctcgcttcttgcggtaagaatcagcaccggaacaaaacagccgctttttctggcctttttgagcagtgtgatcccgtccattcccggcagcatcaaatccaggacagccgcgtcatagccgccatccgtaagcagaaaataccccgtattcccatccccgcagatatcacagtcgtaccagtgttttaagatgtcgcggatggattccgccagccgcatgttgtcttccacaatcaggacacgcattgtcttcatctccttaaaacgataaaatccacctgtattctctctcaattcaatcgagaaagcaagagaacaccggtggatttaacagataattcacaaaacagatacgaaaaacagcgccctgccgccctaccgcccccgtatttcctttctcataaagctgatataggagatggcaaacactaccgcagtcaaggccagaagcccggtcaggtgcggccataccagcagcatactctgccccagggagaggtatccgttgatggcgcccgatagctgctgcggaagaatgatgttggtggagcgcacctggggattcataatggtcgataccgcctcgctgtataagtaatacggggaaagccggttcaaactcatctggcagttgtaattgtccagaatccgtgatgcggtggccgtctgtcccacagggtaaagcacattggctgccatgcttaccaccagcgtcataaacagtgcaaagaatatccacagtgcgatcactaccatagccgacgtggccgcatggcggcacagaacggaaaagaggatggacagtgcaagccagaagcagatatacaccgacgtaaagaacagcagaacgattacccgtcccagttcctcaccggaaggcggaatccctgtcgccagcagtcctgccgctccggcgatcagccccatggagaagaccatcagaaagattatggccgctccggccagaaatttgccgttaatgaccgcatcccggtaaacaggctgggccacaagacggtttaaggttccttccgaacgttcactgttaatggcgtcaaagcccagcgccagccccacaaacggccccagaagagcaataaatgaggtaaaagaggggattgagttcccgcttaaggtaaacagcttcaaaaagatatatccggagtctgccgcctgctccggggtgagactggagagagctccgtaaatgctggcacagctggttaaaaggattaagagcagcacgatcaggaaccgcttgctgtgaatgtggtctgacatttccttgtggtatagggctcccataccgctcattcccgtacgcaggctcccacctgtgccgtcatgcctctccctggcgctgttctctgccgaaagtaaggaagcctttgtttttcctttgattgagactgccattgctcttctcccctttctcgaaatatgtgcggtagatttcatccagatcatttccccgctgtcttaaatggcacaggctgtagccgccttccagtgccttccggtttaactcacggcttaaatccgaactggaatagattacgtaaaagtctccgcttcgttcgatctcttccacatttccaaggtgctccaaaagctctttaaaccctttgtcgtcgggtactgccccggcctccagcacatagcggccttcccgccgcatctgactggccagatcctcgattcttccgcaggctatcagctgaccttccacaaacagtcccacgcggtcgcaaacctgctgaatctggtagagctggtgggacgagatgagaatcgtcctgccgtcttcctccgccagactccggatcaggaacatgagctctctcatcccttccggatcgatccccagagtcggttcatccataatcaccactttaggatccttcatcagtacatctgcgatacccagacgctgcttcatcccccgggaatacgtccccgtcttctgatccgccgcctctgtcattcccaccttttgaagcagatcgtcgatccgctcctcgatgactttaccaggcagcccgttgagctgcccggtaaaccgcagattctcccggccggtcatatcggaataaaagcctacattatcaggcagatatcccaccatccgttttacctcgatcgcctgtctcgtacagtctttcccatcgatccaggcgcttccggccgtaggttccgtcagtcccagaagcatcagagtcgtggtggtctttccggctccattgggccccagaaggccgaagatctcgcccttgcggatctccagggacagatcgctgaccgccttcttttccccgtagatcttggtcaggtggtctgtccgtattatcatttcatcttcataatgttcagcaatgtccataacaatgacccctttccggcattacagccatttcagctatcttctgccgtatttacggaatacgtagcccagacctcctgctgtgcacaggataatcactaccgccagaattccccagatggtgctggtcttcacggacacacggaaatctgcactggactgcgtctgttcacattttgctgtaaatgtattcacgtaatcaccggtgatggcctctgagcccggctttacgtgggcgatgacctcggtggtagagccggccggaatggacgggatcacgttattttccaaattataggttacagtccagccggatggcagggaagagtttaaggatacgtcctgcaaatccacatttcctgtattcgtcacgtttaaggttacatccgattcttttcccgcataggcatcaaagctcagacgcccatccggcgttcccactttcaggccgtagctgccggtgattaccacctttaaatccgtgctgagcgtctcctccgcggaaaccgcgctgcaggaaatgtcatactcacctgccggtactccttccggcggcgttacggacacggtcattcccttgctggtgctggattccacctcgatcgctgctacctttgtggtctctcccgttggtgtgaagctcacattccaccctgccggtgcattggaagaaaggctgtaggactggctcttcagtccattgttaatcagtgtggtgctgaagctgaaattagtaccggcagttccttcctgctgcggatactctgacgtaaagcttccttttcccgccttcatctcattgacaaggaaagagatggacagtgtatctgagagaccgctctctgtggatgctccaacttccacggtgtaagtcccctctgtcagctccttgggcaccgttacatgaagcgtcatggacgctccgtccccgccgttctttacatggatccggcttacctgataatttccgccctggagatatccctcccagccgtcgggcatggcggatactttcacgttcgcatctaagctagcgccggtatcattatccagtttaacagggatatttaaattgtctcccggctttacggatataccgggataatccgtgctcagcttcagtccctcggctgcatacgcggcaggtacattcagaaacagcagcagcactgccgccgtgaacgctgccagaaatgcccatattctccttttttcgattggtctggttacaattgcttcctccataatatcctccttttgatgcttcatcggcatccgtattattcttaagaagatcataccggagaaacctttaatgaacctttaataagtttgaacatcctgtgaaacaaacagatggcagccgtccgttatcagaactaacgttcggctgccatctgttttataaactgtccggtactttcccgggcaaatcgtatcactttaatcgttatcgggcaggagctttatagtgaccataatatatttgaggaaggctccctcttccagctttatgtcctccgggtgagtctgattgggaaattcgtacgttccctcttccacctccagatagagccagttatacgctgcctctctcgcatgctccaccgcgtcttccagatccggtccatcggcctcgcagcactgtaagtccggaaattccacatgatatcctttgtcatctttatggggcgtaaaaacagcagggtaagtaaatgtcataattgattcctccagcgtttgtgataagcattatcattatatacttattctgcccctttgtacagatttttatcagaagccctgccggagattcccaccggaacctttaccgcctgatctctcatcagcgtttcaaactctccctcaggcatcggtctggcgaaataatatccctgtacatactcacatccggtttcactcagacgatccagctgtgtttttgtctccactccttctgccaccacacttaagtgcatacggcgggccagttccatgataagctgcagaatcccctgatccatgggcttcgcagtctcactctggacaaactgcatatccagcttcagaatatcgatcggcatctgattcagcatattcagagaggaataaccgcttccaaaatcatccatttcgatcacaaagcccagctcccgcaaatgtctcaccgtctcaatgatctgacccggatcttccgtgtaggcgctttccgtgatctccagatggagccgggaaggcgtcaggccgtatttgctgactgtgcgcatcataatatccgcgatatctgcatggtagatatctgcgcgtgatacattaacggagaccgggatgggcggataaccttcctcatcccatttccttaaataaaaacaggttttatcccagacaaactgatcgagttttgtgataaatccattcttttcaaataacgggataaattccgcaggcgactggaatccccattccggatgcttccagcgcaccagcgcttcggctcccgccagggtttcatcccatattctgtatttcggctggagatagaccaaaaactggccttctttcagagccgtttccatactatctataatggcctgctgccgcagcagttcatcacgcagcttatcatcgtaggcggcataatagactccatactgttccttaatgctgcgggccgccagaagggcccggtcacacatctgctccacagtcacgttctgattgccgacggaatagatgccccattttactgcgacattcttggcgttctgcagacggttgatctcttcattggcgctaataaacatctgttccgtaaatacgtcatcaaattccagcaggcaggcaaaccggtctgcatccagatggccgcagatccctccttctcccacatacctccggtacatgtctgcgattccgcataacagccggtctccggcggccacgccgaatacatcgttaatcagcttgaagtttacgatatccgaacaaatgagataatagttctgtcccgagttctgacggagagtctcccttacccgctgataaaaaaattccttgctgtaaagaccggtcagccggtcatactggaactggttaatcatggccgccgtctccctcaagtggatgatactcgccaccctgtgcaggataatctgcggtttatacggtttagccacgtaatcagtggctccatgggataatgccgccacctcgtccgcctcactgtcgctctgagtcgtgacaatcacaggaatggaggccagtgacggatcctttttggcaatcgaaagaaacgtatatccgtccatgacaggcatcgtaatatccagcagtattacagaaatctcatccttttttcgctccaggacatcaagcgcctgttggccgttttccgcctccagaaccatgtattctgatgaaagcagttcactcagcatcatacggttgatttcattatcttccacaatcagaattgttcgctttgcaggcatatcttatttcctcttttcttctggtagccataggcagttccttctattataacaaaagagtgtaccctgtacaagtaatctgttccaacacgccagacttttgtgctggtccggcgaaacagctcctaagcatgatcactgcttatatattccgctaccttttcataaagcagatccggatcaatcggcttcgacaggtggccgttcatccctgccgcctccgccttcacaatatcctcgtgaaacgcgtctgccgtcatggcgataatcggtattgtctgtgctctcccgtgcgcggatttacggatcgcagccgttgcctggtatccgtccattaccggcatctgaacatccatcagaatcaaatcataggagtcccctccggacagaaatttatcgagagcgatcctgccgttcgccgcccagtcaaccgtaacccccgccatctgcagcagttccaccgcaatctcacggtttaattcgttatcctccgccagcagtacatgacggccggccagttccgggcgtatcttcttctccgccggcgcacggaccaccctgtcgatcccggttactgagagaagggcgttgtatagcgtggaggcaaaaacaggcttggtgagaaacatatccacgcccgctttccgcgcgttcgtttcaatattcgtccagtcataggcggtaataatgatgatggtcgtctccgggcccacctcttccctcactttacgcgccacctcaactccgtccatatccggcatctttaaatccaccaggcacacgtcatagtccgtgccgttttgatgggattgacgaatccggtccacgcactcctgtccggtcagtacccagtctgacagaattcccattttcttcagcagcagtgacgcatggatgcagctgtcccggtcatcgtccgtgatcagcaccttaagcgactccagctcatgggttttctgcgggatcaccctgtctttatccaaaggtgtgtcaaaatccagttctatcgtaaacacggttccttttcccacttcgcttttcacagtgatggtgccgcccatcagagtaaccagatttttcgtaatcggcataccgaggccggtaccaccggagttcttggcaacacggttatcctcctgctcgaacggaacaaacaggcgttccaggaatgcatcgctcattccaatcccggtatcgaggacggtaaagcgaagacggattcggtcttccttcctctggagctggcggatttcaagccgtaccgtacctccggcaggcgtaaacttcaacgcattggacagcagattcagcagaatctggttcagtcttaaggaatctccaatcataaccgtattggataaatcgatcagcggcacctggaaggtcagtcccctggcagcggcctgtggataaatgatggaagaaattgactctaccaccgtttcaagatcgaaaacctcatgagcaatcctgaccttgccctcggagattttcgacatatccagcacatcgttaatcagggccatcaaatgcttggaggaatagccgatcttttccagacagtcctccacccgcctctgatcgtcaatataagcagccgcaatggtcgtcatgcccaatatcgcattcatgggcgtgcggatctcatggctcatacgggacagaaaatccgtctttgcctgattcgcatgttctgcgactgccagtgcatccttcagcgcctccgtctgttccgtcagcttcctctgcatttccctcagttgagtgacatcggtgatatcaataaaaattgccagataaaccggacagccgttctgccactcaatacaggtggcattaacctgaagccacatattctggccgtcccgggatcttgcggatatcacaaaatgaacgggggccccttttaaaatctcctccctgtatctcgaaataatctccctgttatcctctatgtttcgcagatacaggggattatcttcatctccttcgccaaaatactccacgaaacgggaattggcaaaaagaagcgtcaggttcatatccgcatcgatacggtattttgcaacgaagcccggcaggctttcgtaagtcacggactgttccttctgcatctttaccagtttgtctatattggtcattaccgaatatgcaacctgatatccgtttatgtattcatcggcaaactgggtcgttaaatgtacccatacaaaatcgccgtttttctttcgcatctgcgtaaccagctgatacccgctctcatgtgcctccagtgccgccatgacggttccagccagttccgcccacagctgctggtcattttggtaatacaggtcagggcggttatgaaaattcgcttcatattcttctttcggccacccaatcagatcgtaataaaattcattggcccacaccaacgtaaagctttcatccagaagatgcttgctcacactgaccttcagcagattcatcagcgtatggtactcgtagtcggccgtcacagtctcccggctgctgcactcagcggcatactctctttcctgttctgtcatcaccagattcctccctaactctctctgattgtccctctgttcttctgcggaaataatcccattgggattcttctttcatccagatcgtcttcctggcaatcatccggccggcaaccttgttcataaaaactcctttcatattaccataaaatataaaaaaactcaacggacatatggaattatcgcctctgcaatgataaaataaagaaaaacacagctgtgaaaacggaggtaccaaacggttggtcaatgatagtcaatactcaaatttaatatacgaatactttcttgtacgcttccactccaggtattacaaatatggggatacgcttccttccatcgatatcctttgccgtgagttcaatgtgtcggcgcagacagtgaaggtctccctccggcgtctgcgcacggaaggctacatctccatgcacaacggcatgaccaccaccgtcatattcaggcagaccagacaggaggcagcggactacatcctgaactatttttccgaacggtgggatacgtatttcgatctctatgcctcttctgaactcatttttatcccactgctggtagagggactgaagcgcctggacgaggaggatcttgacgttctttcacgtctggaggagagggcggaggccgacgatctgatccatttctactgccgtgtactgcagaaaatggagaatccactggcgctgaatctcttctgggagactaccctctttcaggggtttccctttgccagaatggagccacacccgatccatttcgataccgctctggttcgtcagcggttaaagaacctgcgaagcctgctgtctgaagggaactgggaactcatccggaatacgcttctggaatatcagagaagtgacgtccgtgtaattatgcaaaacctggaaccaatcttacgctcccggcccaggccgccacagatcccctttgtctggcgcgtctaccgcagccggccccagatctgctatcatctcgcctcccggattctcaacgacatttacatgggggagtaccgggaaatgcagtttctgccgtcttatgagaaaatggcccagctatacggagcgtctgtcagcaccctgcgccgaaccatcagaatcctgaatcaggccggtgtctgccgtaccttaaacggaaaagggacgcgtattttccctttgggaaccccctgcgagcccccggattttgaaagtcccgccatccgccgtaacctctccttctttgtccagtcctttgagattctgatctattcctgcgacggggtgacacgttcttttctgtcctccttaagccaggacaggatcgaagaactgaccggactcctggaagagtgcctgaatacaaggcaaggcgagctctctgtctggtattatctgatctttgtcagtcagtacagccatctgaccggtgtacgcgaaatttataagacgatctactcccttttcctttggggttatcccttaaaagcctcttccggaaatttaacggacttagactgcgtcatcatgcattttacggaagccatggtcaggcatttaaaagaacatgattatgaccagtgtgccgctgatgtaaaggagctgcttttcaaacagtttcctgctgccagacaatacttaatcggacatggcattccgccggaagagctgcgtatctctccttcgatccggctgtttataaccgacacggaagccctggaatgcagaccggagaaccgcgggggctcacctgagagctgacgccaacttctgtatacgaataaaacgagatctgttttgcctgcggcagaaaagatctcgttttatttaaactctctgatacagctccgcagccgtacgtgaacgcctcgccagttcctcctgatccacaatgcagtatccgctctccctcttttccagtatcccttcttcacagagctttcccagcagccggaacatatggcggtagctcatccccaccgagcaggagacatccgtcagcgtatcgcaaaagaggccgcggtgagaattctgaatcacataggcacaaagccgctgttcgccggtgcataacgcggtcgaggtgaaattgtccgaactggcagtcagcttctccgccagttccgttcccagcttatttaaaaaaacaagattcgttttcagttctgccaggcaattctggtaagaaaccgcgacgcattcaagctccgtaaccgccttcacggaagacgtggcgttcacctgccttgtcatcagttcgatctcaccgatcaaaccgtgtgaaatattgtagcagagtatcaggctcttgccgttcggcgcagtgcggcacacctttgcatttccttcaacgacaatagcaatccatccgatgggatgtccttcacgaaggacatcctctcctgccgcaaatcgaaggcagcagcaggcacttatgggaacattctgcagaccgtattctgcaaggcaggctgtatgttctttttttaatgggagtcttttcaacttggtcacctcacttcactggttatggtcgtttttttgacagcaaaagcggaaaacactgtgacaaatgtcctacatagggtcccgttccttctggtatccttttatcaggaggtgaactgtcatgtatcaacttttagcgctgatcaatggtattattctgtccgtcatgatatcggtaaatggtaatctgtccgtgcagtacagtgcgttcacggctgctgccattatccatgcggtcggctccctgtttgcactgctgctctgtgcctttcagaaaaacagaaaaccggtctggacccaccggcccaggtggatttatctcggcggtgcaatcggagtatttacaacagtatttcaaaatctggccttcacctgcatcagcatcacaagtgtgatcgcactgggactgctgggacagacggttacatctctggtgatagacagttccggattattcggcatggaaaaaaggccgcttccgcggtatgcattgatcggactgagtctatcggtgttcggtatcttcgtgatgctcgataccacggtcacaacggccgcaccgggagccgccatctcctttgcctccggcatctccatggttctgtcccggacagccaacgcccgtctggctgaaaaaaccggtgcactgcagggatcgctggtgaatcatctgacagggcttccgattacggttggcctggccttagccgcagccgcaataagcggcacgccggtgactgcttccgcaggaggcagtttccgcctctggatctatctgggcggcgccctcggcgtcatagtggtcatgctgttaaatatcacggttccgaaaatccccggctttcagctgactctgctcgtctttgtcggccaggtgtttacaggaatcctgctggatagtgcagccggcagctatcataccggcacatccctctggggcgggatcatcatcgcggccggaattgccgtcaatatgatcctggaacaggtgactgcagttttaaaaaagaacccgcgcagcagctgagtaccaattcccggctgcctgctcagccgccgtgcgtcacttcttcaatcagccggcagagagactctttaaaacgttcatcgtcttcttccgttctctttgccggccccttcagatggtgcctgccttttcccatacggatcttcttcgccatatggcgttccatcagcatctggtcgatattctcattggtataccattttccgctttgatggattccgtacgcccccttccccagaatcatagccgctacgccgtaatcctgagttaccacgatatcaccttttgcgcactgattcaccagtgcaaaatccacggcatccgtgcctgctcctatgatttttatctcactgtaggaagactggagaacatggctggtatcacacaggagcactaccggaatctgataccgctccgctgtctgttccaccagtttcactaccggacatgcgtccgcatctactaatattttcattctgtcctctctccggcagttttcttacacatcgccggcagatttcttatttgaacgtgctaaataattcttccattgagatgaccgcattcttgcgattactcatcattttttgactctatcttaccacataaatacagattccacacgtattttatgaaatttaaaccctccacttatccaccagtttttatctgtgtgttattcttttctcacaacaatgagaggagaaaagaagatgcaaacaacgattcaggtatccggtcttacaaagtcctacagcacactgcatgtgatcagaaatctcgatttaaccgtatcgagaggcgaagttttcggccttctcggcgcaaatggcgcggggaagagtacggcaatcgagtgtatgcttggcacaaaaaaggccgatggaggcagcatttcgattctgggaatgagtccgcaaaaggaccgcagaaaattattccagcaggttggcgtacagtttcaggaagccaactatccggataaaatccgcgtggacgagctgtgtgaagagacagcctgtctctacgccgcccccgccgattacagaaaactgctgcagcagttcggccttcgggaaaaggaaacgaatttcgtcagtgaactgtccggcggccagaaacagaggctttttatagtactggcattaataccagacccgcaggtagtatttttagacgaactgaccaccggtcttgacacaaaagcaaggcggagtgtgtggaaaagccttcaggagttaaaaagcagagggctcacgatcttcttaacctcacacttcatggatgaagtggaggaactctgtgacagaatcggcatattaaagaacggcgaatttgcattctgcggtacagccgctgaggcagtcaccttaagtaccggtaaaacgctggaagaggcgtatctgtggtttacgggagaggaggctgacggggatgaataaattttttacaatgctgaaaaccgaactgaagctctccttccgcggaatggatatgatcatctttgccgtctgcatgcccgtggttgttgtcatactgctgggaatcatctacggtgggaaaccggcatttgacggcgcggactatacgtttctggaacagtccttcggcgcggtatccacaattgcggtctgtgcaggcggcgtcatgggcctgcctctggtgatctccgactaccgtcagaagaaaatactgaaacgcttcaaaatcacgccttccagtcccctccttctgctgtcggtccaggtggccatttacatgatttattccctgatcgcgctggtactgatctatctggtctctgccctgttgtttggcatgagtctgaaaggagcctttttgccgtttatcggagcgtttttcctcgttatgatctccatgttcagtatcggaatgctggtaggcggcgtatcaccaaatattaaaattgcaagtgttctcgccagcttactctatttcccgatgctgatcttttccggcgccacactgccatatgaggtcatgcccgcagccctgcagaaagtcgcggatgtactgcctctgacccagggcattaagctgttaaaagccacgtccctgggacttcctgcagagaacggaatggcctcgctcattgtcatggcggtgattgccgtcgtctgcggcggactatctatccgcttctttcaatgggaataggaagtgcagttccttgtggttttattcggaggaaataaaacaaagaaatcagcaggcaaaaaagaaccggttgaccgcatgtgatcaactggttcttttttgacactttccgcctttaccgctcctgtctgcgaagcttctgcaactgctccgtccccctgactgccgcctcctgctaagtcacctgcggtcacgttcgataggtttatgatagcattttcaatgccttcctcatcgcttctggatcaggcttcttccccgtccacagttccactgccagagctccctgataaacaagcatactctgtccatccagcgtatgcgctcccagacggtccaccttttggaggaaaggagtgtacgccggattggtaataatatcctgtactaccatgttttggtcgatggattcgtaatcgatatccggtaatgattcatccgggtacagaccaatattcgtggcatttaccagaatatcgcaagatggaattcttaccttctctgtccagtgcacaaattctgcggcacagctggttttctttgcaatcaactctgccagttctctgccttttgcctccgtccggttgataatcgtcaactgaacagcccccgccagcgcgcattccacactgatggcccttgcggcgcctcccgctcccagaataacgatccgctttccgctcatagagataccattttcccgaagtccgattataaaaccttttccatccgtattttctccatataatttcccatcttttatcattatagtattgatcgcacctatgagagcagcgctctcagacaggccatccatataaggcacagcagcgatcttatgaggaatagtcaggttcaatcccgaaaatcccattgctctgatcccattcagcccctcctgcagacccgcggccggtactcggaacagctggtaacgccagtctaaacccacacttttaaatccggcttccatcatagcgcctgacggattctcatcaatcggatccccaaatgctcctgttgtaggtattctaaaacagcatttcattttatcgcctccttagagccttatttcatagatatgaatctcggcttcttttataattccctttgatttaacagacattctgcctccctccaactgaggataaattctcagtgtcatggctgaactgccattgataaagatctctgctacagaatggtcaatcaggatatccaaatggacgactccatcttccttacgtttgaaatatcctaaaattggcttcttatccacggatttaatcaggctgctctcctccattggcgcatagtaagtaccctcccgcgggttaataataatatcggtatattcccgattctcttcgtccgccaggaaacggaatgaaaacacatcatcagactgaatatccccttcgatttcagctgcgccggataccgtttgaaattcatatcttccagtaaaattctgaagtcgaaccgcttcatctgtccggcgcagagtctcaaattccggcagacgctcctgaaccagttcatcttcatgattaatggatatcactctcggaattgcctggacaccggaccattctccatccgtgtaaaggcctcttctgggatcttcccgaagccacccccacatcagcgtccgccctttctcatcaaaggaaatctgtgaggcaaaaaaatcaccgtaatctacacttccctgattaaaaacctccagctttccttcatctgtaatggtacctataaaccaacgcaaaacacgaatatcccatatagaatggataaacagcaccttatccccataaacaatcaaattagggcattccataacctctttcgcgcatgtattacgaaagaactcgttaacatacgtccatgaccgaaaatcatctgtcgtgtataaatgaacagcaccatatttttcatccacaattcccgctaccagacaatagtattttcctttccaccggaatacgaaaggatcacgccactcggtcaaccggattgtcggagcatccgtactcctcataaccggattatcaggtatctgtttccagtttatcccgtcctttgtcgtagctacccactgctcggagccactattctggcaccggtctccctgtcctacactggtataaagcaattcaatctgaccgttattaatatagctgcatccggaataacagtgagtctcccctctgtccagagccggatataaagcaattggtttatgttcccagtgcagtaaatccctgctcacggcatgtccataatgaagatttccccagtgccagtctgtaggattatattggtaaaacagatgatgctcacctttaaaataaattgttgcattggggtcattcatccagtttttttcaggtaaaaaatgatagcttggtctgtgtttcatagcaatctcctttatgtgtttttttaattcaattatcccttaaccgcccccgcagtcagaccttccaccacatacttctggaaaaatccgtagaataccagctgaggcaccaaaataagcagcgctcctgctacaagtcccccgtaatcaatgctgtattttccgcggaacatagacacccccatcgaaattgtgcgcatggcaggattctggatcagggtaacctccagcggaaattcattccatacataaagcacattgaatactgtaaccgtagccagcacaggcttaattaatgggattgtaatgcaggtacaaagtttcatcaggctgcagccatctataatagccgcctcttcaatatcctttgaaaagccttttaaaaaaccgacaaacaaaagcgtattaaaggaaacagaggatgccgccaaaggcagtatgacagacagatacgtattcacaatctttaatgctatatttattctgtaaatcgggaacagcaaaatataagttggaatcataagccctgacaataaaaataaatagattccattttgaagctttctgtttcggaatttcagccttgtcagcgcaaaagagcaagaaaaggtcaccagaaggcagaggatctgggtaaataccacgataataatcgtatttttatacatacttccaagtggcaaaatagccagcgcatttttaaaattgtcccagttcaatgactccggcaatgcaaacggctcattcataatctgagtatttgtcttaaaggccagcaccaccagccaaagaaacggaatcataagtattgccgtaattataacagtaaaaatggacaacactgccgctccggccttctttttcttcttttcattcatcatggccgcttactcctcctctccgacctgttctctcgtgacatagaggtagatgaccgcaaacagggcggaaatcaggaatgtcaccgatgcaatactcataccatacccataccgcgatgatgtgaatgtggaataatacatataagtcactaacagatctgacatgtggttcggtccgccgccggtcagctgataaactatctcaaatatcttgaaacaccctgtaatgacaagaagcatcacgattataatcgtctgcctgatcatgggaaatgtgatatagatcagctgctgcatatttcctgccccatcaatttccgatgcctcataaagttctggaggcaccattttaatccccgccagaaatatggtagcgttgtagcccaaagtctgccaaaggaaaatgacgcctacacaatagggtgtcagggtcttccctccaatccattccggctgggcagacacgttaatgtaccgaaggaatgcattaatgagtccgattttgggatccagaatgaacacccagatcagaccaattaagatcgggctgataatattgggagaaaagcagaaggcttttactaacttccctccccgcatttttctggcaaacagcaaagacaatccaaaagaacagggcactatgagaagcagagacattgccagaacaagtcctgtattttttaatgcgatataaaaaattttatctttgaacagcgttatgtagttccgaaagcctaaaaactcaggcttaccgattcccgtgaaattggtgaatccatagtaaaacgccataaagacagggataataatatacagcagaaatagaataattgccggtgctaccattaatatttttgtctttttggtactgaaccaatgcataccatctctccttttgagtcagaaatggcgctgcctgttatggcagcgccaaagaatgttactggattgtgctctgctgttcatccatatattcaagagcttcttccggtgtatagatcccgttaattacaccaatcatactctccctgtactgatttatgagctgacctgggatatacatatccgggcatgctgcaggactttcccagtcatcattcatcttttccattactcttgcgaataccggatatttttcctcgtcaatctctccgtcgtatgtggtaaccggaatactctgattatctctcgcaatgattccagttccctgctccccgtaataaaatttcaggaaatccacgatgacttcgtatagttccggatcctctttctgtactttggcagaaacacagtaaggatgggcaggcgccttcattgaaacattctgattgcctgttccgtcactaaaagtcggtccccaccagtaataaacagactgagccagactactctgatcaaatttcttggtatcccatacgccagagttaagcatcgccgcttttccgcccaaaaaggcctcaacagactgatcataactcattgttgttacattgtcaggaaagactcccttatcccgcatatcggcaagcttctcgtagaacttcagatagtcatcgttcttccatttatccgtacctgcgataataccgtcaatatggtcgaagaaaccgtatctgcagtgcatgttttcaaatgcccatgcagtaaaggtgtctttcgctccctgcgccatcggaataatatcattggaacggaacacttcggcacaatgaataaattcctcatatgttacaggaaattccagaccatactggtcaaacagggctttgttcagccagatgccgttggactgaagttcgcatggtattccataaattttcccatcaatcttcaaggaatccagcatccccggcaggaaaccatccacaaaggcctggtcagaattaatttcgttcgttaagtcggcaagatatccctcatttgccatctctaccgcgcctccctgctccatccagaacagttcaggaagtgagccattctgagctgccatcttaatattacggatctgatcgtcagaggaggttccctgcagttcaatggttacgttcggatgttccttcatgtatgcctgtactacagcatatacttgaggtgcctgttcttcaacgttagctacgtgttcagcaaacacaaatttaaaagccttgtcttctgtaccattgtcaccggcttcgctcttctccgtcttattttcaggtaccacctctgcatccgtctgacttatagcggaagactgtcccgccgttgtgtccgttttatcatttccttttccacatcctgtgaacaatagtgctgataatacggtcaatcctaacaccatagattttttccaatactttttcttcataaaatacctccaaataatgtggcaggcaatcatcacagcaatattttaaccgatttccttgctaccagccgcgggtccagcaccagccttgcaggcggttcccctgatccgttttcccgtttgttaaactggttgtcaatcatctctgctatgagcctgccgatcgactcgtaagaatgtgctactgtagtaatgccataaacagctgtccagggtaaatcatcataaataataaagctgatatcttctggaatggacagattcatttcggaaagcgcctgaattacattaatgctggtagattctccgactgacaggattgccgttggctgtaccgcgtgtatcttttccttgatcatctctttggcacaatctgcatagctcatgaggtaaagacaatcattatccacttccagcctctcttcagcaaatgccctggcatatccaacctcgcgtttaacaagcgccggattggtcttgctgatcagcatgatcttcttatggccactttgaagaagatgcttcacagccagatatgtccccagttcatcatcaatcagcagcgtgtccagattggggtaaactgtccgaaacaactgaagcagcggaaaacgcttcgcacccagctgctttaccagttctccgtccccttcaggagacggcacaaaaataatgccgtcatacttatgggcaatggccacttcaaaattttcccgttctacagacgcgctgttaccgttatacattacagcaagttgatatcccttatgttccaattccttagacgtttccctcaccatggcgctataaaacggattcacaatctcatctaaaaacaatgccactgtcctcttgctttcctttcccccggtcctgtttactgttttcggtacgtaccccagctcttttgcagctgcatatactttttcccttatttcagggctggtaaaatacgtattgctataagctttgtaaacagtaggaacagatactccagctaatgctgctacatctttaatattactcataaacgtatcctttccagcagcagaagttatttcaagaaataattatttttataaatataaataattatttcttttatgtatataattatattacattctgttgcatttgtcaataattatatgttttatatagctatttttgtaaatattgtacatttttaacagtggtttttgtagatagaataccactattagaaataattatttttcgcaccgattcaaacattttatttggatatttttggaaattacaggaataattatatcatatataggaaaattattcagatatttttcttagaagtgtgggttgaaaagggcagcctcttatctttaccggcggctcctgatgtcacgatcaggagccgccggaagacggatatggcaagtcagctttcatttgatattcgccagaaactgccgagccgcctgttcgatatttttacatgaccgccccgctgtttttataccgttttcttcgatacaaaccacatgaaacgaatagttattaaccggaacatagtccatctcgatcatgatattggcatccacgtcctgcagcaataccagcgatgtctgaatgctgttgatacagctttgtacttctgacagataatccagacagtccgattcctcgtgaaagacctctgtcagcctgtttaacttttcaattctgtcttttgccgtacattttgtataattccacatagcccctcctttttgtatgccttcatcctgctcctgcgtgtttcactgcctttcaggaaaacggaaacaccgattcctgtatatgaatattctacacaattatgaagctgtttacaatcagtactggcaatttacggagaataagttctctaaaatgcaaccgattcgatatcatccgcctccccctctgcataccctatatagaattggaggcgtaaagaatgacaaaacaagaaccgatgagtatcgtaacagacaaatacttaacctgctttcacaacatactggatcaaatggtacagcagatgaacggtgccaaactgactaacagcatctcctgtaattatattgttcagatgattccgcaccacaaggcagcgatcgagatgtcctgcaacattctgcagtacaccacgctgataccgcttcaggaaatcgcattatcgatcattaaagaacagacaaaaagcatcgaaaccatggaagccatccggagccgctgtcagatgttctgtaatcagcagcagaaaatcgagcttttcctttgtcactgcaggcagatcacacagactatgtttgaagatatgagaaatgcatgctccactaatgatatcaatgcagattttattcgtgaaatgatccctcatcacagaggcgccatccagatgtcccggaacgcacttcagtttccggtctgccaggagctgaagccggttatccagtcaatccttgtatcgcagcaaaatgggatccgggaaatggagtgtctgcttaagactatagagaactgtcacagaccgtgctgacagttctgcagacgcagcaatcccccggtccgaaggattcgaaccgggggattgccatccacgatttcctgtacctgtttctttttccgcgccataatcatactctgtaccaccacaagcttacagcgactttcagccatctcatctttaaagttcagattgcagttattggcttattcatctggtcccaattatctttcttccagattcagatagtatttcatcaattccaccgcatgttcctgcctctgctcatcatactttcttaagatgcggtatgccttggcagcattggaattcccgttttcattttctgctccaaaaagaatgtaatcggcggagagttccagggttcttgtcagttccacaagggtatctattgacatcccgcaggtcccccgctcgatatcaccgtaatagtgatctgccctcccaattttttctgctacctctgcgctcgtcagaccgagcgcctttctccggttcctgattcgaagggctgcttctgttcgattatatttcatgaattcaaccggcctcctgcctgaacatacgcctggcgttcccgacctttgtccgcagcctgcgggtggcctgaacaattttttccaggcattcttcacatttcgctggatcgtctatacaggcttccgccacgtcagccatacctactatgatatttgccatagtacgaatctcactgtttaattccgctaagaatcccgtcgtccactgtatcatctgctctgccttttctatctcactgtcaagtaattctgatttcacttttagttcctcttgttctctgtgactatccgttatatcataaaaaacattccacatgaccgggcttccctggtatacctcgccggtaaaacggccgttcatgcggatccaggcaacttttccgcgatttggtctcatgggacactcaaatgaataacactctttccgattccgataggcgtcttctatccgtttcgttacataggcgaatgtcccgctgtcttcgctgtagtactcatctacccggttatggtatctggaacgaaaaccatctcttgtatttccggtcagctcatatgcgtatttattggcccaaaggacggtaaaatgcctgtccatcatatgcttgctgacgccaaaacgcattccctctataatcgtttcatactcattcatcgttgtccccttctccttccgacgcgatatccagctaatgcctggaactcgtctgtcttccggattctttgatctgattatttcatacgaggcctcttacagctgttttttggccatcttctgcctgaagctgcatcctccattcttcctgaaactgttccagttcacgcactttcttcaaagcgccgcatatctcacagatactgtctccgcgcttatttttcagcttacagccggtgcagatcatcatatggtttttcctctctttccgcaaaattccagttcctcttccttcagcattctcagtaattccagcgcgcttcgaaagctgacatactttttaccggaaagggagcatcgaagccgtccctgcatcgtggcattgctgcgaaacagaatctggacttcgaagacctctctgcttaacgccgcctgctgttttaaaatatcaaacatattctgccagcccgctgttttttgtctgcccttttttcgcttctttccgatccccaaataatccgccttccgtttttcctgtaaaaagcggggatccattgataacatgggagatcctgcaagttcgcagatctcatccattttcagtaccagctggtccagtccacaaaaggagaccggttcctcaagacaccggtttacgattgccccatagattctgttttccacctgtccgtggatacagaccatcataatacccgcccaatcggtcacggccatggcctgcatctgctgctccatttcccgtttttttgtcatgatttcatcagaatactcttctgtcccattctctccaatcatatccttccgccttttcatactttccggtacggccgcctttttgcccttttatgcagcgctggtttctttatgagacagaaaagcgggaacccgtttcactaactccttgtcggtgttcccgcagttctgccagatgaagaaggctgatgattatggcgtttctctgatccagctgccgttttcatctaccggatacccatccggcgtgagttctcccgtgtagagcgagcccagaggatgccccgccgctttcaccgggcttaggtaataccagttgtctcccacattctgccagccaaccagcatgcctccggtaaactgattgaaatagtaccattttgcgtctttttcatcgaagtaccagccaatgcgaagacagccctcatctcttccctgttgggaattcaaatagtaccactcgccttccgcatcctgataccagccggtatccatgatgccttccgcattgaaatgatacgtatacagctgctgcaaatcattgtattttacattcgcccactggttttttaatcgctggccgctgtagagaacaaaggcccactgaccgccattcattcccgtttgctcccagtatccgtctgttcccacataatacgtcctgtagcggttaaatgtatagccggaacccagactccgtccacggctgccggaacctgatccgcctccgcttcctccgccgggatgattcggattctccgggttgttcggattctccggatcgtccgggttattgggattattcgggtcgtccgggttattgggattatttgggtcgtccggatccaccggaccgcctgaacttatggaatccaccaaagcttttaacgtctcgtactcctgcagaagttcttctattgccggacggtaagtcctgttgactacctcctgcgccgaaaccactgcactgcttagtaactgcctgttctcttcacttaccgaactgttgttcatcagagtctgggcgatggcaatctgctccatcagcttctgccgcgcagcctgccactcggaatcctccgcagcccgataaagtacatacagtgtcgccgccttcgtaaccggtgtggtaatatcgtattcagaggacgcggactctgtctttccaaggcctccgtactcatagacgattccagtgaccggatcggtataatcttcaaagatattcagatttccaaaagcctccgtctcttccaatgacgtctgggacttcactttcagccggtgtacggcagcccttttcgtatcaactaccgttatctcatgggctttcaaataggtcagtaaataggtttcccccacatgggcgtcaaaagctatgattccggtaaagtccgcgccgtcaccgtttggatccggggtcatcgggatctcggtgcagaccggagtcccctccggattttccactttccagagcctgtaatccagatatccaagcatgctctcatctatttcgctgtacactctgatacccggtgcaggatttccatcttccggaagccctttattcgttccgcccacctttctggtcaatgcagaactcaacgcccacggtatcttaacagactcagaatcttcccacatctctgctttcactgcattggactccgatgccttcggcgcacgcctgttaaatttaacagtatactccacatcgattccggctgtcatcgcttcacggtcctccgcattatcagtcagagtctgaatcagcgtctcaaaataattttctgatagatccagagcattttttccgtctctcagggcatagtccacggtggcatttcccggtgtcgccgtcgaaggcatctcgtagacagcctgcagtacgacgttttgtcccggcatggtaatcgtctggttacgccttgtcacaaatatttgaggacttccaatcagaggattccactgcttgaatgcctgcccgttataaccggtgatctccgcattgatttttactgtatcgcctttctttacgatcgccgacactgcatgttcttccgtctcaatcacactgccgtttctgataatctcatcaatatatccgccgttcgtcagggatatcgtgtaatatttttcctcttgtccggcatagatcaccgatacctgggttcccatggtctgtctgtcagcaggcgttcccatctccccggcatgctttgcaacgacgatgtataactgattgggttccaaatctcccagtaccgcttcgtttcgtgtgctttcggctaaaacccagccatctgcatcagagcccggtacgaaaagcgtattcccgtcaatgtccataatcgcatagtaagtatcgtaagccgcaggattaatcgtaagccgcagacggccctccgccgtatcccggctgacctgataattgcttccaagcgccggtaccgtcacctgggaaggcggtccgtaatccgatgcatccgtatgctccggaagaattgttcccacagccggctccgcgctcatggacagttcatatacatagtacagggtgcagggatacagtccggtaaaatcactgttttgcagctgtgctccggttttaacctgcaaaattctgtgttctccatctgtcagggcataccggcgttcctcattagcaccggatactgtgactttcccgcttccgtctccggccactgcgcctctcgcatccggcattgccagaatcccgtcgtcctctaagctggcgggcacaaacctggccgtatagtgctgactggccagaatcacctggctctcctgaacacggtttccgctctcgtcaaaccagccggcaaagatataatatggatccggaatagtctgtggcagatttaaatccgtccatggcgttccttttcccgtgtgaatggaagtcactcccgacacggagccgtgggcacctgccccaaacgttaagtcaaaccattcgttgggattctcttcaaaattggcaaacagttttatgttctgtgaaacggaaaggcttccctccagccgatctcccgtcttatcgcttccgttagcattggctctgtaccagccgtcaaacagataatgggaggacggagacagattcacaccggctgtcagttcatcaatcgtatatgttccgtgctttttaaattttggtgatgtgtctccggaaattgttccattggttccattgtaatactcaattttagaccagtaagattcatccgagagattctcattgtatgttatggtcacggtaccgccctgcatgtcgctgcttaaggtcagcgttccatcatcgggattgaaactgctctgagttccggtaaaatgttcatcccagtgaatattcggcggataatcatatcccgtcttctgctccacatcgatgatgaccggatcagccggcgtaatttcccgtatctcatcatcctccatgggattgccgtggttatcgatccgtttcacctggagtacggtatgaaagttcggatcaatgttatatttatattgaacagtaaccggctgattcggcatttttcctctgtaatgcatcgcttcatcaaagctgcatccggctgaagcagcagaatatatcccctgcccctccagatcgtcggttccctcgaacccttccttcagcgctccgctctgcaggctgtacgcattgatctgcgccggtgcgatatcgatctctgtctctgctgaaaatgtatacgtatccggagtcctgatctgtgttccgttggaatctacatactccacgtataccgcaaactttttggtcggatccggctcgtagcggtaggccaccgttaaatcatcgtttggcatgttcccgcggaccgcttttgtcgttgtattgatgtccgcgccgccatccagccttccctgtccgctgggttcatcatatcggcgcactctgttattttttatcaggactgattttaaccggtatcccgggatgtccctccggtacgtcgcagatatcggcgtattcgccattacctccctcgtccagtccccggattcataaaatttccagagatccgacgcgccttccggcggccaggcgcccgcatcagtgccgtcgttgttcccgtctctgtctgtatttaaatctctgtagtgcatgaccgtaaaccggaacggcgtcgtcgcattccctttccacacggccttgtacgaactcaccgctgaatagggaaatgcatagggcagcgtttcaattttattgcctgcctcgttgtaccagccgtcaaaggtatatccgggccagtcaacctgaaattccggaatcttcggtctctccccggacccgaaattctctgtcggaattccggaaaaatcgttggaagatatcaaaggaaatccggcctgccctgtggcataagacaccccggtatcccgtctcggcatggtgctgtagctggaatgggataaatcaggcccggcctgcggatcaaattcaatgacggactgatctccgtgattcaccgcatacaccgggattcccggggcagtcatggaaaataccatgactgccgccagcgcacctgccagctttgactttatgttaaacttttttctcatcgagttcctcctactgtatccatgcaccgtcgtcaccgaccagccagccgtccggtgtcatttcatttttatacatggagcccagcggttttccagttcctccgccatagttccatctctcctttgcaaaatcatagacgtatacgcctgctccggccgtctcgaagtaataccacttttctccgatttttctccatccggtcgccatcactccgctgctcggaatcagataataccaattcccatctgcggcgtcatggtgccagccggtctgcatcttcccgaagtttccttctttctccgttctgcagtaataccagtctccgctttcatcgcggatccatcccgtttccatgattcccttatcgttaaaatggtaccagccggtacggtctgatatactggtgctgccgtctgccggatacttgatccaggcccacattccgctgagcctcattcctccggttaacacaaaagccatctggcgttcctgtccttccggggcgcttacttcaacccagtttccattcgttcctaccacgtagctctccggcagcttcgtgttgtacgggttttgtctcgttccgcttccgcttccgccgccgcctttatttccgcccttatttccattatcctggatatcatcgtaatggttatagcggtcatcaaggatcttctcatacgggtccgtcttgtctttcagcctatccagtgcggctgtaagctgacctgccgttgctttcggattctcacggtccagcacctccagagcctcctctacggcttccttcagaattccgctttcctccagcttcaggaaatgatcgtcactgatacggatcgcttccctgatcgcttcctccagcttctgccgggcatcatccacttcccgcacattgtctttataataggcgtatatgtatgtctttcttctgaccggttccgatggatcaaactccttaaagctgtcctggcttctgctccagccctcatagctaaactctgccccatccgggtttacaaagtagtcgagctgttcttccacctgtccatattcatcggcataatattcgtcactcggcgcttcatcgcggcgcaccttaaagtaataacggtatcggtactcgaccggcagcgcaacctggttcacaaagtatacacggtacgcacggttatatatcatcacatagcggctgccagcctgtgccgtaaatgcatataagcctcccgtttcctccggatcgtattccagtgttaccagtgcagcctccgtctctccggttccgggattttccgtgatctcatacagctgataatccagcatgtccacatcgtcttttcccatttgaatataggtccggaaagccgcctccggttctgctgctcctgctacttttcttccgtttacatatctttcaatcaatacatccagtccccaggctcccttataagcggcttcatgttccgtctcatagtatcccgaagcctttatggcgttggactctgacgctttcactgcattcttccggtacaccactttatacgtcacatcggcgtggttcacatctaacagctcccggtctgcttctgttgtcagttctgcttccagacgcggaatttcattcgggtccagagcggtttccttccggcttcctcccctcacttcatccatgaccgccgcattgctcggtgaagccttcggcctctcatagacagccgtcagcaccacattattatccggcatgataaagctggcttctcttctcgacgtcttatcacccagttctccggccgtgccgatcgtcgtctcccagtgggagaatggttccccggcaccgttcacttcatctgccgtgatcttcacccggtctcccttatgggcttcctcatatctctgcgcccctacggacgtttcgcccaccatggtgatctcgccattttgtgtctctacaatgtagtttggcagttccagttctgcgcccggatcagtcgtaatcacacttcccttttcagccaggctttccgccgtgacgtccgtcttacccagcggccgggccaccaccgtatactcacggttataatcaagtcccgcaaaggtaagggatgccgggcttccggacggcttcttaaatcctccgttgccggcggccggaatatccaccacatggccgctgctgtccagaaccgcgtattctgaatccggatccgccggtttaataacgagaatcgtcttacccacttcttcctcatcgtaaaggatctggtagttcgtctccagaaccggcgtcagcacctgagccggatcgctgatctgaccggccagtgaatccgtctggcttccagtttccacatggacatctcccgtcgcttcgtacacctggtagtccgctcccggatacagattgtcaaacaccactcgtcccgtcagttcatttccccggatgatctccaggatttttccggacggatctgtcaggagatactgatatcccggcgttgtgttaaatacggtgattctgccctttccctggctgtttaaactggccagagtctccggcttggttacctccgttccgaacactcccggatccgggcggaatcgaatcgtatacgtctgtccgtttacgagattcatatcaccggtcacaggaacgtctcccgcataccatctgtcggttaagtaattcacctccgcggtgtactgcggcagacttgctgtaatttcactccattttctgtcgtacattgtatgaagggtctgcgcctcgccatcattgatgcttccgtgggcgcccgcttcaaaatggatgtccacccatttctccgggtcttcctcgaagtatgccgtcagcacagtctctccggtaaaccggcttccctcttccagaagtgtctccccatcgtccataattccattgctgttggcatcgacgaaccagccgccgaagcgatagtattgatccgccctggttccaggcaccaggcgcttctccgtcatcgttcccagggtatgtccgaactcagccccctgttcacttccgtcatcgatcaggacactggtacggtagctgccgtccccgcggtcctctacatcagacgatactccttccgccgtcaggcttccatgggctcccgcccggtaggtgatatacgcccatagatccgggttccggtcatggcggtaagtaacagtctcgctgtcattcggcatcgtccctgtaaaatcattgccgctccaggtaattaatgttgtggatggagcgatggattttgaagccagtctgtagccgtaaggctcccggtataccacttcactctgtgaacatgctaatccaacgccttcctctgcctgatgaaaatggacgagaggttctctgatattcttaagactgctgtccgtcgttacgctgtccacatattccacggttaacggatatccttcttccgtcggttcataaagataggtcagggttaccggctgattcggcatcataccacggaagatcctgtctgcgtcaaagcttcccgtaagggcgcttaccagatggccgtcgctgtcgtccgccgtatcccccgtatcgatgcgcacatccacgcactcataaccatatctcgtcaccggccgggctgtaaccgcttcttccggatagtggctgctcgtctgggcttctgatacggtggttcctccggcagtttcatggcggactgtgagctgggactgtgccgcagtattgccgtaatccacctggtagcggtagcgtaccgtagcgtcctgaccaggcatggttcccgcaaaggctccggtggtaccgttaaactgaccaaccggcacagcggtaccgctgtaattgtattctgccggcgtggttcctgaatcctccagactccaggcataaccgtgaatctctttcttctgggctgtaattggcgtttccacgctgtaagcattttcctctgtatcagactggaatacgatgtccccgttccggttggaatactccaccgtatagttaaatttcacattgggatccggttcaaaaactgcatagtaggtaaccggtgtttccgggaatacactgggaagaccggcaatgatactcggattgttccagtcattcactgaactccagccccggaatacatagccatagcggcttactctgggcatcatggcatttacattgctgccagccgtccctgtcagggaaggaggctgcggagttccgccgtttgcttcaaaacgaatgcttgaatttacttttctgtattcataatcaatggttacatcctgattcggcatgattcccgtcactgttccataatcatttcccggattaagctgtgcatgaagcaggtttgacgttccctgttcaatcgttacgcctgccgcctcatagcctgtcacttcaggcggagcagccagactgacagcttccccggagccgtaggttttcgcctgaatcgccggcgctcccgtaatgcttcctccggtgtctgcatccttgatgaaaaatgtgatctgatatccatttttctttaaaaccgtattcctgtcatggttttcaccggcttctgaaagccccgccgtacccgaagtgacatataatccggtcccttcgcttcctgcacggtcagcaaagaaattatctacaaatgggctcggcgatatatcgaccgcactcccgccaagcggtaccgctacgtttacttcctgtgcggcctgcgtagaggcgcccccggccgatgcctccggtaaccgggcagtcgtgacgccgatcgccgaggtatctaagtcccccaccaccgtcatatactttccttcggacaaatatacatttgccttttcaccgctgcttaatgtatttccttctattgagatacggttttgtatcataaatttacccgtgctgtcgaaattgaccgcacctctgtcaactgccgtattacccgtaattgtcccgtagttcatctccaggtccgcgcttcccgaaatctggatggcacttcccataccggccgcattcacctgattattctgcagagtggctccgctcatgataccgaccgttcccctgtccgccgaaagaatgggggacgtatttcccgcagcgcctgtccggtttccatccagcacgagattgctgaaacgcatggttcctccgttggtgctgaacatgggacctgataccagtcctgagtttctgcggattgtaataatatcgtcaatcggagttccctcccggctgtaatccgagctcataaatgtaatattcgctccggatggaacggtaatggtcgacgtcagttcattgtaatcctgtatatagatatagccgacattgtttccaatttttgtgattgccgcgccgagcgtcttgagaggcgtatcgtaggcgccgacattcccgtcgtttccataggcagaggaaacgtaataggagggtccctttgctccgaaagccacccttctgaccgccgtctcatatggccgcagcggaatcgtccaggaataggtaagaccggaatccacattggcaacgctgtgaggattatccgtaaaatagtaattctgcctctcgttatatcttccaacccattttgtggtaggttccgtcagtcccaggctgtcatcgttatagatgcagtcaaaggtttgctgcgtctgttcattcaccatatgaaacccacgggcatttgccgtcagtgtcgacgcatcggccggatcgccggctccggctccgcttcttcctccgacctgcacatcagttccgctggcaatctgaatcgggttattctcattttttttgttatacacaatataatcaaccagaatccatttctggtccaggctgggatataccttcatctgcacttcgattccaagatcgtcaaatgtctgtataccgccgttgaccgaaattgcaacattttttcttcctccggcaccgccctgcttctgcactaccgtctcatatccctgatgggcgtatgtcgttataactgcttttaaacgatctcccgtataggggttctctgctccaatgagcgaagcgtcctcgataccctcgatgtcaaattttcctgtcgtacctttattccatttataggcagttgtcagtccgcctccattatccttcattccctgtgccggctgaagctcggttcctgcggccatggcagacatggtcagccccggcaccggcggcaaaaaggccagtacgaaggccagcaggcacgcgatgcctttctttattatccggcccactctcatgctttccatgaaagaaacgccatttcgtgatccatccatgttccaacctctttctattcaaaatttaatctctgctcatccgccagataatccagaagcggttctgaatcgtaattaacgatcaatccgccggagtatttgtcttctccgccgctcctgtcgtagtggtaaaatcctggtccttcctccccgttataccatctgggcttatccgcatcctctactcttgccgcaaaccggctgtttaagaagatcagccagccgccctctttatcctttatgactttcctgtctcctgtcaggatttttcctcttgtatcaaccacacggtaggtatcctcatcctctttcacaacgccgtaaccgtattcctgatccgcttccagtttaagtccattaatatagaaggaattctttgtcttcctgagtttgttccggttgccgtaggcaattccgttgcttccgaaaccaaaggtatgaactccgtcttccagttccacctttatctctccgccggtctgcatagagccgtcattgagttcatccggatcaaacagatataagtccgctttttccaggccgtacagatcaccattcttaaagtcatctgatgaccagtcgtctatatcgtactgagccacaaaggtgtccttcccgtcaaacaacacaaaaccggtacgcattcttcccaatccgtcaaatgcataatacttatcatggacctttctgatccggttcctgtatacctctccattctgatccgaataccaccagctgtattcgccgtcgttgtaatcctgttcgtccagattttcagacggacacatccagaaccatgtgtttttcaaaagcttcccgccgttgtagcccgcaaaatattttgcagactctgagctcgtaggattgcttcggtccgcgttactgacactggccactgtgctccaccacggcagcataattccatactcgtcaaacccgtaggtattgtcaccgatcgtcttctccttaatcttgtctccgctgcttttcagttttttaaagttatcatcgaaataaagccacaattccttatattcactgtaattttttcccgtaagactgctctcgagatcatccgctccgcccagcgttacggatccatagtccatccagacgccgcttaacagcgcgccattctcaccggcataatagagaccatccaccagcggattatcatcttccgtcagcgcccggccttcttcatcaatccagccggtcagcattttccctttttcgtcaaaaacatatgtatttccatgaatcactttcttaaagccaccggttcttcgatatgcttttccgttcgctccaaagtaataccagccatcttcatagccgtcttcttctcttccatccgaccagatccaggcagattctgcacgtctgccatccttatctgcatagtacagcccatttcccaactcaatgaaactgtctcttaccatctttccatttgaatccagataaaaccacgaatcctttgattgtttccagccgtcagtcaccggctgatcgctcttatccagatacatccattctccgctgtcattggtccagccctcaactgcataagcgggttgcatctggatttccgacaggagtatggccgataatgcaaacatggcggctgtaaccgtaaatttcctttttctcatcccgttatccttccaatttcatttaattatctatagaaaccctttgcagggattattttaggtatacggacaacttctgccgtccaaagttctttgcttcctcgtgggaagcgaaaaagatatctacactctttcctttgatcgcctgtccgacatcctccacgtggtagacggtaccctcaatcacaatactgcttcccagcggaatcacttccggatcagccgcaacggtataatccggttttggaaccgtctccatcttcgtcagctttacctcttttgttccacagcaaatatcacatccgcaatatccggtcacctcaaactctccgagatattcgctttcttccggttcagctgcttctgcatcatttttttcttcaccgttctcttcccggccggctgccggcccggtgtttccccccgctgcgctttcttccggttcttccttcacagacaccccaggtcctctctccgtctcatttctttctcccggtgcctctgcgctctccagtatccctgtaagcggcggcgtctgaatgtaatcctggccggaggctccctccgagacgaaggaataaacgcctgtcaccacaaccgttgcgaagcaggcagccgtcaaaaaccggatccattttctccgaatccgtcttcttttttcggccctccggaattccgtcatccgatggcagccggacaaagattcctttcttccatttttccgccttctcacccggttcttctgtgtgccggatctgcctccatctcttcctctgacatcagcttccgccggcgctccccctggcctttgtcccatgtaatatcgcaatagttccacctcccctcaatccatacccggttccacgcatgatctccgctgtagaccggttcgcagtttaagcctgacatcctgcacaaggtcagataagcagagacgtaaccccagcatacggaactgccttccatcacggcatcgtaaaccgttttgttccggagctccgtgtcatattccacatggtcgtagacccactcataaaagaacagggccttctcctgctcttccatctcagcggcggctgccgcagtctcccaaagcctggcttccacctgcctgtgctgcttagcggctttaacgggattatcacattgtacatagacgcaggaactctccccggtctttcccgctgccagctggattctttcttttccgagataaacatagcggtaaaaatagcggccaaaggataccgcttcatccgcggtatcaaagataatacctgtatttctcatttcacccggccttacatcgtcagccagaagcctgatcagttcttcgccacagatctcatattcaggaattctgccggtcatttcctccgcatactttcctatctcatcccgatccatgcagggctctctgatctgtgtgtcagcccccgcgccaaaggccggtaaattccacgtaaatgccaggcatatggaaagaagtactgtcagacacgattcatagatttctttcatgatttaccctcacattcgtttacaaccgaatatctcttttgttgtaaaagcaggggaaaataagccgtttgaaagaaaaataatgcatttaaaagtgaattgacggcagaaactgccaaatatgcacaaaaaaaaacgcatggcgattaagcagaccgaccactcctccgttcggtctgcttttcgcgtcgaaaaatagaaaaaaaggaaaaaacatgtagatttaaaaacttttatgtagtataataaaaataatctgtatttaattcaatttctgcttacaacaaaagagatattcggttgtaggatgtgaccagtaatcccagtttttccagctgctgtctgtgtctcgtcccactttcttttgtgtaaattcttgtcgtattcacgtcgctgtgtcccagaatatccgcaagttttgataagtccttttcaatctcataatatgtccttgcgaataaatgccgcagattatgaggaaatatcttgtcactctccactcccgccgccatgcttaaggctttcatctctctccagatattactgcggtccaatgcatttcctcttcgtgtgataaagatcattccctgcataatccctttacgcttcgcatattccgccagcatattgcagagctgcctcgtcaaaagaacggttcggattcttcccttacactcgatctctgctttccctttctgcaccgcctccactgtcacatatttcagctcggatattcggattccgctggaacataccgtctgaagaagcagagacagtctctcatttcccttcctgaatgccgcatctaccagtcttaaatactcctcttttgacaattcccggctttcctggctgaatgggctcgtagtgatcttcaaaaaccggacttcacagtcctcccagcggtaaaatctgaagaatccattcaacgccgtcaatgcgccattcaccgttatcggcgcgagatggttccgcagatactgtttccagatcagaaggcttcccttatccacgcttcgcccgttcatgtgttccataaacttctgcagataataccggtacttccgtatcgtcccttcgctcttttcgcggcccgccagccattcacagtaattgtctatggtctcttccgtaattattcttttattttgattctcagtttttttcatggtgccctccgattagtaaattatcattctcatattttatccaaatataaaaaaaagcattcaaacacccgctcgatgcggatatttaaataccgttttcctttttatatttttccgccggaggtactatggaacggaaaactccctgctgtaatccactccatagatacctgctgctcacgggcattaatagtccaccatattgctcaacactgcgtttgtatcttcggcccagctgtactcggccatatagttgccgttatacgtccttctctgctcgattgatccatccagaaattcctcatagtcacaggaatacatcttcgtattgcctgcaagacagctcctgtaataaaagcagatattttcaattcccgcattgcggaatgtcgatcgcataagagaaactgcctttcggtaaagctgcttggcgcggttatcatacggccggttttcccagagcgaagtaactatctgctccatggttacggctcctccccttgcattgaccagaaaggcaaacagctctttcgcttttccgtacggaaagaacagcgcttctccgtccacatacacattaaaattaccaaaggttctcacatatatcttccgctcttttttgtcaaaacgaagtccctctatcaaagccttgcagcggtggaccgcattttccagttccgaaaaagagtacggtttcatcagatacgccattgcctgaagctggtatgccttcatggcatactggctgtatccggtagaaaacaggatctgaacagccggatagattttcttcagcagctcggctaagtccatcccgttgattccagccatttcaatatctaaaatggctaaatcgatgtcatggccatgagcaaatttcagcgcttcgagaggagacaggaatcctcccagcacttctatatcagccatccgttccagattacgcttcgtctctgacaatatattagcctcatcctccacgataatcgtcttcatcttcatgtctgtctctccttaaaccgaatcacagctctcgtcccttttcccggctcactgtggagcgccagacttccatccagcagataggaaagcctttttctcacattttcaagtccgattccgctgtccactgttctttcaggcatccggtcaaatccgatcccgtcgtcctctatctcaatacagatttcatcaccggcctgatacgatgcgatgcgaagtcttccggttccgtttttcttgcagagtccatgcttaattgcattttcaaccaacggctgtataataaaatgaggcatttgaaactcatcgtattgaatgtcataaaccactttgatctttccgggaaagcggctctgttccacctggatataattatccacaaaatccagtatatccggaaaccgggccatctcctccttccccagcgcgtttaaatgcgtccttaaatacttcgtaaacgcgataataagcttctccgccagatcagggtctgtataaatcagcgctttaatattggcaagcgcattaaaaataaagtgtggtttgatctgccccagcatgatctgcgattccgcaagctccatctgcctttttaaccgtgaattcatatacagcatatggtaccagtcatccatgatatctgagacgacgctgatcggccactgctcctggtttttgaacgtctctttttcatgggccgcttctccgggaccgtccgtttcttctccggcaaactctgtttcaaaccactttgctttgataatcatcggtttttccgcatacatcaacagttcttcatacgttttcccgtcacgcggccaaagggcaatgccaatttccgcgaatacattctccggtatcatgctttcaaataccttatggattcgggccgcttttctcagcacattttcttcattccccatgtcccccagaaatacaaccatataattgtcatggaccagcaggatatcggttggataaatcatataggtcaggtttttaacgagggaataggaaatcgctgattctccccagaaggtctcttcgtttttggccgcctcattcatattcagtcggataacgagaagcgcatggattttctctgactccttcacagctaaaagcttatcaatcttttgtcttgcctcccttctgtttgatgtgtagaaggaatcatttccatggcgcaggccgcgaagctttttatcaatatcccgcacccgccccacgacatacatgggcgtccggtcatcgcagagtatactcaggaagctgacattgcaccacgcataatcgtgcttatcgtcttttatatagaatctcagaagaatatcctccgggctttcaccattcataatatcattctgaagcttgtggaatctgggaatatcctccttcacgatataccattctatcatctgcccgttcagtcttttcccggaacccctggcgctgaatttactgttccagttttctgacaaaagcagtctgtcatcggcaatattccactcgaataagtagttatccgatgtgtcctttaagtatttatcggtaatggaactcttttgtatccagtaattaccggcaatgccattctcccgccccggcttctttttctcctgttccttctgcccccgttccttttcctccagcttgatccagataatcccggctattttgcgtctgcggctgatcgtccacttacatgcatacagctggacccagtagcttccctgctcatcttccacttttatattggtaaaatcatatggacaggcatgtctgtctgtttcctctgtctgatagaggtttcggacgaattcattcaggctctcaaaactgctgctctgaagaatccgggaatttggatcttcaaacacttcccgaagcttctgttcggtgaataaaaaggtttctgacttcacatccagaaatactattccgcagaagccgtactgttccttcaactgtttcagttttcttcgcacgatccgcatatcataaaaaaattccagcaattttttatccataatgcccgccgtttctgagttctgccatccttacccctctcctgcaccttctcatctgtttctttgtattaacgatattctatgctattacacaggttttttcaacatatttctcgttgccattgttaaacagcataccataatgcaagctacagcttttagacgtaagcgttacggaaccgtgaaaaatatatatttttgttattttttaaacgtactttatgcagaaaaccattggtactttggacgcatatactgtaattgagactatgtctcatcagtacaaaagtccaggcagaacggctctatcagcctttggaagacaaaagctgtgcagtttttggacaaccgcagccatgttaacatctgactgacaatataacgcaccaatgacagaaggaaaatttttatcacgattgacctgcagtcttcattgactgcatcactgttagatcaggaggactactatgaagaagcaagtgaacccgataatcagcattgcatccattatggctgcacctgcaaatggatctgtgcatgcaataaatggatcaacagacggtacggcagcgaatccgccgacggcccgtaccagctcattcatgtaacagccgcagcatcttacagcgatgccggactttcgccttataccatgtatcactacctcgtacaggcttacacgggcagtcagttcagcttgtaaagcgttcccgtcagtgcaatgactccttcctgcgggactcctgttccgccatgctggcaatgctgctgcccttgctgcggctgtgatccctgctgctgccgctgtaatccgcagaacaatgcaatcggcctgtaaagggcaggtccaggaggagtcccctggcagtctgcctgaggttcatttaaaaatacggataaacgtattcctcctccggcttttcggctgcctcaatactctgggcctttagcagcagggactggccgtcctcgctgatccctaaggttccttttaccaccacccagtcatcgtctttaaaatccagcgttcctacattgtccaccagaaagccgacagggctcaaatccgcagcgcagcaccacatagacaggcggaccagggcaaaatcacacgtttcccggatttccgaatcacgatagacaaagccttttattattaccgtatagccttcatacctttcataggagctgctcagttcatacatccacggatagtaatcctcatctgcaatcgtgatggtattggctgactcatccagaccgcttaagttatcctgcggattttcctctccgtctgaccgggccgcatccgttccatcatcggaaggcacatcctgcgctcctccatcgggtgtcggtatcggctgctgtcctagacgatctgtcatctgctctctgtccttcccggaagatacagggaagcctgggctgtcatagcttctgaccatacttccccctcccggcgcggccggccgcagggcaagcagcagaatcggaatgataaacacaaaggaacgcgccagttttgcccggtactgcggtgtcagcaggtatcttccattcatcaccgcccataaaagcataaaagcggccatgccataaaggtatggtttcatcctcggcgtcacgtaatttaaataccggcctgaatacgtaagatgaaacaacaggaatccaaacagcagataacagatacattctgtcagtacctgaacattaattccttttcctctcagcgtcatattcggatccctccgctcccccagagcatgaacagcatcatcaccaggaaacagacaagaaatgcggttacaaacaggcggaccacaaaagcagatttaaaaccggaaagcagcatggcggcatttttaatatccatcattggaccaaataccagaaagccgagaactgccccggcaggaaggcttgccgccatacttctggccaccacggcatcagaggaagaacagagagacagcacaaaagccagtcccatcatcagaagaagcgctttccacggcgccgccccactgcctgctgtcactgcctgaggaataaaatcctgaaacagcgtcgatacaaaaatcccggtgagcagaaatttccccacggaaaaaaattcattctgggcgtgccgcatgatcaggaaaaaacgggacagcctgatgtctgctgctgccggcaggctgtaattctcgcacgcgttctgaagaggcacggcattttccagcagataatcctccggtggtttaaacaggtaagtaaacccgcagagcacagcacaaagcacccccaaaccacatcttgccgcgatcatttgataattgccgttaaacgcgtaccaggtggaaaggatgaccaccggattgataaccggggataccagcataaaggtcacggcagcaggcatcggcactccctttttgaccaggcttttaaataccgggatggacgcacagtcgcataccggcagaaaaaatccggcaatgaccgcaaacagctggcccgccaggattttttcggggaatttcctttgaatccagtccggttttaagcagacctgtatcagcgaggaaagaaggaccccaatcaaaagaaacggtgcggcctgtaaaaatactccaaggtatacactgatataccgtccgaaggaaaatccaatctcgtcaagggaagaaaccgtcagtaaaaaaagcactgccgcagcggcggccatcagcagcaaatgctgcggctgcatgcgaacatgaaagatatcccgcataaagcgctcccatttacggtcagtatacacccgaatgtccgggctgcagttatacagaagatccggttttaccctgccgtgttccctcccttctgatctgatgtaagcgcagtcactcccggcaatctgtgaaaacgcggctgctccggcatccggaatccccgcctgaattcccgtatcggccgcaacataaaccactttttcaatgctcatcaccgtttttgccataaattgcagaaacatttcctccagtttatggaagtgttccattccgttccattcaattaaaattaattctgtactgtggctgttcagatattcgatcacggcatcggcaatatccaatggcgcccgctccagctggcttttagagaacaccagcttcttaacacgctcgtgttctgttaaaggtgtttcaccagattcaaactggagaaccaaaatgtccagttcgtccagtttttcttcgatcaaccggttgatgagggtcgtctttcccgaatccaggaggccggttatcacccatgccggcactgtcatactgtttcctcgctgaataacattcgtatctgcttctcattaaggccggtacccgtgaaacagacctgatttcccgctgtatttacaggttcaatgcttaaataatccggcagatagtgaaagaccagcccgcggcctccgctcgccacaatcccttttccgcggaggatttctccttccgcgtatgctgcaacatgcattacctttttttgaagctgttcttccgtaaggggttccttccattctatggtaacagaagcgaatacctcccctgcaaaatggcggcggataaaaccggctttcttagactgctctctgcttttgcgaattcgcacaggcttcatcgccaccgccgtctccatctccagcctgaagatgctgctgtttcgcaggccctggcggaacaccgatgcgggaatggattcccagaagtccgcctcgattctggcctccggattcagttcccgaagtttagcccctaccgttctaatctcttcggcagcctcctcctggtggctcagcataatcaaatcagcataggctatctgatcctcaaaaaattcgccgtaatttttcctgtatttatcaaaggaacggacatccacgactgtgattgccttttttaaatggaggcagcccttatcttcctgtttgaaacagattttaatgatatcagataattttcccacgcccgacggctccactaaaacagcctccggcgcatactcttttacaacacgctcgatcgctttctcaaagtctccggtcaggctgcagcaaatgcagccgtcacttaagctggtaacagccagattgcattcccgcagcagtccggcgtcaattccggcctcaccgaagtcattttctatcacaacgatttccttattcctgaacgcggaacgcaccatcgtcttaatcagtgtcgttttacccgcgcctaaaaaaccagatataatgtaaatatcagtcatatgcactccattctgctgctcatccggcagctctcgttattcctgatctgtttctcccactccggctcctgccagccgattcgtaccgttttcctctctgtactccgtacatgactatttccgcagtaaaattctctttcctgcaaacaccagtattaaaaccgtcactcccaccagcacgatcgtaccgcccggcttcaatcccaggtaataggcggcgaacagccccgtgatcataaacagaacgtccagcaccactgcacagagaagcgtctggcggaagtttgttccaaactgcatcgcgcaggctgcgggaaccaccatcatggaagagacaatgagcgcccctactgtcctggcagcgacagaaaccgtcacagcgattaaaacggtaaataggaagttcaccgcctttatcggcactccggccatcctggcgctctgttcatctaaagatatgtaaaacaattctttgtacatcagcagaaacaaaagcagaaccgttatgctgacggcagtcaccagagccagctccgtgtcactgactgccacaatacttccaaacagaaaactgttaaaatcagccgcattctttacaaatcccgacaggacgcctgccaggccgatcccggcagacatgacaacagcgatggacatctctgaaaatctgggaagcttcctgcgtatcgcttcgattccaatggcagcaatcacacaggcggccgcagccgtcaggacaggattcagccccaggatcagtccggccgctacccctgccagcgatgtgtgggacagggcatccccaatcatggacagacgcctgcataccatcacaatcccgatacacgggatgacggccgccagaagaataccgacaaagaaggcccgctgcataaacgcatatttaaagatctccataacactcctccttcggtcctgaccggacctgtttcatcgtaccatcttctaaaaaccagatatcatccgcataagcttccagccgtttccggtcatgagtgataatccatatggtcaccccctgctcccggttaatccggcagagaagctggtaaaacagcatggtactgttctcatccataccggaggctggttcatccattagcagaagtccgggctcattcaccagagcttttgccagcaagactctctgctgctgccctccggacagacggccgatcagcctttttgcaaacgcttccatccctaccttttccagcgcacatcggacctgctccttctcctttttccctgcaaaccggaatcttccaatctgggcgtataaatttgcctggacgatctcctccacggaggccggaaagttctgacaggttgccatgccgttctgggaaacacagctgaccttctgccagtttttaaattgccggatctcccgtcccagaagttcgatcctgccgttctgtccatttaacggaagttcccccagcataagctttagcagggtgctttttcctgccccattggggcccagcagaaccgcaaaccggccctcgggaacggtaaaatttatgttttttaatatcctggtatttccgtaggaaaaatccagtcctttcactgcaatggcatccattctctcttctcctgttcctgtctttattcctgtccttattgcggtctttattgaagcgctgcttccagctgctttaagttatcttccattacggagaagtagtccgctcctccttttatctcctcgtcgcttaatccctctaacggatttaaaacccggatcccggctccagtttccctcgcaattgtctccgccaccttcgggcttgccagttcttcaaaaaagatgaccctgacgtgattctcttttacataatcaatgatttccgccatccttgccggatccggttcagaatcaggggacagtccctcgatgcccatctgggtcagcccataagcgtcgcagagataaccaaaggcctcatgggacaccacaatgctcttattgggcagggcagacagcgtatccttatatttccggtccagcttatcaaacgctgcagcataggtcttataattttcttcatagtaatccttgttgtccggatctgctttgacataagcatcttttatgttttccatttctttcttcgcgttctccggactgagccatacatggggatcgaactgaccgtggccttcccggagtgtaagtccgctggaggcttccgccacgatcaggttcctggtttccaggctggccagcacatcatcggcccaatgctccagccccgccccgctgtagacaaagaggtccgcctcctccagattcctgatatcggatacagccggttcccagtcatgtggttctgtgccggccggaaccatgttcgtcacctccgctttatctccgccaattttaacagcaaaatcaaacatgggataaaagcttgccattaccttcagtttcccgcagtctgtatcctttccttcacgttcacttactgcagtcgtttgaaccggctctccatcagcgcccccgggtgcggcggtctttccggagcagccggaaagcaaagcagcagaaacgagcgccggcacgaccagccggcaaaatgtaaaatttagtttttttttcattatgatactcctcctgacatgtgtttttatagcgatatcaaataaatgcgcacacaaaaaacaaggcagatttccagcctcaatacaccactccctgacaggacgtcctgactcacaagacgcactgtctcaaagggcattggttatatggatagaaaacagccttgtcaaaaggaagtttcaattatctaaacggattttcaagctgaccaaagaaaccgggcacaaagagcgtccggactggtaagataataagagtttctgagtaatcatatatgtaaagataacgaccgctcctgtgcctgccgcttctgttatcaagcggattgtggcagcgcaggcatgaagctccgcgcagacagggcagtcctcacctgtacaatcatgttccgtatgggtaacgataaaaaagccggagagaagcagcaccgcggtcacaaggaacgctgccaggaatgcacagattcttttttgttttatagaacagttcacttcgtctcctcctttctgctgcagattcttctgccgtcataaatcactttttatgccagaacgccgatctttacagctttcacaatagccatacaggattgtatgctgctgatccagttcaaatccatgttcctcataaatatggtccagaaaagctttcattttagaacattcgagaggaataaaacggccgcagcccaggcataccagtttcccctgcttgttcaagtcctctttgtccacaaaacagtagcggactttggctccatcttccgttggaagcctgatcatctttccatcatcgaccatgcgttccaatacccggtatacggttgtctgtccgacagccaccccgtcctcttttagacagtccataatctggtccaccgtcagaaagcgtgacttctgttttttcagacaatctaatatgatttcctgttgttttgtcttgtatctgcctcgttctgccatatgggcgctcctgaatttgaaaatgatttttatttttatattataacaatttcccggttcttgtcaagagatcaattttttcgcatcctaatgaccgcagaaaagcagggaggagaagcgggtttgattccgcttcctctccctgcctcttaaatcaaagctaattcaaggattcacagtgtcactcttctcacccataccatcatctctccggcgcttcggttggcccagctgtagtagggaatccacaagagcttcttttcatcatacttctcattcttttcatcaaagtacagagggataccttcctcctctctgatctttcgtcccacagattccaggacaaccacgcctcccagcaaatcctttctgtattcttctttaaataccgtttcctcggggatctcgatgcagtgcaggtcaggaccgttgtccgcctcttccaggcagtacaccactggtccgcgcatcactgcggttttccccatattatccctgaccctgggattagaccgcaccagacgggcttccagcttcataacaaagacaatttcatgccgtcctttccagcagcgcttcagatagagatatccggcttctgtccggtatcccacaggttctccatctacaaggatctcaaactgcctgcaccagccaggcaaatgcagtgcgatttcccattccctgccgctttcgcattcggtcacaagcttcacgtttcccgtccatgggtatcctgtttccatatggatatgggcagcttcttctcctgaaaatacctccgtctcactgccgataaacagattgacatacagcctgtcttcgctctgcgtataaatataagctcccacagactccaccagacgtgccagattcggcgggcagcaggcgcatgcaaaccatttctgccgttctacctttacatggcggaatgcctgcacctcctcatccttcttcggatatacctccaatggattcacatagaaaaagctttttccatccaatgccataccgctgatcgtaccgttatacagcagacgctccataacatcagcgtactccccgcgctgctccatctgcagcatgcggcaggcaaaaaacaccattcccacagaggcacacgtctcaccatacattaagtctcccggcagatcgtagtcaattgtaaaggcctctccatacgcggaagaaccaatcgcaccggtaatgtacatacgcctgttgacaatactgtcccacatggctttacacgcttcatagagggtgtcatccagtgtttccctcgccacatctgccatacccgaatataaatatacggcgcgtaccgcatggcctgctgcatccttcatttctctgaccggtgcccctgcctgatagtaatggaactgaaagaagctgtccttccatgggtattcattgtggtacgtttcgatctccttttcaaaacagcagggctgtttcccccgctcatcaataaaatatttggcgagtcttaaatgcttttcgttcttcgtaatttcgtacagcctcatcagcgccatttcaatcacttcatgaccgggataagaatgaagcttaccttcctccgggccaaataccgtatcgatataatccacaaaccggatcattgcgtttaaaaaacggtccttgcccgtcacacggcagtaagcgacagccgcctccagcatatgtcccgcacagtaaagctcgtgatgacgcatgacgttggtccagcgcttctccaggccgttgatggagtaataagttccaatatatccgtcaggctgctgcgacatgataatcaaatccactgtatcgtcgatctttttctccagttcctcatcgggatgccattccagggaataggaagcagcttctatccattttgcaacatcactgtcctggaaaacccggccgtcaaattccgcatccatcaggccggccgccaccttgaagttccggatgcagtggctgggctctatatccggaagctcatcgtttagagctttccactgatatgggatcatctgggtccttgtcacttccataatcggcttccagaaggaatcctccaccacaaccgatgcaacggcctttgtaaaatgcttttgattcatatcttagtccatcctttattgtttgtcttttttcgccgtgctgcccctttatctatatctgatcaaactccctgcggcagtcctctataaacgactccacatggtcgaccgaaaacagatagcagtcttttatctccccggatctgatccgctctgccatcttacccagccgcacaagcgatttttccgccatggcctggtttcgctccgaaggagtctttctctgaatcagaagccggatatatgcctcatattcttcctgatgaagcaaaacccataccttcatatccccataacgccggataatatcttcgtaatcttccggcctcatcctgttttccagcaatttcacgttcccgagcgcctgttcgatcagatgcagggattcctcgtgcagttcccggtgcatccggagtatcttactgcccggcctgatcaggagatcgtaaatattctgcttgttttccggagttggacaccagtgaatcagcgcttttccgtaattaaacagccgtgactccaggtgcgaaaagtttggaatatgagaatggtcattggtcctcacaccaaattcaaaaaagacttttcttaccacttcatacgactttcgcagggcagaagccagtatcagttcagattcctcgtctgtaattccgtattttccggcgatccattccttccacgccacctcgggatccctgtccgcctggtcagaaagctgcagcagataatacaaattaatctcattgggagaacccagaaggctctgtccatcccagatgggccgtaccgtaatccgttttaaattagcggtcgcctccatggcatcatggacagttgcctccatggcctccggaaaacagcagggcaccagggaaaggccgtggtattccatgccgcagcagaagcagaggccatggttcatgtgaggaagccgtttgatcagtgccggcgcaggcagtgccgggttaaagtctcccgtcgtatagttatgctccaacaggatcggcagatctgccgggaaatctttcagtgcctcatacagaatttcttcctggtaaggaaaccacacatgagtcagcagcgtaaagctctttccacagtctctgcaggctgtggacacctcctgaagcatcatgcgcagatgatcaccgaagcttaaataggggtaggactgcccctcctgcttcataaccagttccggatgttcacgtaaggtcttttcattaaaatccagaccataattcatgcagccgaagaaattattatagtgcagcagattctttgattcaaaaaagtacatggcaagttcatccagctccggaaaacgtttgaagatgccgcaggccgcatcgtaaaggagttcccagaagaggccgttgtttaaatttctcacctgtggatatctctccagcagacactctaacggcgcatagtctcccatcatatacgatactttttttccattctttttgcatatacggacggcttcgtctataaatgcattcgtcttcgtatcaatttcaattccattgtccgggtactttgaaagctccgcatggttgaaaaagtacccgctgtgcagctgtacccattcaaaccggcttccggcacgctccgcaaaatcgaagtacttctccagttccccgatatctcccgccgccgcgtgagcctttccagtatctgcaaacagaagaagcattttttccatgtttctgttttcaaatgaattccatcgcgggaacatattatttgttattatatcgttcattttttatcctttcaaacctgttgtcgcaacaccttcgacaaaatatttctgggcagcaaagaaaatgataacacagggcagtatggcaatcagtgaaagcgccataatcggcccccacgagattccgctggaactgtccatacacatcctcagcccctgcataaccgtatatttattaacactgttgataaaaatcaatggattaaagtaatcattccaggtccagatgaactgaaagattgccatggaaaacaggcatggcttcgccagcggcagtatcatatacacaaagatcccaaatgtagagcacccatccataaatgcggattcatcaatatctttgggaatccccctgataaactgaaccatggagaagataaaaaacgggtaacaggcaaacagggacagcgcataaaacggtacgtaagtattcagccagcccatctgccggaacatgatataacgaggaacgatgaccactgcgttgggaagcatcatggttgagagcatggctccgaacaacaggccgtaccctttaaacttaaaccttgcaaatccatatgccaccagcgaagaagaaatcacggtaaacagcacaacgggaacgacaaggataccggaattcttcataaagtggccaaacgtgtacgtccctacgcctttccagccgtttatgtaactgtcaaacgagatacttttaggaatcagactcatggaagtcatcagttcctgattcgtcttaaatgatgcggacagcataaataaaaggggatagataaagacaattcccagagcagtcagcaccagataggatatggttttcagcacaatttttctgattttagctattttccggttcatcatcagccctcctcatcgccgtaaaaggtccatttcgcactggtcgaaaagataaatacagtaaagattataattatgataaacataatccaggaaattgcagatgcataccccattttacgataggtaaatgcattctggtacagcgtcatcgccagtacctgtgtcttttttaccggaccgccgcctgtaataaccgccggagccgtatactcctgaaacgcgttaatcatctgcataataatgttaaacagcgtcatgggactgatcatgggaatcgtaattttaaagaaggagcgcaccggcccggcaccgtcaatcttcgctgcctcataaagtgactggggaacctgttttaacgccgccagaaaaaacagcatggaggatccgaactgccagaccgacagcatacttatagtggtcagtgcgattttcgggtctgtcagaaatccaatgcttttaattccaagcctgtttaaaaatacattgacaactccgtttaaatcaaataaatgtctccataaaatggcaatcgccacgcttcctcccagaatggagggcagatagtagatcgttctgaaaagcccgattcctttcagagcctgatttaaaagcattgcaataatcagcgcactgatgagcttcatcggcaccgacataaagacaaatttaaaggtaacggccagagaatttttcacttcccggtcctttgtaaaaatctgaagataattggccagtccaacaaaatcatattggctgccaaagctgtagtctgtaaacgagtaatacagtgacatggcgatcggatacaactggaaaatcaggaatccgataatccagggaagcagatacaagtatccctggttgtttctccgttccagcattgttccctgtttcttgttcttcatcagtggtccccttccccttcaaaaatatgaattcctaaaatcctttccgcattctcgtaacagatcatccttctttccctgtccgaaagtgcttcatacagaaccccgtgtacatacatggccggattattaatgggataatccgttccaaataaaaaccgttccgcgcccagcctgcgtacactgtatgccagaatccccagtctggccaggcctgttcccgataaatccagataaagattatcataccgtctcatccgctccaggtgctgttccacgcgtggtttttcacccggatgtgctgctacaaacgtcagtttggggtggcgttctaccattcggtcagcatcgtcgtcatctgttgaatggtaactaaccaccatgccgtacgcctcagccgcctggagaattttatccattgccccgcttgaatagctgtaaccgccatgagcataaggcaccagttccccgatcagtctcacaccgtgttctgccatgtattcgatttcttcaatggattcccggacaaattccggatggatatgaaagcctggcgtatagaatccgtccgacatgtgtttaagctcgagtgctgaccggttcagttctttaagatcatggaaggatcccttccagactgtgtttccccctccaattacagatccgcatacatgactgatgccggcgcgttccatgtcacagcggattttatccataacattcttccctgattctggtcctggttccagatacataccggtatactgacttccggttaaatacggatgcatatgaaaatcaatcagattcattgacacattcccttcttcgtatcccgaaaggccaggatttgttcatggcctccgggacacactttgccgctctttttctgctgcaattttgactgttctgctgcggttatggtttcagcttctccacgatttccgttaaattggccatgagttcatctgccgcttcctccgggctgatcgtgtcatagcagagttcctgcatcagcgggaagagatatccgtaaacctcagaattttcattgacaggaggaactgcaccgtcggtcttttccagagccagcgtgatcgccttgttgactacaggatttaagagattctccttttccagctgaaggcgtccaatctctgtcggagggactccgcggcagtcgcttaagatgcggatcgcatcttcatctgtatacagccactgcataaactttaaagcctcctcccggtttggcccttctgataccataaataactgggaaggctgggtaattacccctgtttccttcgcgtccggatcaatcgggatatttatcacatccagtaccattccaccgctggtatccagattaataatggaggaagatcctctgtaagaacatgcaatttcattgttcagcagtttcttgttggcatccttgtccccattgtaggcaaatgccgtatccatcggctctgcaattccttctttataaaggctctgaagaagagtaaacgccttcaccagcgcatctctgtctgaaaccacctcataatcctcggaaatagtccagtaaccgctcagctgccgcacataagacctcataaaatggttacagtcatcatcagaaagtgtaatcatataataatccggatcagcggcatgaatctgttttccatattccagaaactcatcccatgtcatattgtccggcagttcaactccagcggcatcggtaacggtcttatttaccaccagattataggagctgacaccggatggcactgcgactgtacttccatcgtgcgctttacaaaaactgtctaaaaatccctgatcgaacacatcaagtttgaaggtatcctgctgatccagttttacaaacgaatccggaaatgccgcctgatactccgccgcagccgttgcaatcgtctgcatgatgtccggctgggttccgccggcaagctgggtcagaatcttatcattgtatccgtcgtacccctgatactcagcttcgatctttacattcggatttattttctggtattcctcgatagcctttaacgttgccgtatggcggtcatctcctccccaccatgcgaaacgcagcgttactgattccccctttttatcatctgccgtctgctcctgctgtgtggaagccgtttccccggaagcttccgcagaaggagccgccgtatctgacggctggctgctgtttcctccgcatcccccaaggacaaacgcaagacaggccgctgcaaacacccatttcatctttctcataatttttctccttttgacataattgtggtgtaaatattccaatcgcgcaatttggactttactttattttacacaaaagcttcgataactctaaacttttgcataagttttatgatctaattatatattttatatactttatgcacaaccgtttttactctatataaggtgtaaatatcttatatattctttatttttcatttattttacaaaaaattcctgatatactttatatggaaacttttcatcaaaaggagggatttcatgcatcatctcatgcttccatgcagccggccgctgacttttctttcctgtggacagctggttaaaaataagaattttttacacccaaaacgatgtcttgattcattcgttctgatttatattctgaaaggaaccttgaatatttcccagtatggtgttcagtacagactggaacccaatcagttcattctgctgcacgcggagaccgaacactatggctggcaggaatcatcggaatatctgcattattactgggttcattttcatgttccggaacctcccgtctatatcaatcagacggagtatccttcagaaatcagccaggcactgcctgaaaaatacattgtgcctgaaaccggtacgctcacacatggcaaacgggttcccctcctgttttcccagcttctcgatatatccatgagacggtatcctgcttccgaatatctgctgcactactctctaaccgccctgctgttagaactggccggggagttttcctcccgccttctggcaccgaaggaggatcctctccacatctacagaattcaggactggatccgacgcaactttcaacaggccataacggttgcccagattgcagaaattttccattacaatccagattacctttccagcagttataagaagctgaccggtaccaccctgacccagtatatcaattccgtaagaatcgagtctgcaaaaaatctgctgacttccacagactttaccttaaaggaaatcgccttttactgcggcttttctgatgaaaagtacttttttaaggtttttaaacagtatgaggatatgactccctcggaatttaaaggggcgttttttaagaaaaaagaagtatcccagtaaaaaaggagaatatgattctctcagatataaatacgatcatcggatcacgattttcttaccagactaattacatttcttcccttctgcatcgggaactgggaaaatcattttctgaaatcctgctttcgcagcgaatggagcgggccgtgattcttctgaaaggcaccagccttgcaatcaatgaggttgctttaatgctgggataccgtaacagcagtcatttttatatggcatttcgtgagtattatggtgtttctcctcgggaatatatccaatacttatctaaacagtatttgttggcatacctctattatcgcgtagccatgaaggcataaacggctgcaagttccgcaggtctttccttttactgtctttttccgctaaaccaatagagacaagcagcatttcatggtatgcacgaaatacagcctgtctctttgtaatatattaatcctgcaaaatatctattttaaacaaacttctaacacataagaattgcgttacaagattaaatcttaagcgcagtcctgtaagcagtatggaatgcatcaaaaattttacctgctttgacagcatcacctacgaggtagacttcctttcctctctcctttaattcatggtataactcctgttttgctcttaacccgattgccaatactacggtatctgcatccagtttctcaaaatcatgcggcccctgtaccgtaacaccatgatctttaacagcaatcagacgcgtgttggtcataatctgcatattggttttttcaatccgttcactgtaagcaagaaagtctgtggttgcgacgccattcataatctgcggcagcatttccaccagagttacttcatgacccttttctgccagatcgagagctgtttctgaaccaatcaagcctcctcctatgataactatccgctttccaagcttctcctcatgatcaattgcggtcagcgcatctatggcaatcggtttatcgataccgggaacctggggaattacaggttcactgcctgtcgcacagacaactgcctcatatgactctaaactgcggaccagaaaaaagaagaagagcggggggaaatcctgagcttctgcgaagggaaacctgccattgtaactacccaggctgtcacggatattaccaccgttaccgtgacacggcagtccctgcttcgtatgtgtgaggcgaatcccgcttttggccttgatctggcatcttatgtcggtgatgtcttaagactcatgtgctttgacgcagaaaatcagagtgtatcggatgtaacaacgcgcctgatcaactttatttttctatacatgaaaagtgaagactactgtcagacccaatgcattccaatgtcttatgagaacctggcctccgcagtcaatgcctcccgcatccagatagcacgaatctgctccaaaatgaaacgattgggagttattgacgttgggaggcggtgtattacaattaagaatccgaatgcactatatgactttacaaaatgaaggaaatgaaaaaagagagacacaatacagatatttgcagcgaaagcatcgattcttacaatggaaagtgagcccttttctccagatcaaagaaaacggctcacttttaaaattcactttatacaaactttaccccttcagtccctcaaatgctatccctcgagtaatctgcttttcaaaaaataaatacaccacaatatagggatcattgcgcagagcgtccaacatttcttctatcgattttatatcatagtgtcatcagacagagcagcccgcaaattaactatactcaccttcttccagctaagataataagccagcgccacaaagccggcaatcatgaaaagaaatgccagaacaggtataaccggtgcctctttgataaaaatcactggttccaaatagctgatttttatcatgtatccagtcataagaaccgtcagcggtattgtaataagaaccggtcgtcccgcaatcaccagcgcttcaatacaaaacagttttctcaggccgccaggagtcatacctatggacatataccgtgcaaactcacgatttctctggcgcacaaatcccaatgtattggagaatagattaccaataccaataagtgcaagcaggacacaaaaaccgcccagaacagtcatcatcccatgaatcatatgatcattatctatttttttctgtatccggttctcaataaggacttcatattccggattaaggatttcctgaagttcctcctttatccggttcaacgcttccaatgaggtagtatcatcggcaagaatacggatataaaaatcctcttcctctccccctatctgtcctctgatctgtttccataaagacaccggaaggaagtgtaccagttcatacaggtccagactcccatactcttcccgcagttcgggaacttcccgggtatacgcaagtaccgggacttcagccgtcagttcttcccgggccgcctgtcttaaaacacttgttttctgctgtcccgtcagataatcatgggagtcacggtttctaaaatccggatcggtaacatcatcgatctgattccggaccacggcaccatccagtcgtggagcagccccaatcatcccacagtattccagaaagctggaatcatccaatataacaagaggcgcattgacgagccagccctcttcggttttcgtaacatagttttcaggtgcatgcataaaaccgcctagagccgccatttcactgcttatttcatcttcggtaacaatccgcttcgcagccgctttctggtatactgcactgtctgccacaccggacaatgcctgtatctcctctgccttttcaaaggagtctataccggcatcctgtaccgtaaccataatgtcccagacattctggtatccctcaaagtaggtcattctctgactgacgcccgtaagagtaaaaaagcactgcataagggtaaatgccaaaaaagacagaaccagggacagtgtcgttgtccgcaatgcctttctttgtgctttcagcgcatttccggcaagttccccttccacaccaaataaaagcggtaaaatccggattttcttctttttctttaactgtagttcccctgtgttcctgattgcttccagcggagttaacctgctcattttctttgccggcatccatgcagaaatccaaacagttaaaatagtaattagaaacgtaaataccaaaacccaagggtgatactgccagacagcttcctgccgtcctgctgtatcacctgccagtacattggtctgcccaattatccagacactgatcagaattcccagcaaattgccggctatgaccggtatcacgcaaagcatggcagcctcctgtaacagacagattcggatctgccccggcgttgctccgatacttgaaaaaatgccaatctgatgtatcctcgcatacatagataccgcaaaagagtgattgatgatcatgatcagtgaaaaacaggccagcactgttgtccccagtaagaatggaaaaatcaatcgcggtgccggatccattggatcacgaatcaaatacatactcaagaggctgtggtggtaagaaactgcctcctgagaaattcctgccagttccgcaatcttaggcatatccgtgaggatcgtcctcctgttgtgcaggcagatatcgattaccgcttcctgtccgtcagacagtttttcattgacagacgccgtttttacattggcgaaatttcgtatcgactccagctgttttgtatctatttccccgacgatccgcccctgccatatgccctcctctgctcccagcctttctatctcgtaaatccagaaattataaaataagctgcaaagcaaagaaagcagcaaggcggaaataaaagcggcagccatcaccgttacactggaagcacggttgtgttttatataccccgcagaatagtctttccacatagccgttaccccctctgcttccggtcactgacgatatggccgtcctctaacgttacgatacggtttgcctccattgcgactttttcatcatgtgtaatcagtatgatcgtctgtttcagatttcggttggacagcttcagcatgtcaataatttccctggaattcttttgatccagattacccgtaggctcgtcggccagaagcagcgccggacgatagactaaggatctggcgattgcggctctctgctgctgtcccccggacagctcacccggcagggattccagcttatcttcaatgcccagagagcttacaatctggttaaaaaattcctggttcacgctctttttgtccagaagaagcggcataaggatattttttcggacagtcaatgtgggaatcagattatagaattggtaaaccagccccactttccggcggcggaaaatggctgcctgtttctgattcaaggcagatagatccatcccatctatcattacgtttccagaagttggtttgtccacacctccaaggatatgaagcagtgttgattttccggaaccggaagcccccacaattgctaaaaactcgcctctttcaacggaaaggtcaattccgtcgagcgcagtcacctggttaagcccttttccgtatatcttgccgattccttcacattttaacagttccatttgactatctcctctcctgctatggaatgtactgcttactcttttattatagcagcggaaggtgacaactcagtgactgtacatacggatttcaaaaaatgcgccgccctccggcaaatttccggcatgaactaccccgttctgcatctcaatgattgcttttgaaatggacagaccgattccaatactgccctttacagcattttctccccggtaaaaacgctcaaataaatgaggaatatcttttttctcaaatccctccccctcatcccagatccggatctgcacatacagcggattctgctcataggagcaatggaccctggcccctgccggactatgctccatacaatttttcaacagattcatgaccgcttccatcgtccattccatatccgcagtaatgacagcctctccatgatccgaaatatccagttcaacatcagagagaaccgataattcctgcagattatctgctgccagagtcaacatggtaaacacgtccagttttactttttcaagcgtcagtgtcccggtgtcaatgcgcgacaaaagcagcagcgcttcctctaaatgagtcagccttgccacctgtttccgaatctgccccgcatactccaaatcacttttttcttctattagctgcgcggataatgaaatagccgtaattggcgtttttagctgatgggcgatattatataaattatctgcataattattctttgcttcgagcgcggcgtctctggtctgatacagagtggttactgttttatatatctcatcctggagccgggaatattcaccttccctggctgcaagtaaaagaccctgcctccccgtattgaccttttccaaatattctgttaatgctgaaatctgttccccctcttttttatgccaatataaaaatgctgccataaatatcaaaagaccggttcctaagcctgctgcggcaatcagatatccagtctcccaccgcctgcctgcaaaatcatccgcacgatacccgaagctttccaggaaatccccattatccgacaatactattttttccctgttttctttcagtgctcccatgaaggcgtctctatctgctatgcgttcttccgcaagcatctggcagaacccgctgagcatttgaaactgaaccctgctgtaatacttcagcagaaacacggcggaaagcataacggaaaagaggctgacagatacaaccagcaaaattgtaaccacaatattttttttgccgttcatacggtgtcctccatacgatacccaaagcttcgtattgtttttatgcacagcggctgatgtaatttctcacgcagccgtttcatcgttacggtcagagtattatcattgacataacttccattgctgtcccagacctcatgcaggatctgctccctgcttatggtctggcccttattttttaataaaacttccaacagctggtattccatctgactcagcgttatttcctcatcgccgcagaacaccgtctttttactgtgattaagtgaaataaaatcacagctgagaacctggtctgatacagttccggcgcgccgaagcagagcctggatacgagagtataatacctccagttcgaacggtttcaccacataatcatcagccccacagccaaagccggcaacgatatccttcacatctccacgggcagtcagaaaaataatcggcatgtccttccatcggaaacggatagaacggcagagtacatctccctgcccatccggcatattccagtcaataaggcacaaatccggtttctgcctgcttagcatctgtcttgcctccgcgatcgaaggaatgatagaaacgatacaatctctttgctctaaatattcagcaacgagtgacgcaatattccggtcatcttccacgtaataaatattttccatgatattccctctgggttttaagcttctgcctgttacataggtttcaggtttttattcaatcgatcgaccatccataatattctcttttcccgaccggcatctgtctttgcgtcaaaatatgcccgtgtgtaagttttctttaccgataaagacatcgcctgaaaatttgcataagcgggctcgtatgcttttaataaaccagacaaaaaggcaatctgctcctctgtgaccgccggggatttgggggcatcccactggccgttttgcttagcttccgctattttagccaggccataatcggtcataagaccctgttgttccagtttttctgccagcgctttatttttctccgaccatttgctgttttccctgcgcagggaaaaatactttttatagattttatcatcaatactctgcatctggccatcaatccagccaaaacaaagggcttcttccaacgcttcgcctgccttaatcgttttggggccgcccgccttgccaaaaagcacccaaataccagctgttgacatacaattctcctgcagccagctgcgaaaatcctttcttgtggaaaatttcattacctcgctcatatctcctcctgtgaacatcatcaccactgtaaatcaatgccctgtctacaaactctcagctctgacattagctccttctgccaaagactttcaaaacaaccttttcccgtctgaaatatcaatttcaagcgctttcgccctgccggtctgctgatatggattgattttctccacgataccatcatgccggaaaagagagcctgtgttcttaaaccagaaggttacccccgccttgacacactgctcccggatgctcagcacccactcgtaatcgcactcgcgcgcttccctccccgtttcgccgccaacggtcacatgatccaccccatgaagatatgcggtcagatcgatcgcttccagaagcggagcgcaggcgataaaacgccgcttcatcggataagataaaaacagaggaagccggtaatcggcaatcgcctggttttccactgtgcagccaatgttcacattgtcatagccctcgccccagtcgtcgggcagggacacggggaaccggtcgatccgcttggtcagaatcaaaaaatcaatatccgtccgctcccggatcatgccccagacctctttcctccactcgtccgcttctggcaggaaaaagtcggtggcaaagcaggtagcgagaatcttatcccccttgatgttgtattcacccttcttatttctccggatgggccagttgaatttatctgttttcagaattgtattctgtccacagcgttttgcatatggcccataaaaatagcagtttgcacagccgtcacttatttggtaacaacctgtccacggttcccagttcatagacaacctcctttgttctaagtaaaatagcggcggctttggtctgccagggccgccctgtgccaatttctttcaaaagattggagccatgccaataattttagcatactcctgctgcagaaaaaagctctcaaaagttacatgtttgccaatatctatgacaacatttggatgaagcacggtttcataaaagctcttagaggcggatatatccttaaccgctaaaagccccttgatctttcatattttcattcctccttcgaggaaattatatgataaatttccatcccgttatagtaaaaatccgacatggcatgagcgtgtattgaggaaggaacgtatccctctccggaaactcggcattataatactgaatatattttctgagtcttatatgaaacggcaggatattgaattgcttatccttctgaaaaatcatcaggtttcctcctggtacatgttcacggccagcggtttagaagccacacatgccattccaattataccaggaaactgcagtccttgatagtctctgttggattttcggattactactgctatcgctcgcggcaggcgtcttcttttagaccatacatcagtttagcagagaaaatgaggcacttgatgcatggcacttgtgtatacagaagaatataccgcagaagatttttataagcatcaggatatctctatgaacttaatacataagataaaagactgtcaaacaagggggcctgcgcggtttatgccgcatcatttgctgttttctggccaaaaataacaggacataaaactaattcgaacagaaaccgcacattcatcagataccgcacattccaggcagcagttttttatgaattatccattacaattatttttataatagactatacgtcagccgattcagaggattctgcctgtgtagcaagaaaatgtgcttttgctgcagacaattctttgtgaaaatgaatggccagccatgcggtgacaatagccgagagaacgtcagcaatcggctgggcataaagtatcccatccaagccaaaaattcctggaaggagtaaaataacaggtacaaaacaaatcccctgtctgcatgcaccaaggaagcagccctccactgctttccccatcacaaggaacagaaacgaatataccgtgtagaacccaaaaaggataaaagaaaggccgtttgcccgcaaagcgaacgaaccgatacgaatcatctccatatcgccttttgtaaacaaggccataatctgtgaagagaaaatcgcagcagccaaaccaaacatcgcacaaaatatcgtagaccagagaatcgaggttttaatggcttcatgcaggcgatcaaatttctttgcaccatagctgaatccggcgattggctgaaagcctttcaaaaaaccgaatacaatcaggctccccatagacataattttcgtgagcggccccatcgcggccagcgcggaacctccgtattctttcgctgcattgtttatcatgctgattgaaaggctggtcaatatctggaataacaacgtgggaatcccgattttcaaaatttcagacatgatttctttggaacagcagcactctttgatatgaaaactgaaaatactttttttacgcaggatatagcccatatagacgattgtggaaactagttgtgaaatggctgttgcaattgctgcacccgcaacgccaagatgcagtctatagataaaaatcgggtctaatatcacatttagtaaagcacctgccatcaatgcacacatggcagttttagcggctccttcgcttgatacaatattgttcatcgtgacattgaagacgttaaaaattgaaaacgtaatatagatactggtgtaggcagttgcataaggcataacactttcgattgcgccaagctgttttaagatcggttttaggaagataatggaacaaagaataaggactgctccagtcaatacgctgctgtataaggccgtactggctaccttgtttgcagtttctttgtctctgcgcccaagtaaccttgaaagacaggcggcggctccgttaccaaacagcaggcccaatcctacgataacctgtccgaggggaaacgccaccgtgacagcacccatttgatcggttccaagtcctcccacaaagtaagtgtctgccaggttgtacagcgcattaatcagcataccaatcatggttggcagccctaacgccagtaatgcttttggaatcggcatgctccccagcagcgctatttttttgtctgattcattcatctgttagttctcctttcgcttgacataaggcataaaatatagtagtataaattatagtaattgatcaactagcaattacactactataatttacaccatttgtcaatagaaacaggaggaaatcatggcgactatcgatttaattgtattagggatattaaaaagggaatcactcagcgcctatgacattcagaaattagttgagtatcgcaatatctccaaatgggtaaaaatcagcacgccctcaatctacaaaaaggtgatacagcttgaagaaaaaggattgattaaaagtaatattgttaaagaggggaaaatgccggagaaagcaatttattctcttacagataccggcgcaaaagaatttgaaaatctaatgaatgagatcgcgtcacaaccgattcactttttcctggattttaacgccgtgattgtaaatctgcccagccttccaccggaagggcagaaattatgcctggaaaaaatcgaggaaaatgtaaaagctttaaagacctgtctggaagaaaatctatgcgaaaaagaacgtgtaccggaaattccggaaacaggtatggcagttttgcagcagcagtatatactggcccaaacaatcgaaacgtggattacttctctaaaagataacagtttttctgcgatttgagagcagccgcacgatttcttgagggatttaaccggaagctgcggaaagtcacgataagaaaaggatctttcccccgataatagtctgggcactgccaggactggggaaagatccattcacagaaaaaccccggttcaaaatcctcgaaccggggtatgtcatccaaatgactgactagacctcatcaatcgccttcccaatatcatctctcatatacttattcccaaatgtaatccattccgtcgcccgatacgcgttttcccgtgcctgctttaaattttcgcctttcgcagtcacgcccagcacacgtccgccgttggtcacgacccggccttccccgtcaaactttgttccggcatggaatacatagtatccgtcacgccccttaaaattctcgaatccgctgatcggatatcctttttcgtagtgctccggatacccgtcggaagccagcacaacgcagactgccgcgttatcctcaaactccagctgaatctgatccagcgtgccgtccacacaggcctcgaacacttccaaaatatcattcttcatacgcggcagtacgacctgcgtctccggatcgccgaatctcgcattgtattccagaaccttcggtcccttctcggtgagcatcagcccaaagaagatgattcccttaaacggtcttccctccgccttcatcgcgtctaccgtcgcctgatatacgtatttccggcagaaggcgtcaacctcctctgtatagaacgggctgggcgaaaaggttcccataccgccggtatttaacccctgatccccgtttttcgcccgcttgtgatcctgcgccgaggtcatgatctttatcgtatctccatccacaaaagacagcacggagacttctcgcccggtcataaactcctcaaccacgatgcggtcgccggcggagccgaactgcttatccagcatcagtgtcctgacgccttcccttgcctcttccctcgtattacagatcagaacgccctttccgagagcaagaccatccgctttcagtacgatgggcatctcggccgtttccagatactgaagcgccgcctccggagtatcaaaggtctcatagcccgccgtcggaatatggtatttcttcatcaggtccttggaaaatgccttggatccctcgagaatcgccgcgttctttctgggtccgaatacgcgaagcccttccttctcaaatacatccacgatgccgcctaccagcggatcatccataccaatcacagttaaatctatctgattttccttcgcaaacgccgccagcttatcgaattccatggcgccgatcggcacacattccgcatattcagcgataccggcattgcccggagcgcagtaaatcttatctgccttcggactccctgccaccttccacgcgatcgcgtgctctcttccgccgcttccaacaatcagtactttcatcatccgcctcctgaacttcttatgagtttgcaatcatctgaatagcctgaggcagaatcacccactccgcctcttccatcacacgtctctgaagaatctccggcgtatctccgtccttcacttcaactgccttctgtaaaagaatcgggccgctgtccactccctcgtccacgtagtgcaccgtggctccggtcaccttcaccccacgctttaaggccgcctcgtgaacctttaagccgtagtagcccactccgcagaaagatggaatcagggaaggatgaatattaatgatacgattcttatattttctggtcatcgcctccgggatcgttacaaggaacccggccagcacaatcagatcgagatggtactcgtccacctttgacagaaatgcctcgttaaattcctccctggttccgaactccttcggagagatggccgcagtctcgattccatggttcttcgcccgttccagcgcgtaagcactgcggttattgctgatcaccacttccacgctcacattggtaagactcccgtcgtccagccggtctaatatggcctggagattcgttccgccgccggataccagaatgccgactctcagcataaggtcactcccttttctcctgcttccacgctgccaatcacatatggagtctcaccagcctcacggatggcctccatcgcggtatccaccgcagacggatcaaccgccagaaccataccgatccccatgttatacgtattgtacatcatttcttcttcgatactgcctttttcagccagaagcttaaagattgccggaatctcatagctgtcctttttaatgactgctctgacaccgtccggaagcatgcgcggaatgttctcatagaaaccgccgccggtcacatggctgcaggccttgatcgtaactccgctgtccttcacactctttaaagccttcacatatattttcgtcggagcgatcagggtctctcctaaggttccccccagctcatcgtaatacgtatccagactctccttcgtcatttcgaataccttgcgcacaagagaaaaaccgttgctgtgtacaccggaggaagccatgccgatcagcacatcgccggcctttaagtcttttcctgtaatcagatttttttcatctacaacaccaaccgcaaaaccggccagatcatactcatcctccggataaaagcccggcatctccgctgtctctccgccaattaaggccgcaccggcctgtttgcagccatccgccacgccgccaacgatatccgcaatcttctccggaaaattctttccgcaggcaatgtaatccaggaagaataagggttctcctcctgcacaggcaatatcattgacacacatggcaacacagtcgatacctaccgtattatgctgatccataagaaatgcaagctttagcttcgttcctacgccgtcagttccggaaacaagagtcggtttctccatctctttaaatgcgctcatggaaaatgctcccgaaaagccaccgatcccgcctaatacctccggtctcatggttccctttacgtgttccttcattaactctactgacttatatccagcctcaatatccacaccggcattcttgtaatccatttcttttcctccttgtcatgagcacgcaacgcactccacggcttatttcttcatctgtgccagatactctttgtatccgatctgatccagcttctccgctttctttaccacatcattcttcaaattctcggaatactcctttaatctgccgagcagcgcctcatcagacgcagccaggatcttcgccgcgagaattcccgcgttcgttcctccattaatcgcaaccgtggcaaccggtatgccggacggcatctgtacgatggaatagagagagtccacaccgccgagatcggaagtcttcatcggaattccgatgaccggcatcgggaaaagcgccgcgcacatgcccggaagatgggccgccttaccggctcccgcgatcatcaccttcacacctctcgcttccgctgtcttggcatactcaaagaatatatcaggctccctgtgagccgaaataacagttatttcaaaatcaacacccagtttctcaagaacgtctgcagcctgcgccataacaggcatatcggaatcactgcccataacaatagctacctttgccatagtaaatctcctttcattattaacggttatgcttttcattagttatattaatatataaagcttataaatcagtctttacttataattataatactagctttttatgctcccgtcaataattttcttaaaaatacccgtatattcaataatgtaaaacttcctttacaaaaattgtaaaatacactttacaaacaatgtaaagcgtgctatactaaaaatgtaaaggaaacattacttttaacaacaaacccccgcagacacagagcctggctcattacctttatatgggccgccagagaaacactcaggcgtgtccgtctggctcgctgcctgcgggaataaaagaaagggaagtgttgtgtaagtgaagacaagaatacaggagttgagaaaacaatcgcggatcacacaggaagaactggcggatgctctgggcgtaacgaggcagaccatcatatccctggaaaacggcaagtataacgcctctctccagctggcccacaagatcgccgtatattttcacatgaacattgaagaaatattcttattcgaggaggaataaaaccatgctgctgaacaatttatttattgacagtcccattaactttgagaagaaatgcaagaccagaatcactgccagctgctttctcatggcgctgggcgtgatcaccatcgccctttccttcctggcaggcgatcagattcccgtcctgtacatggccgccgaccactatgatttcattccgggcttctatatgggaaccgggttcggtctgttcttcgccgcagccgcaacgatcattaaaaatgtccgctatttaaagaagcctgagataagaaaagaacgggaaatctacgaaactgatgagaggaaccgtatgctgggacttcgcagctgggcttacgccggatataccatgctgctcctgctctatatcggtatcctgatcagcggattcatcagcattctcatccttaagacactgctgatcattctggcagtctacgtggtggtcctgttcgtatttcgaatgattctgcagaaaacaatgtaatcatacacttcttcagctcagcttaagcgctcaatttaagcgttcaatttaagcgttcagtttaagagctcgatgcaatcagaaaacaaaaaagtaaacagaatgtgccgccccgtatcaccttcccggcacattctgtttttctattctgcttcttatttattatccggctttccctgttccttatccagcgggacattcagctccccgacaccaggaagcacaaaccgcccgtcagcgatgatcgaaatcctgctgccatccgctctcaccgcatcgatcgtatccagttccgaataagggatcgtgatatccgtatggcagctgaaatatgccttcgacaaatcttccttcctcagaatggaaatctcattgtctcttgcaatgatttccttgccgttcggattatacacggcgctgtcctcggcccagctgtagcacgtatcgccaaccgcaaaatgcggtcccatcttctccacgatcagaatcggaagcttgtcgaggatcccataccgttcggccatggcgtacgccgtcgtattggttccgatggcaaactcgcccatgggaagcgtgtcgtggttcttcagtatcatctgttttaccagcgccctgccctcgtttggatcttcaaaattatcgcaggaatacgctttgatcattccgtcctcaaatgtcatggagagattcttaaactgaaaatcaccgatatacacggttccgacaaacagcgttccctgcgtcccgcagagcttcggggacgtaaatacctcgcccagcggaatgttgacatccgccacacagttttcaaaattcgtctctttttccctgtctcccagttcatgcaggctcacgcgcagatcggtccggttgtctccctttcccttcacttccacgtattccgcctcatccagtgcatcgatgatcgtctgctgaatcgtcttatacttttcatagtccagcgtgttgatcgcgatagtctcctcgaatatctttttgaaacgctcaccggcactctctgcatcccattcaccgtgactgccgcgaccgatctccggcaccgggaatgcgatgatcgtaaagcttgtttcatcaccgggaatatactcattggtaatcaccgctgcctcattggctgcctttgcactcagcttctcctgtctgccatccagacggtttgcctccttcttattaacaggctggaagccctcctgcccgaaggtctcaatcacagccggccccgcataggctgcggcctcttttttatactgctcataggcaacccgcagaacggaagccttcctgtcggtaaacgccttgtttaaataaatcgcctcgtcgtagcggtgatcgtactcatactgacggttggcaggcgtgccgtaatagcccaccttccttcctgccttctgattcacagaccacaccgcggagcgggaaagaatcgtatccagccccatctcacggaaattccggattgccgccttcaccatgcgctcaaagcccagctcataccggatctgcaccgcgctctttttcgacagatcgcgtcccatcacttcaaagcccttccggtagccctccgtgtacgtatccgccataagctgcaccgtctcctccggaagtgaattcataaactgtgccaccagcagttcggactcggagatataatcgccaaaccggtataaataccgcaggtcgtttaaatcgctgtccatgatgatatcctttgcaaaggtcagagcaggatccaccccttctctgatgcggtaagtcaccgtataatcgcagtaatcgctgacaaaccagtagagcacatcctttacactggcggctgtaggcactgtctcctcgaacatattatagatctcaatcactgtctcatttaaaatggtgatatccgtcagcctgttctccgcagtaaaaagaatcccgccccggatttccttgtagagataggaaaaaagctgtccatactcctctcccagagcggaggctgcatactgtggatttccatagctggtttcgtagttctgagggagaatgtcctcatagagcctgtgattccaggctttcagttcgtccagagaggcattctccagcagtccgccttccagctgctcgcgatacgctccgatcattccaataaatgacgccatcttccggaaataagagcggtacggttcttccaccgtctcctcactctctatggcatgaagccgttccatggaaagctggaaccgctccatcacgctctcattttcttctttgaatctgtcacaatacttcatcgtcatcctccaaatccaatgataatcagaaccgtccatacgataatcagaaggccgctgacagccatccctatcttggacagtatgtactttttctccttttccaaaaaagaaagcgccccataaatcagggaaacaatggcaattaaaaagctgcagaaacaaaccgcagccacattcagctccgcgttccctgccgtcatgaccgagcttgccacaccgatgaccgcgagaatcaatgcggcggcagcaagcccgatggccataaagcttctccttgcaaatggtttcctaatataggatacttttttctgctgctgcacgccgcttcctcctcactcgtatcgtctgtacaattttgtagaacacaaagccgagtaatccgccaagggtgttgagaatcatatcgtccacgtcgaagctgcccaccttccatatcagctgcaccgtctcaatgcagaggctgaacagaaaacttaacagcacggtgttataccagtgacggctcctgcggctgatgaccggaagaaaaaatccaaatggcataaatccaacaacattgcccacaatattcagcaaaaacgaccggattcctaccacgtgccagtacacaataaaacgcctgatctccttgaacggcaccagattataggcgtactcctcctgcagatggcttccccgaccaaagtcctcggagaagaacaggaagtacgccaaaaaaatcaggtaaacgatgaaaatcacccaacccagcttctgtcgttttgttgtattttttatcataaatgccccatttaaaacgtaatctcggattttctcttaagcagaacagcaccattgatgatagacatgatgccgacacttaagcctgccactgtaataataatgccgattacaatattaagcgcgcctgcatttctcatggtcttataaactctctccatattcagctctccttactttacgccgtagatttcgtaataggcgtcaatcgccgcctttaaagtatcatcaatcataatctttccgttatattctttattatacagatattcgataacttctgccatggtaacgatggcttttgcatggaaaccatacttttcatgaatctcgtcgagagcactcttatccccttttcccttttccatacggtttaaggaaaccatcagaccgagaatcgtcacatctccctgagccttgataatcggaaatgtctcttcgatcgacttgccggatgtggtcacatcctcgataatcaccacgcggtcaccgtcctgaatcggactgcccagaagaattcctgcgtctccgtggtcctttgcttccttccggttcgaacagtatctgatctctttcccatataattcatggtaagcgatggtggtcgccacgcttaacggaattcccttgtatgccggtccaaacagcacatcaaactcgtccccgaaattatcatggatggccttcgcataatactcccccagcttcttaagctgtgctcctgtcacataggctcctgcattcataaaaaatggagactttcttccgctctttaacgtaaaatctccaaacttcagcacgttgctgtctaccataaactctataaattcctgcttatactgttccatcttatcgtccctcctgaaatcgggcttcttaccgaacggctccgactaactcattgatatcttctatgttgtacttcttcatataattttcgattccgcttacaacctcagctgtggcatatgggttatggaagttggccgttcccacggaaactgccgtggctcccgccagaataaactccagcgcatcctctgcattcataatgccgcccatgccgatgatgggaatcttcacggcgttcgccgcctgatacaccatgcggaccgcaaccggcttcaccgccgggccggataatccgcccgtcttattggccactgcaaaggttctgcggtttatatcgatcttcatgcctgtcagcgtattgatcagagagatcacatcggcgccgcccgcctctgccgccttcgccatgacggtgatatccgttacgtttgggctcagcttcatgataaccggctgattcgcatgtttctttacctctctggtgatggcctccactgctttcggatcctgtccgaaggcgatgccgccttccttcacattgggacacgaaatattgatttccagcatatccaccggttcatccccgaggcgttccaccacttccacataatcctccgtggttctgccgcagacattaacgataatcttcgtgtcatactgccttaaaaacggaatatcccgctttgcaaatacttcaattcccggattctgcagaccgatcgcgttgatcatgccgccgtacgtctccgcgattctgggcgtcggattgccgggccacggcacattggccacccccttggtcacaaccgctcctaaaccgtttaaatccaccatctcaccgtattctgctccggacccaaaggtaccggatgccgtcatgaccggatttttcagttccacaccggctaagttcaccttcatattcatcagagttccacctcctctgcccgaaataccggcccgtctttacagattcttgcattgtgaacatgagaatgttcatccacgttctttgttttgcagacacaggccagacacgctccgattccgcatgccatcttctcctcaagagacagaaaacaggtgatgttctctgaagcggcaaattcttttaacgcgcgcagcatcggcgtagggccgcatgcaaaaatcacatccgcctttaacccgtgttctctgatcgcgtcaatgacattgccctttgtaccggcgctgccgtcttctgttgcaagaaccacatccccgtaaggagaaaattcctcatttagaaacagaacgtcgcgatatcctaaaatcacttcttttttacagtgtagctgcttcgccagttccagcatgggtggaattccgattcccccgccgatcaaaaaggcggtctttccttctgcagcttcctccagcgggaatccattgccgagaggtcccatgatatcgacgggatcgcccgcctggtaacgggaaaattcttccgttcccgctccgacggtcctgtatacgatccgcagcataccggtttctttactcgtctcacagatgctgatcgggcgcggaagcagttttgctccgtcctttgtatacacagaaataaactgtcccggctttgcctgggcagccatctcctcctcccggatccacatgctgtacacatcttctgtcagcctttcctgacggtccacaaaggctgttacttttctctgagccatgcttcctcctacagtacgctgttgatatcggaaaccatatcgatgaccgcctgtctggaggcttcaccgaaatgctctgcgccgaacttcgcgtatttctcctgcttatatgcggcgatgatgcctctggaggagttgacgattgcaccgagcccgtcttcattgaaacagtacttaaggtcttcagccgttccgccctgcgcaccgtatcccggtaccaggaagtacgtattcggcatcagttttcttaagatccggctcatctccggataggttgctcccactacggctccgacgttgctgtaagcgccgtccatacagtccgcgccccattccactaccttgtctgctaccagctcgtacagcggccttccgccgatcagctgatcctggaattcaccgctggaaggattggaggtctttaccagtacgaagagtcctctgtcctcctctttgcacacatcgacaaacggcttcactccatccgtgccgagatacggattgacagtcagaaaatcggtgccaaagccggtcagaatgctgccgcccactttcacatggccgatatgtgccgtcgcatacgcggcggaggtagaaccgatatcccctctcttcgcatcgccaatcacgagaagtcccttctcctgacagtaatcaaccgttctcttatatatcttaagcccttcgatgccgaactgctcatacatggcgatctgcggcttaactgatggaataatgtcacagacatgatccacgatttctttattaaactgccagatcgcctctgcggcaccttccagcgtctcaccaaactcatcgaatgcctttctcgtcacatgctccggtatatatccaagcatcggatccagtccaacacagatgggggcctttgttttttgaatcttctgaatcaactgattaatcatagtctcctccttcgttcctcacattttctctattcttaccaattctatcataagtagggggctgtttcaagcgtctttctcaccgttacccgccgcatttaagtcgtgaaaattcaattgaagaaaattagcactcacctattgacagtgctaacaatttgtgttatattacacctagaacaaatcaaacaacaacaccgcatcaaacgcggtgcagataaataaggaggaagaacctatgttattatccagaagaaataatttattcgatgaatttttcaatgatccattttttaacgactctgtacagaacagaacaacgcttatgagaactgatattgaagatgacggaaccaattatatcatcgacgtggaacttcccggatacaagaaggagaacgtgcgtgctgaattaaaggatggctatctgaccatctacgccgaggcgtcaggctcttccgaagacagtgagaacaaaaactttatccgcaaggaacgctacagcggctcctgcaagagaagcttctatgttggttcccagctgcgccaggaagatattaaagcggccttcgacaatggcatcttaaagctgaccgttccgaaggaagctccgaagcagatcgaggaaaaccactacatcaccatcgaataacacatattcccgctttccttaccggaatcaaccatattctatgataccaaaaagaggacagcccaccggaccggaccgcctgccgtttctgcagacagcggaatttccgaagggggctgtccccttttttatcttcacgtttcaatttttatcagggattccacccccggcccgtgagttggacacggacactccttattccagcagaaaagctgtcgccacataggcgccgctcttataagacttctttaccatctgttcttctacttcgatctttaaattcagccacagttcttccgccgcgatggacagatgggacagcatgattcccatactcaaatccctcatcgccaccatggtctgggaaggaagaaattccctgcaggagaaaatatagattctgtcgtggtaaacgataaagcgccacggctgcgtattcatggccgaaggtgccagtcgaacagccttcaggatattcttcagcggttcgccgatctcatccttgaacacgcagagttcttttaacggaaggcgttttgccgtagccggatcacggtacagcagggatctgggatatccaaacgccacggcaacggccgtcttcatcccggcaggctccggtccgggaatcctggtactgcctaagtaacacgttcccagtcccttgccggtcatatacagaagaacaggctccagaacgtatcctgcattcatcatccagccctccttctcttccgaataaaacaccagataatacggtgcttccaccttccagaaaccctttacaggaagatccttccctatattttccttaatctccatctttgtggaaatctccgggcaaagtgtggccacacggtctgcaaacgccaggacatcctttataagctgctcaggtaccgcttcatatttaaattttcgaatggatcttctcttgaagatcatctgatacagattcatccctgctcccctcttttcactacagcgatttaaactcctccagcagttccctaaatacggccagcgcttcctttaccggctggccggtagacatatccacaccgcacagcttcaggagctcgatcggaggcatggaattgccgccgcttaagaatttgaagtagccttccagtgcctgctcatcaccagccagaatcctgctgctgatcgccatggccgccgaaaagcccgttgcatactgataaacgtaaaacggcgtatagaagtgaggaattcttgcccactcataatcaatctcgcggtcgaccaccatctccggtccgaaatatttttcattgagttcgtgatacagcctgcagagcagctccgccgtcagcggttctccggcctcactccttctgtgagtctcagcctcaaactccgcaaacatggtctgacggaacaccgttccacggaagctctccatgaaatggttcaaaagatacgcccgctccttcttatcctccgtcaccgccagcaggtaacggttcagcagcgcctcattacacgtagacgctacttccgcgacgaaaatcttgtatcccgcgtccacatagggcagcgcctgatcggaaaaccaggagtgcagggagtgtcccatctcatgtgccagggtgaagacgctgtccagtgtaccgctgtagttgagcagcacatacggatgcgtcccgtagaccccccaggaatacgcgccgcttcgcttaccttcattttcatagacatcgatccagcggtgatcgaagccttcctgcagaagagccagatacttatcccccagcggggccaggccctttttcacggtttcctttgcctcttcataaggaatcttcctgtcatcgtgttccaccatcggcgtatataaatcgtacatgtgtatctcatcgagtcccagcaccttttttctgaccgagacgtattcatggagaagcggcagcccctcctggatcgcttccgtcagattgtcatagacgctttctggtatctcgttttctgacagataatatgcccggctggaaccgtaatttctggctttcgcataaaaagaagcctgctttacatttgccgcgaacgtggccgccagtgtattggcaaactggccataaacgctgtacatcgactgaaaagcagcttttcgcacccggcggtcccggttctccatcagcggaatatacgtaccatgggtcacaggaatttccttcccctcactgtctgtgatagacggaaatttcgcatccgcattattaaacatgttaaaaatatcggaagaactctgggtcgcttccatggattttgcaagaagctcttccatacctgcggagagcgtatgggccttcttcttcataatgatctcaaacgtccggctgtaccggtccagttcttttaccgtactccggaatctgccgagagcctgttcatccatggccagaatctccggtacgataaaagatgagagtcccgccgctttataggagagcgcctgggctcttgcataaaaatcctgatacttcgctttcgccgtgtcttcatcagacttctctcttccgtatacaaacagtctctcaatctttaacgatatctcttcatcgaacttcaaacaccgaaacagcatctcgcccgattcagccagatgcccttcaaactcctcatagccggccagctctctctctgtttcaagaaacagcgcttcccaggcttcgtcggatggcagaatgtccgccaggttccaggtatcacaaaccggtatctcatctctctttttcaaaataatccctccactatatccactggttttattctatcacccatatttcaaagaaacaatcagcaatatggaaaatatttgattgaaatcacatggtttcttgtactatactgtagacacagtactgtgctgcgtaattcatggtgaatagagtgcctgatatctgcgtcaggtgctctattcactgttaattgcgcagcgcagtgccgataatttcctccgaaaaacaaaagggagaacgccatgaaaatcatacgcacagagcatttggaacaacagcagctgaaagacttacaggcccttgaaaccgcatgccggttacacgaccatacttcacttacctttcccacagaagacggaggtcttttctttctattatacgacgaagaaacactcttatccgcattttctgcattttttaacgaatttgagacatgcagctgcagcgcattcacactcccgtcccaccggggccgcggtcatttctccctgctgctggaagaactgttaaaagagtccggcgaatgtgatcttctcttcctggctgatgactcctgccctgacacgaaaaagacgctggacgccctcgaagcagagtttttaaaccgggaacacatgatggaactgcgcctgcccgcgccgcagtccggcagcgaaagccattccgtagagttctcaccggttctctcaactgacagcggagataaacggtatgtgatcagtgaaaacggtaagccggtcggctcttttcatcttatattccaaaatggcactgtttacttttacgacttcgaaattcatgagaagcttcggaaccagggcatcggaggccgtgccgccgccgcgctcatcggtgaattaaaccgcatggccaaaacagaaccggaatattttcctttcagccgtgtcatgctgcaggttagcggagacaacgggccggcgcttcagctgtatcggaaactgggatttgaatttacggagacgctggcgtactatctgtattagtgtatgattccggagaaaggacggaagggaggctgccggcctttgttcaagtacaaagagagaggccataacagaatctggcttctgctacggcccctctaaattctttattccactttctccataagatttacctgatattctacagcttccagaatcccctccatgtgcctgtccattaattccgctgcgaggtcgggatttctctcctcaattgctctcgtaatatcatcgtgctcaattacgtacgtattacccctttttctcgtctccaactgatcaatattatcttcaatctgcttttcttcaaaaatcagcatctccagaatagccttcatgaaacgattatgactcatatccgcaataattccatgaaaatcaagggctggctccacaaaatcctttttttccgttataaaacggtaatatatattaatggattttcgcagttccgtaatctcctcctgtgtcgcatggatggccgcaagacgtactgtttccacttcaatggcttttctggctttcatcaaatcgattaaatctgaatatttattaacctggagtgccttggaagattcatttctcacctcagctctgtttaaactgtcctccatgtcggaaagccatttttttccctcgtcagacaggattctcccctgattccctttatgaatggtatatcctttgtaatccagcatcttcagataccgtccaacggtggcagtgccataggcgattcccatggaatccagttcttcctttaaagtccatgatcccaccggccccgtcctgtggccaatctgtcttacaagaaggaaaagaacaatatcactttcatttttaaatacgccggtctgcagtaaccgcttcttctcatccatatattttccacgctctctattttgatataccatatattaccagtattcagtataccatattttgtctcttccctcaactacagtgattcatggtttttcgcagccaccggtcatatttctcaattccttcttcaatagacacttccggtttccagccaaagtcacggtatgcccgctctacgctgagtgcacccagattgtcataccccaaatctccacgcccaatactcaccggtactttgggataaagctctctgactttatctacgattctggaatagctgacaatctctcctcctcccacattatattctgtatgaggaagtttatctgccatggcaattgtcgcaattgccttcacgcaatcatccaggtagatataatccagcttctgatccattccccgttcccacatcacttcactttttaagatgcagtctcttaaaatcatattaacagggcattcatactttcttccaggaccatatacaaatccaattctcagagaagcagaatccaggccataatttctcacaagttcttcacaggccacctttgtggcaccataaggattttccgagtgcatggggacttcttctgttacaacatccatgcttacatttccatataccgcccctgaactcatatagagatatcgttcgatcccatagtttctggctgcttccagcgatgtcatggtaccaagtacattagtccggtaaattttgtatgggttatccctaaacagcttcggatgagaaactgccgcattatgaagaattctatctatcttataatttcttaaaatcatatttatggtaccgtattctgtcacatccccctgtatataagtacagccattcacctcttcagacggggaatgtgcactgaagctgatcaccgcttccccctgttccgtcagatacctaaccagtgctgttcctaccagcccgtttcctcctatcagcaaagttgccataattctgcccgcctttccctatgtgttattttatcattaatcgtacagaatttttgcaatgtcgtcctcttccatgttggtatgatcataccagactgcaggggcatcaagattctttacttctctgccgttcactgcatcgatacaaatttttaatccttcataccccattgcaaacggatcctgggcgactgccccataaaaatactggctggcaacggcgcccttcattgtctttccagcatcaaatccaatagcaattaaatctttatatttacccttctccctgtcgaggtcagttccatccgttgttgcactgagcaatgcggttactgatgcttcattcacacagaaaaccgcagcaacatcatttccattaatcattttctgagcctggttcctgatatctgcatctgcttttgtaggcggaatctctgctctgatcgtaacagcggccggattttcagaagctttttcaaagcttgtatggccggtgatttctacagcacccggctgatactcctgaaggagctcataaagtgttagtgtaaacccgttgattctctgttcgtgcgcagtcataaccgcatccggtgccaggcagctcaccaccattggtttttccgcggttgcctgtttcacctgttccacaaatgcctcattttccatcaatttttcagcagccagtcccgctgccgcttcattatttgtggagacggttgcagccaatgccccctccggcgcatggttaaacgagatatcataggccacaaccggaattccttcatccctcgctttaatcatctgcgcctccaatgcatccggatctgctgccgcaatcaaaattgcatccggtttcttagcgatcgcctgattcagtatatcaatctgctcctgtacctgagaggagtcctgggaagcattataatttaacttcacgttgcccagttcatccgctgccgctttagcaccatctacatttatattgcagaactgaattgcgaaagaattgccaaccatctcgacataatactcatctttttctttcgagttttccgtttccatttcagtcttttcctgcttcgttgtctccggagccgttgttgtctcagcctccgctcccgaaccacatgctgtaagagaccatgcacagacagctgccaaccctaataataacgtttttttcataaataaataccttcctttcttttacggctatgccgtgattttacttaaccccgttttatcttgttatttctatagatatccaacaatacagccagaagaacagccgctcctgtaaacaatacctgccattgctgctgaattcctatcgtcattaaaccatttttcaaaatacccatgataaataccccaatgattgttccaaacatactgcccgatcctccggtcattgaagttcctccaatcactgtcgctgctatggcatttgtttcaattccggaaccagagcctggcagtatcgctgtataagtggccgcataaaagattcctgccagccctgcaaaaataccactgatcacatataccagaagcccccaccgttttacattaacaccggataatctggccgcttctttattggatccaatggcacaggcatattttccgatttttgtatatttaaacagaaaaaatgccgctgcaaacagaataaccatataaatcacccccataggcaccccatccagcgacttgtaaaaaatccgcttaaaccagccatctggttcactgatactcggataacgcattgtctgaacgccagaaatgatatatcctgctccctgtgacatcatcattgtccccagtgtggccacaaatgcaggaagatttaagtaagatacgagtattccatttaaaatcccaaacagcatccctgtaaaaacgataatgatcaaagaaaaccacatgggtaatccccatacgttatatgcgacgccgccaaccagagctccgcacatggctactgttcccactgataaatcaattcctcctgtggaaataacaaatgtcattccaaaggatacacatatgatgtaatatgtactttccagcagattcaccatcgtgtccccggtacaaaaattactgccgaaaacagaaaaaaacaggaacaggactccaagcgtcagaagtgcgatcgcccgctgtgatgataatatttttttcataaccggtattcctttcttttattttcaactcctcataaccgcatactgcataatcttctcctgggttgcttcccctatatccagttcaccggtcagtctgccttcacaaaggaccagtatgcgatcactcatacggagcagttccggcatctcggatgaaatcatgataatggattttccttcccttatcagctgttccatcagtttatagatctcattttttgcccccacatcgattcccctggtgggttcgtcaaaaataaatatctcactgttttttagcagccattttgcaattactactttctgctgattcccaccggataaatttcttaccagctggccaatcgaaggggtcttaacggaaactgactttgtcactgtttctacagcttcctccatcctgttaaagttgatcacaataccacgtgtaaactcgtcccagtttggaagtgccacgttgtccgctactgacaaatcaattgcaagcccgttaccttttctgtcttccgacagataactgatcccgtttgctaccgcatcacttgtagaacggattctcacttctctgctatttctataaatcttaccgcttctgtaccagtctgcaccgaatattagtctggcaagttccgtacgtcctgcgcccatcagacctgccaggcccaatatttccccgcggcgcagaacaaaagaaatgtctctgatgtcctttgatatcatatttttaacctccaggacaatatccgcatccttccggacgcaggagctcatttttttctcccagctgatggtccttccaaccattttctgaatcaatgcctccatggaactttccttcgtttccatcgtatcgatgtagcagccatctctcataaccgtaattctgtctgtaatctcaaaaagttcttccagccggtgtgaaatatagataatagaaattccgtcttccttcagctgtctgataacgcgaaacaactcttcgatctcatttacagccagggctgcagtcggctcatccatgatcagtacgcggctgtgataagaaatacctttcgcgatctcaaccatctgctgccttgcaacggttaattcccctactatagtatccgggctgacgtccagttccagtctggccagcaattcttctgtcctccttttatcctgcctgcgttttatcgagattcccctcccgctctcccttccaataaaaatattgtcggccacagaaagcttttctaccagattgagttcctggtatatcatgcagattccatcatcaagtgcctccttaggcgtcctgtagtgtacctctcttccattaaccgtgacacttccagaatctgcctcataaactccggaaaggattttcatcagtgtggattttcccgccccgttctctccgatcagccccagaacctctccctttttcagctctagcttcgcattatcaagtgcatgaattcctccaaaacgcttttgaatgttctgcatggatacttccagttcacacattattacgcctcccttcagatcatatatgctaccgggattgcctcggcacatactgaccatatccggctttccctgttatgctgccatctctgtaaaccagtttccccctaacccaggtctgctttactcttcccttcatatccataccgtgataaacatttttatccgactttgtcttggaaaaactcttctttccatcgaaggtccattcttcatttaaatccaccacaacaatatcagcatctgtccctgggagaagacttccttttttgggatataaacccatgatttttgctgcgttgcccgatgttaaatcggccaaacgttccaacgggagtcctcttttgtttaccccttctgtcagcatggagggcaaaagtccgtcaaatccgccaaatccacaaagttccttaaagaaatcaccctctttcgtcttctcttcatcccgataaggcccatgatcggagccaatggtatcaatcgtaccatccattacataattccacagcttttctacattttctctgcttcgaaggggcggattgcactttgcataagcgccctttgaccgtaatacgttgcggtcgaacaacagatactgcgggcatgtctccacatacactctggttcccctgcatttttcctgctttaaaaactcggctccctgcgcaatcgtcatatgacagatataaagacggttccctactgctctgctaaacaaacaggctctctgaatcgcctccagttccacccaccatggcctggcgtcatcatatctggcaggatcacattcacccatttctgccagccaccgacaaccaaaatcggctacctctgcattttccgcgtgtactcctatcaggccgtcaaatttcctggcgatctccatcccttttaccagatatccgtctgtgatctgcggataatcaggattggcaaaactcataaatcccttatatgccacacagcccaggttattgagttcctccatctgatccaggcagcctggagtcaatccaccccaaaatgcaaaatctacgaaagactgtcggtttgccgtctcatattttaaaccgaagccctgcctgtcaaccaccggaggtacactgagaggcatatcaacaattgttgtgatacctccttccgctgcacattgtgaaccagaataccagtcttccctgtaattgaaaggtgaagggtcccacatatgtacgtgcgtatcaatgatccccggcagaatcaccttaccacttacatcaatgatcctgcaatctgctgtctcatccattataaaatcattcaccagtgcttcaatccgttctccttttattaccagatccattttttttacacagcctggaagaaccaccatgccaccctttaaaaccgttgtttgttctgctaaatcaatcattttattcccccttattcgtcgcttctcatcatcgctcatcattaatgagtagtgtttataggcaaattatatacaatactttttattttgtcaatagctattatttaatttgcacattttaatttacattgacattgcattatatacatgttatactatttttgctcatcattgatgaatagtaaaatcaaacctaaaaaactaaggaggttttattatgacatacatcaatccagattctgctttaacaccagctaatatctatgttgaagcaacccagagtcgtttctctgactcttatcggcgctggcagggaattccttccattgaagtaaccgggaatggacgaatttttgttaatttttattccggacaggacgctgaggttggagggaatattatggtactttgtgtcagtgataatcacggagagagttttcgctcctgtgtaaccgttgtggagcatcccgatccggaatgcaggatctatgatcctaatttatggatcgctccagacaaaaagctctggatgttttatacgcaggcgcgcggatttaacgatggacggagtggtgtctgggtaactgtctgcgatcagcctgacacggatccgctcacctggtctgcccctcgcagaattgctaatggcattatgatgaacaaaccgatcattaccactaaaggtgaatggctgttcccctgtgctatctggtgtgatacaagcggaagtgttcccgccgaacgccacggtctggagcaggagcagttttctaatgtatacgcttcgtccgacaagggaaaaactatttctcttcgcggccatgcagatatccccaacagaagctttgatgaaaacatgattgtagaaaagaaggacggctccctgtggatgctggtccgcaccttcgatggaatcggtgaaagtttttccactgatggcggatacacctggactccaggacagaaatcccatattgacggtccctgctcccgctttcatatcagtcgtctgaaatcgggacgtctcctcttaattaatcactaccagtttgaccagcgaattgatcttgaagatatcatgcaccagggaaatgtcaaaaaatggaaaggccgaagtcacctgtccgctcttttaagtgaagatgatggtcagacctggccctactcccttcttttggacgaacggaatgaagtctcttatcctgatgctaaagaagctgatgatggttttatctatgttacttatgaccacgaacgggtaaccgaacgagaaatattaatggcgcgttttacagaagaagatatcataaaggggaaaaccgttacttgtggttccaactttaaaatcgtggtaaataaagccactggacagcccaatatccattgaataaaggacttagaccgcggctgcttcaacaaccacttttcacccaaataaaagtcctggctcatactaccgagccaggacttttccttttctcacacttcccgaatcataccatactgcttcaaatcaaaatgcttctccaccaccccaaacaccttaaatccaaattgccggtaaaacgccacattcttctcgttatgtgtttccagtgaaatcatctgcctgtggcggttggtcttccttcaatttgcattcgccttcttttttatacaaaaaaccggctcagaaagtattattttcttaagccggcttctcattttattattattcatcccagttgtgataggtggcctgaacgtcgtcatcctcgtccagaaggtcgagagtacggttcatctttttaatcgattcctcatcggtcagttctacccaggtctgcgggatcatggttacgtcggcctccaccatcggaattccggccgcttccagcgcttcacgcaccgcactgaaatcctccggtgccgtaatcacctcgtaactgtcctcctcctcggagaaatcctcggctcccgcatccagagccatcatcatcagttcatccgggtccatctcacactcttccttatcgatgatgatctggccctttttatcgaacatataagatacacagcccggcgttcctacgttgccgccgccctttgtaaaggcgcttctcacattggctgccgtccggtttttgttgtcggttaaggtatcaacaataatcgctactccgtttggaccatatccttcatatgtaatggtctcataattcacagcgttcgcatcgccggccgccttcttaattccgcggtcaatcgtatcgttcggcatattgttggctttggcttttgcaatgacatcgcgcagcttgctgttatttgcagggtccggtccgccttctttcactgctactgcaatctctcttccgattacggtgaaaactttgccttttgcagcatcatttctctcttttttgtgtttgatatttgcgaactttgaatgtcctgacattatttataacactccttttcctttatcttcttcgtcctaaaaactctaaaaatcagcatcttttccattttaacaccattctgctaatctggcaaggaattttcgctgtctgccgggctttccccgccattttccggccctggcggggtatccggcggaggaacaagcttctgtacacggatggtatgaatcatcttgttctccacctggagaattttgaaaccgtatccctggtactccacctccgtctgctcgccttcctgtggaatgcggtccagtctcgagatcaggaacccgttgatggtgtcgtaggaatcgtaatcatcctcctcgaattcgatatccagggttttggcaacctcatccaaaggtgccatgccgctgatgatataagaaccgtcttctgcctgggcaataaattcttcatctacgtcgtattcatccataatgcttccgacgatctcttccagaatgtcctccatggtgacaatgccggctgtctgcccgtattcgtcgaccacgataaccatatgaatcttctgggactgcatctccttgaaaagcgaatcaatgtttctcgtctcaggtatgaaatgagcttcccgcagaagaccatcgatctcacagatcgggaccatcccattactgccgttttccgcagctatgagcgcatccttcatgtgaaggatgccggtgatatcgtcaatatctttttcatacaccggatatctggaattgtagccttccttcaaaatgaagtttacagcctcacggagagtcatggaaccatccagagccaccagatttttccggtgggtcatgatatcaccggcgtccttatcgtccagttcgaaaatattagtgatcatctccgcctctctggcctctaagacgccctgctcatggccttcattgaccatggacataatgtcttcttctgtcacattctcattatctgacatcatatcgatgccgatgagcttcaggaacagaaatgccacggcattgataagccaggtaaacggcatcagcggaaccatgaaaaaagtgacgaccggaagcatgtgataaccccatttctccggattctgggctgcacagcgtttcggaatcacaatgccaaagctgatgagcagcacaattaagagaattcctacgatcagaaggcttaagacggaaagccacggtgccgaaagagtggcccgacggtccagaatcagggtcagacggccgcccagctgctctaagataaaggcgccggtgataatgcctatgatgttggtcgatacctgtatcgtgtttacaaaccgggtcggcctgttaacgatatgtagcagctttcttgccttatcactgccttcttccatctgatgctctaagtcactcgtgttgacgttctgaattgcagcgccaaatccgtaaaatatggcgtctaacaggatgaatagtaaaaatattgccacgctgggaagcgggttgccatcgtccattgttttgttctactccttttattgattgtcattggtgggggtgaagaggggggcttggttggtctgtctgtttgttgattagtttgtttgggtgcttttgcatccgcaggggaagccctgaaccgtgctgcggctcagggcttcgcggctgtcgccgcatagccatacagatggaaggggcaggggacaagcgagcttgacccctgccccttccatctgtatggctgccctgctcgtagctatgaaaaatgatacccccctcccccccatttgtcaagtacttacgcttgtttcctgatttgcttctttcgcacgttcgaactatgtatccagttccaaactgacttttaacgcatagtccactttttcctgaagttcttcgtctatatgacagatcttctcttttagtctctgcttgtctatggtccttaattgctctaacagaatgactgaatcttttatcatgtcacatcttctggtatccagttcgacatgtgtggggagttttgccttgttcatccgggacgtgattgctgcgcagatgacggtggggctgtgcttgtttcctatgtcgttctgtatgatgaggaccggccggattccgccctgctcggagcctactaccggtcttaggtctgcataaaatatgtctccacgtctgattatcactttctcacactccgtcaattgatttaagtctattattgaccttttttgactcgtgtattcacttaagttgttcgctcaagttcttttgccgcatagtttatgatatgatacggacatggattgcgttattcgtcccttcacttccttttctgattactttccgaaaccttcgtaaatatcatcgaaataatctttttttcctaccacttttccgtcttctacgtagactctggggacacgttttccgatatcacagagtatttcatagtggaaaccgccgccgatgcgggccagctcctcaaccgtgatctcttcgtccccgtctttcccgatcagggtgacttcgtcgccctcttccgcttcgggtatctctgtcgtgtcgaccatcagctggtccatgcagacacggcccaggattcttgcacggcggccgcggatcagaacatccccacggcctgataaggaacgcggatagccgtctccgtagcctaccgggatggtcgcaatggctgttttccgctccgctgtaaaggtgccgccgtaactgaccggtgttcccggcgcgatcgtctttaaatagcttatcgtgctctttaactccatggccggagtcagatggaccggctctttttctacctcatccgacggatagagaccgtatatggagattcccgcgcggactgcattgaaattggcctgcggcagttccagaattcctgcactgttggaacagtgcagaaccgggattgtgatgccgcgctccgtaagcatggagatgaactccgtaaacagctccatctgacgggccgtggcgcctttgtccctctcatccgccctggcaaaatgggtgaagagcccctcgatgcggattcctggaagacggctgatccgcaccgtctcctctgcagcggcggcggttaccggatagccgatccggctcatgccggtatccaaggcgatgtggatgggtgatatttttcctgccttcactgaaagttctgagagacgagctgcgctttcataacggaatacggccggtcggagttcataccggatcagatcctcaaagctgctctcaggactcactcccagaatgagaatgggctttgtaatgccgtgtcttctcaatatgactgcctcctccggggtggccgtcgcgtatccgcttacgtatgggtcgatggcacacgccaccggtactgagccatgaccgtatccatccgcctttaccacgccaatcatcccggttccttcttttaaattggccctcatggcttccatattctgtctgatggcgtccagatttaccgtctcataaactctgctgtatcgttccatttctctatacttccttcagattattctgtctcttttaagatgtctgccagcgcctccgtcagttcccgggccagtaggccgtgctctcctgactgaagcctgacaagatcgcccgcccggccgtgtaagtagacgcccatggctgcggcgtccgattcttccatgccgagcgccaggagtcctgcaatgattcctgtcaggacgtctcccgctcctgccttcgccatggaactgttgccgctggtattgatgtaggtacgctgatcttttaaggccgctacggttaccgcgtctttcagtacacaggtgattccgtaacgatccgcatattctctcgcagcggggatcaggcgccgcctgatgtcctccaccggactgcctgtcagcctcgccatctcgccaaggtggggtgtcactatgatattttcggtaaaataattggtcagttcaggaaatgccgcaatggtgttcaggccgtctgcgtcgaggatgatggggacataggcattagccagtaccgtctccaccaggtttctcgtatacggctcctggccgattccagggccgagaacgatgacgctggcccattcacactgggcctccagaagtgtctggaaacgcactgtggacgcctgtgcctcctccggatcgtaagtagtgatgatcgcctccggaagcgacgtctgaagaacagcccggttttcctccaccgtaaagatcttcaccaagccggctcccatccggtacgcggccatagcgctgagccaggcggctccgctcatgttttttgaccctgcggcaatcaggacgcggccaaaggttcccttattggaatatgcgggccgggccggaatcatacggatatcggccggttcaaaggtaaacagctccggactcagccgttctaagctgacagggggaaagccgatatcggccaccacgacgattccgctgtaggcgcgccccggatacagaagcgttcccagcttctcatagccgaaggtcaccgtcacatcagcttttaaggcagtccccatgatctcaccggtatcggcgtgaattccggatgggatatccacagccaccacccaggacgccccacagccggaaagcgtggccagtaagtcacggtacaccccactcacctcccgggacagccctacgccgaatacggcatcgattacaagttcacagcggcccggtataaaatcgctgtattcaatcagatttacgccaagccgctccgcaatggccagctgtttcctgtactcgtccgttccgttctccttggtacctgccagaatcacggtcacggtgtagccttttagatgaaggagcctggcggctgcaatgccgtccgccccattattcccggtcccgcagactgcccagatgcggtcctttttttccgcctttttctgcacttcacgcacaacggccgcggccgcctgctccataagcaccagtgaagggattcctatggactggatggtgtagctgtccacttccttcatctggcttcccgataccagatatctcatacccattcgcctttccgactaacagtcatctctgcattttctctattataatacaaaactgccgacaggcaaagaagaatttctcctttgcctgccggcactcatttcacaaatgaaatggatcaaaaggcatcggatcaaagcttatgatttctttgccgcatctgctttggcagatttgcctttttcccgctccgccttttcttcctcagccttgtcctgcatgctgcaaaccttataggataagcgcatcaggctctcggaaaggtgtacgttctccaccaccacgtcatccggcacgaccagatccgtatgggcgaaattccagatcgccttgatcccggcgctcacaagacggtcggcaatctccggcgcctttgtcttcggtatcgttaaagctgcaatctgaacgtcattatccctcacaaactgctccagatcatccacacttctgatctcaattcctctcacaacaagcccgatgagacgcggattgatatcgaacattcccttgattaagaagccccgcttctcaaaattcgcataattggcaattgcctgtcccaaattacccgcaccgataattacgatgttatgctgtctgtcgatcccgaggatcttcgcaatttccgtatacagatactttacattatatccataaccctgctggccaaatcctccaaaattattcagatcctggcggatctgagaagcagtcaccttcatacggacgcttaagtcattggaggaaattctctccaccccgtcctccatcagctctccaagataccggtaatatcttggcagcctcgcaatcactgcttttgatatctctttttctgccacatcttcaccttcttcaatagtttgtttacttattttctttccatctgcactccaaattcatagaatgaacgcagagcgatatcggtcttttgcatttcgttaaactaactactattatacaggcatgacaaaataatgtcaaacaggttttatttttctcacattttcgtcattcccacgccgcctgtacacaggaacagttcagcctcatatctcgcggttccagttgaaaaaaaatccaacctatattatactattcgtgttattctacatttattcgatccatacaaggggaggaactaccatgattttgtcatgcagcaacataagcaaggcctttggaagcacggagatcatccgccatgcttcctttcatatagaggatcatgaaaaggcagccatcgtcggcatcaacggtgccggcaaatccacactgctgaaaattatcatcggggaactggcagccgatgaaggtgatgtcgttatttccaggggaaagaccctggggtatctggcacagcaccaggaactgagcggcgaaagaactgtctttgacgaggtattggaggtaaagcgtccgctgatcgagatggaggccagaatccgtaagctggagctggacatgaagcacgcttccggggaagagctggagaacatgctttccacctacagccgcttaaaccacgaatttgaacttcagaacggttacgcctatcagagcgaggtaaccggagtattaaaaggcctgggctttaccgaagaagaatttacgaagccggtatcggctctttccggcgggcagaagacccgggtatccttaggcaagcttctcctgacgaagcccgatattattctgctggacgagcctaccaaccacctggacatgaactccatcgcctggctggaaggctatctgaccaattacgacggaagcgtcatcatcgtcgcccatgaccggtatttcctcgaccgtgttgtcacaaagatcatcgaaatcgacaatggaacactcgccgtataccagggcaattacaccgcctacagcgaaaaacgcgccatgatccgggacgcaaagatgaaagcctatttaaatcagcagcaggaaatccgccaccaggaagaggtcatcgcgaagttaaagtccttcaacagggaaaaatccatcaaacgggcggagagccgggaaaagatgctggataagattgagattctggaaaagccggcggaagtaaatgatgagatgcggatccgcctagagcccaatatcatcagcggaaacgacgtactgaccgtccgcgggttaagcaaggccttcggtcccaaccatttgtttgaccacgttgattttgagatcaaacgcggagaacgggttgccatcatcggaggcaacggaaccggaaaaaccacaattttaaagatattaaacaatctgctgccggcggataccggagagatcaggctcggttccaaggtgcacatcggctattacgatcaggagcaccaggttctgcacatggaaaagactctctttgatgagcttcaggatacgtatcccaccatgaacaacacacagatccggaacattcttgccgcatttctgttcaccggggacgatgtgtttaagcgtgtcagggacttaagcggcggggagcgagggcgcgtctcactggcgaagctgatgctgtccgaggccaatttcctgattctcgatgagccgacgaaccatttagacatcacctccaaggagattctggaagacgcactgaacagctataccggcaccgttctctacgtgtctcacgaccgttactttatcaacaaaacggccacccgcattctcgatctgacaggtcatacactggtcaactacattggtaattacgactactatctggaaaagaaagagctgatgacagagctctatgcctcagaaccagcgggcagtcagacttcggggacagagggaggcgcgtcacagaccagcgagtcttccgaggtcaagcaggactggaaggcgttcaaagaagaacaggccagaatccgcaaacggcagaatgatttgaagaaaaccgaggatgagattcaccagctggagacaagggacagcaacatcgacgggcttctcactcaggaggaagtcttcaccgatgtttcccgcctcctggaactgaataaggaaaaggaagagattcagacaaggctggaagaactctatgagatatgggaaacactggctgaatagtgctgaatccgggcagggccgcactgcggcagtaaggaatcatgacgttaaaaagagcagccgcaggcgaatcccgcctgcgactgctttcttatggtctcaatccgcttcctccctgaagcgtaatcgtttctcccgttacgtaacctgcatcatccgatgccaggaatacgcagacacgtccgatatccttctccgggtctgcaaaccgtttaagaggaatactctgaatcgtctgatcatacagtttgggatattcatctttccatttctccagacctggtgtcatggccagcgggcatactacattcacattgatgccatattcgccccattctgcagcagctacacgggacattccccgaatcccctctttggcagccgcgtaggaagactggcccagttttccgaacagaccggctccggatgcgaagttgatgacgcttcccttcgtctccttcagatacgggaacgcctcccgcatgtagaaaaatgtcgcatacagaccggagtacaccgcaaggtcgaaatcctccttggtgtgatccaccagcatcgtaccggacttggaaacctgtgcgttgttaatcagacaatccagctttccaaaacggtcaatcgcctgctttaccacgttcttcacagccgtctcgtcaccgccatccgcaacgacaaacagggcctcaatgccataatctgcttccagattctctcttgcttcaatcagggtactcgccgtacgcccggtgataacaatattggcgccctcttctgcaaatgcttttgcaatcccgtaaccaattcctctcgcacctccggtaatcagtacaactttaccttccatcttcttcatggatgccgcctcctcatagaatgaaataattaaaaataagctttgaactgatgatattttcttttttgttaaattattaacgttctatgttcagtatatacctcttattccatggagtcaagagtaaataagtatttttttatcgattaattcactgccgccgcagtgcggctctcaccgggaacttttttgtatcaggagaggtctcccgtgatacaaaaaaacaggattgctcctgttttttcagctgcttaccgtgcatacaaaacctttctcaatatctcacagacctgaggtgaatccgcctccatggctgttctcgtatcgctgtcgcttaagtatgcttccaccagcttcccgaaatagaactgcatgttattcgtgtaatagtcgggaacatccacgaattcatccacatttcccttattcatggccagatccacagcgaactgactgtcgctgtcaaagcagtcggccgcgtatccaatgtattctccaaaggcctgggtcagtccctccggcctgcagaacttaatcttccggtagctcgtatccagcttatggtatacgtaatacgttcctccgtcagactcgggagctgaaaaatattccttatccggatagtagagaatctcccagccgtgctccgcaaaatacttgatccaccctctcggaatacgttcgagggcggcggttatctcatcctttgtctcggatgccacagaggactctttgctctttccttctatcacaatatcatagcgcttatcccgctggccgttctcatccatataaaacagccctacgtactgattggccgccatctggccgtcctcgaagaaataataccgtttgccgtcgattgatttgtatccggaagaggccatctctcctctcgcggaaaaccagtaccagctcccgtcttcatcctgaaaccagcccttcttcgcagtgccgtctttgtcgaaataataccatttttcttcttcatcgttatagcaccagccgattgccagatctcccgtctcccggaagcagtagtaatatccgccaatcttctgccagcctgcggccataaggccatccctgccaaaatggtaccagtaaccgccaatctgttcccagctgttttttttataagtcccgtcttccccgtaatatctccagccgccgtcttcctgcttccatgttcccgtctcttcattcccgggatctgtctccggcgtctctgccgtctggccggcggtgttctccgcagttccattctccgcggtttctctctctgaagttgtgttctctgtttgaacggcctccgtctcatctgccgcggctgccataacgcttccgaggcttaagagcatgctcaccgcaactgccgctgcccatcttttcttcaagaatacacactcccttctctgtcttttcacacgtgatctccctctgattgtactataatccggtaaaaaagtacaggttgcaaatctgaagtttttgtgaacaaatcccaaatcgttacaggccattcctgaatccctgtcttgagtttccggagttttctgttataatatattatgatatcggaaactgtcatcccaaagaaagcgaggtgtccccatgaaatggaaacgccctctggccatggccggagtcatcctcatactggccatgtacgtgatcgccatcgtttcggctttctccaaaagtccgtccgccaaaagctggctgatggcggctctcttctcgactgtcgtcataccggttattttatatgcttttcagctggtatacaggctcttaaaccctgaaggaaaagacagagacaatgaatagaaacagggcggccgcatccggataatccggatgcagccgccctgttttcctgtaatcggatacggacagtcttatctgtaaataatctcatctcttcccggaccattagaaaccatggtgattggagtttcaatctctttttcaataaattcaatataattccggcaattttccggcagatcctcatatttccgaatcccgcggatttcacatttccaacccggaagtaccttgtagaccggttttgcccgctccagacgaaccgtggtcgggaaatcctttgtcacttcgccgtcaatctcataaccgacgcagacaggaagctcatctaaataccccagaacatcgagaacggtaagagccacctctgtggaaccctgaatccggcatccgtatcggctcgcaaccgcatcaaaccatcccatacgtctcgggcgtcctgtcgtagcgccgtactctccgccgtcgccgccgcgccttctcaattcgtccgcttcctcgccgaaaatctcactgacgaatgctcctgctccaaccgcactggaataggccttcacaacggtcgtaatattcttaatctcatacggtgcgattccggcgccgatcgcaccgtacgccgcaagtgtggaggaggaggtaaccatcggataaatgccgtggtccggatcttttaaggaaccaagctgaccttccagcagaatattctttccttctttgatggcatcatataagtatttcgacacgtcgcagacgtaaggggctaccatgtcacggtactgaagcagtgtctgatacagctcctcctgatcgagaaccggcttgtgatacagatactccagcatgacattcttcgtctcacatacacgcgcgactttttcctttaaggattcactgtcaaacagttcgctgacctggaatccgatctttgcatatttatctgaataaaacggggcaattcccgactttgtcgagccaaaggacttctttccgagacgctcctcctcatactgatcaaacagaatgtggtacggcattaaaatctgcgcacggtctgaaacgagtatatgcggcttcggaacacccttgcttaccagttcttccacttcttttatcaggaacgggatgtttaacgctacgccgttgcctatcacgctcgtcgtatggctgtagaatacaccggacggcagaaggtggagtgcgaacttgccatagttgttaatgatcgtatgtcctgcgttgctgcctccctgaaagcggatgatgatgtcggattctttcgccagcatatccgtaatttttccttttccctcgtcgccccagttggcgcctactattgctcttaccatttgcttatttcctcctttaactcgttgcggtacaatcgcgggggtgcttgtattgggctgctgcggagattggtttggcttcgggtttgtccgcaacaggcctcggtttggcttcgggtgagtccgcagtggacctcgattccgctccgcttcatctcggtcacgggcttcgccctatggaatccggtaaacggcaatccgctttcgtgccagcacgacgcggattgccgcttaccggattccacactgctcattgccaccgcgtatatcatagctcaaagcattccataagtaaagtcaatattaattatatttgtcataagctttaattatatcactccctattttccagcataagctccagaagacgtccccccgcaggcgaaatgggattttttcggtctgtaataatgcagaagcttcgctccggcattccggctttaaaattcagttcgaacaggcggccggactcaatttccttctctgcaaactccgacataacacagccaatcccaagattcctcatggcaaactggacaatcatatcgctggtggccagttcaaattccggttccacgacaattcccagctgctccagatagtcgtccataaaacgccgggtactcgtattcttttccagaaaaatacagggaagttcctttaatatcccgtattccagcggttttccctttaaatacccgaactgttcgcccgccacaaaaacatttcggatctttttcacctcagtgacggaaatctccggctttgcatcgaccggggagctgaccacaccgaaatcaatggttccacggcttaaaaatcccaccgtctccggcgtgggtccgttggacacggtgaccttcaccttcggatatttttcatgaaaacgttccagaaacggcagcagatagaactggagtgtcatatcgctggctccgattctgacctcccccgtatccagatcctgcatacgctttaacatattctctccataccagatgtgatctaaacctgatttcacataagagtacagaagctcgccctctctcgtcagcctgacgcccttggaggttctgataaacagcttcgcattgacggaaagttccagctgacggatcgcctggctgacagccggctgggaaatgcacagtttttccgccgccagcgtgatgctgcccagctctcccgcataataaaacaccttgtaatactccagattgctgctcatatcgtgtcctcctgaaaagagcagagactgacaaccgcctctgctctccattacatatattattttcttatacgttaatctcagccgtcatcccaaggtcgtccctgtttgccaaaagcagcggccgaatcacttcttctaaataaatctccacctgggcaggcgcacatccgacatacttcttcggatccatgttctttttaagctcttccaagcttaagttgaacgcaggatcggcggcgatcagctccagaaggttattgtccataccgttttccttcacgtttttgccggcctccatggagagctcgcggattctctcgtgaagctcctgcctgtcgcctcccgctttcacggcgtccatcataatattttcagtagccatgaacggaagctccgccatcatgtgcttctcgatcactttaggataaacgacgaggccatccaccacatttaaataaaggtccagaataccgtcgatcgccagaaatccctccggaatgctgagacgtttgtttgcagagtcatccagcgtccgctcgaaccactgagtcgatgccaccatcatggggttcatcacgtcagacatgacgtaattggacagggaggcaattctctcgcttctcatcggattgcgcttataggccatggcagaagaaccgatctggctcttttcaaatggctcctcgatctccttcaaatgctggagcagacggatatcgttcgaaaatttgtgcgcgctctgagcgattccagccaggatatttaagacgcggctgtccacttttctggaatacgtctgaccggaaaccggatagcagcccggatatcccagcttctcagctatcatcggatccagctttctcaccttgtccatatctccgtcaaacagttctaaaaagctggcctgagtgccggtggttcccttggagcccagcaaacggatcgaacctgccacatagtctaaatcttccagatccatggtcagctcgtgcatccacagcgtggcccgttttccaaccgtcgtcggctgtgcaggctgaaaatgtgtaaaggccagcgtcggctgatctttgtatttgtctgcaaacttcgccagttctgcaatcacattgaccagtttctttctgactaacgccagtgcctctgtcatcacaataatatccgtgttgtcgcctacatagcaggaagttgctcccaaatggatgattcccctggccttcgggcactgtacaccgtaagcgtaaacatgggacatcacatcgtgccgcacttctttctcccgctgctttgccacatcgtaattgatctcgtcctgatgggccttcagctcatcgatctgttccttcgtaaccggcagtcccagttccatctctgtctcagcgagagcgatccagagttttctccatgtacggaatttcttgtccggtgaaaatatatactgcatttccttgctggcatagcgctctgacaagggactctgataacggtcgttcataaaaatataccaaggagactgatgacctgcgtcatgcacaggaagcggcacaggatcgttgccgtttccgggtctccaccctttcttttaatttgtttcaatccacgctcggtatattgtcgaagtgcgactgcatcctacgtagatgcgtggttgacctcatggcagtaggggataccgattactctccgcccaccactgccgttaagtttgtttttggcaattcatctcaccaccttagaggatgggagaattcttgctaatatttgttgaaatgtatagactcctgctcattatcatatcataatctgcctgcggttaaaagaaaaaaatacaaaaggtgccgaaccggatattccttcaatccggtgcagcacccatttcgtccgcaaaccgtccggattactgcacgtattctccccggatatcctcttttggcggctggatcggatactttccggtaaaacatgcggtacagatcggcagtccctgcgccatttccgtcagccgctcctgtcttaagaaggaaagggaatccgcccctatcatatcgcagatttcctgtaccgtccggccgtgagcgatcagctgatcctcggatggaatatccgttccgaaataacacggatggagaaacggcggtgcgctgatccggacatggacttccttcgcccctgcttccctgagcatcccgacgatcagagcactggtggttccccggacaatggagtcatcaatcataatgacgcgtttccccgccaccgcctcctttaagacgttcagcttaatccgcacggctgactcccggctgctctgtttcggcttgataaaggttctgcccacataggagttttttacgaatgcggtaccgtaagggatctttgattccatggaatatccaagagccgcaccatttccggattccggaacaccgaccacaagatctgcctccacaggcgaatccatggccagggcgcggccggcaagaagcctggcatgatagacgctcactccgtcaaacacactgtccggtctggcaaaatagatatattcaaatacgcatctggcttcttccgccgggtcttttaagcagagtctcgtatctgatgcgattccgtccttcgtgatggtaacgatctcgcccggcctgacatcccggacaaattccgcaccgatcgtatcgagggcgcagctttctgacaccagaatataggcgttgtcccgttttccgatgcagaggggcttgaatccaaagggatccctggctcctatcatttttctgggactcatgacaacaagggaatatgctcccacaatcttcttcatggctccggctaccgcctcctccacagaagatgtcttcacacgctcccttgcgatgtggtaggcaatgacttcagaatcaatcgtagtctgaaaaattgcccccgaatattccagctcccggcggagctccggcgcattgacaagattgccgttgtgcgccagagccagggtgcctttgatatagtttaaaacaagcggctgggcattttccctggtgctgctgcctgccgtcgaataacgaacatgaccgactccgatattgccgtgaagaccttctaagatctcaggagtgaaaacttcgttacataaccccatccccttatacgcgtttactttccccttgggaccggccgtatcgctgactgcgatgccgcagctctcctgtcccctgtgctgcaatgcgaataatccataataaatggttgacgccacgtccccgtgatcgaaatcatacattccgaagacgccgcactcttcatgtaactcatcccccgcagtaatagttaagtcatgtctcatgtaagtactgcctttctgtgctgtttactggataccaagacgacggaatacttcctcgtaagcatcttctacattgcccagatcgcggcggaaacggtccttatccagtttttcatgtgtttccttatcccacagtctgcaggtatcaggagaaacctcatcggccagaataatctgtccatggtaacggccaaactcgatcttaaagtcgatcagctcaatgccgaggctgtcgaaatactctctcatcacatcatttaccttaaaggtatactttgtgatcgcatcgatctcctcctgcgtcgccaggttcaatgccagtgcgtagtagctgttgatgaacggatcgcccagatcatcatttttatagctgaactccagggtaggacatgcaaacttgattccctcttccattcccatcttctttgcgaagctgcctgcggagaaatttcttacaattacttctaacggaacgatctctactttcttaacagcggtctcacggtcgcttaactcctcaatgaagtgagtcggtacgccttctgcttccagcttcttaaaaatatggttcgtcatacggttgttgatcgcgccttttcctacgatggtacccttctttaaaccgttgaatgccgtagcgtcatctttataatctacaattaatacgtccggatcctctgtcgtataaacctttttcgcttttccttcatacagtaattcttttttctccatggtatccaccagtccttttcctgatttaatttataagttttatgaatataaccaaggtgtttcagtagaaattataatacagtgaaaatgcgattgcaacatttttatatattataaattcttatgggcgatggtaattaactcatataaatgttttcatgcacttatcccgcagcaaaagtatttcatcttttacgggccggtgctttccccgccttcccgccggaccttttcctccgtgcgccagaattccacctttccctcctttacatcgatcgtaacgccgctgtctgttctgtcagacggatacggagaaacttcctcctcgaagccggcctgctccacggaccgttccgtcgaccagtttatatcaaacaggtgttttgcctctgcaaagatggctggatccgtgatgcctatcacgatcagttccgccagcgtcatgcagcataagcagcttctgagcaggcatcgctttctctcggcagatgtgctgacgggtaatccgacatatcgtctgacagccgctctcagaaaacggcggcttctccatggtctcttggttcggttatatcgtttgatccgccatttttgcatcaatggagtactcttcaaaaatccatcccctttttcctttttccgtttcgttaatcattggtcacatttccatcaccattaaccggaattgcctctccaaggtatgttggctccggctggaagattcctgtcataaaatcctttccccgtgccagcagctctctcacatcacgccgtttctgaccggcgtacgtcctctgatcagaggccacgccgtacgcgtcaagtcccagctgtttggcggcgtacagcgccctgtagagatggtactgctgtgtcacgatgataattttctccgcctcgaacacatcgcgggcccgatacatactttcataagtagaaaaaccggcgtgatccataaacacatcctccgaaggcacgccgcggtccacggcaaactgcttcatcgcattgacctcatcataatttttcctcccgtgatcgccgctcataagcagcttttcagaagctcctgcttcatacagttcaatgccgcgaagcagacggtcctccagcatattgctgggttttccatccgggtggacgcctgccccaagaacaaggatacagtccgcccccagcgaactggcctccttccacgtcagaatccgtttttccgtggatttgatcatatatgtattgacagccgccaggcagacaataccggcaactccgagaatgaccagcacagcgaaagctctttttatcagttttttcatcggtttgtcctcatttcttttatacgcttcattatataacatggaaaaaatggcttcaagcctttccgggcctaaagccattttatttttctgctctgttttttattattctgctgcggagctcatgtcagcactgtttgtcggatggccgttgctctcgccggtgatatcatccacgcctttttctacatcattgatcatgccgtcaatcactccggtactctcttctgcatcttcatcagcgtttctcgtgttccccatatctgtagaggaagactccgtcgctgaggaggactccatcgctgatgtctgtgtagtagctgcgctgctgcctccggtggtctcattcgttgcgttcttattgctgccgcatgcggacagacacatcactgtcataatgacaagtactgcaaatacatagggttttattcttttcataatacattctcctttcattttctatgcttagtatgtgttagaggagaataaattatggtggaaaatttttctaattttttatggcctgtatagctaaatcagacggcaaaaagcggcaacttgccactatttaagaacggctaacgttctgattttagtaaagcataataacaggcatcacaaattccttgattgttccaatcagaactgcgcatagttccctcatacttcattccacatttaatcataaccctgcctgaattaggattgcgcggatcatgtcttgcttcaattcggtttacgtccactatatcaaaaaggaagtccataacagcgcttaatgcttctgaggtaatccctttgtgccaccatgccctgccgatacaataaccaatgtgcgccattgaaatgtcttctttcatatctgctacggcaatatcgccaatcggctcgtctccattgtcttttaatatgacagcccaatgataataattttcgttagaatattgactaatccactcttctattatgctttgactaatttcctggcttgtgtgcgtgggccacattagatattttgtaacctcagcatctgacgcccaatttttatacattgccgcagcatctgctcttgtatatcttcttaaaaccaatctgtctgtttccaacctttgagtgccgctatgcttcatatgcaatatcccttcttttcaaagtagaagttatagattacattgtaaaatctatttcatactttgttccatgagaaaacacgaaaccctgcgtaagattgatgcataaaattattgagacaatatcatcaaaatcattatgcccattatcaatccactccgcaaaaaccgttttcattttaaaaacaaaaaattaaattctgttaatctatgtattttaaaatttcatcaaagctgttaatatgataatccgcatatttattaatcttttctttttggtttactgttttacaatctaaatattcggtaaaaattgttttcataccagcattttgagcaccacacaactcgtttgatccaccgtcacctacaaatatactttcttccggcttaacatttaacgtcttcatagccaattgataaattcctgtttcaggcttcagcattcctacatcacatgaaaatatgactgaatcgaaaagttcacacagcggggattcattccaatattttatatcaattatatcagcattacttataagacctgtcttgacaccccttacatgaattcttccaagaatctcaataatcttattatccactgtcagtaatgctctcttcatacgctcttcgcgtttctgtaatatactctgtttttgttcatccgtcaatatatatggcatactattaacaattttatctattatctctctttcggtttttatctttcctttcgctctctcattatatagcatcctgttttcagcatatttttcccattcagaggatgatatgccaatgacattatattcattttcatctaaataacagggataaactaaagtaaaaaataaatcgaaaaagattgcttttatcacgcttaaacctcctattataataccagaccgccaaacagttcctgaacggtcgctccgctcttttcatcatacacagcttataccaaccacggttccattctgattttgccattcttataatggttttcagccagcagttctttcattcacacctgttccatcttatctgcccggatagtcacgctcaatcatctttttcatcaaatcacaggtaagattcataccgttctcttccaccataaaggaacggattttctcaaacccgtgtgcttcatagaacctgatcgcccgtacattggtggaaagcacctccagaacacacatccggaatccctgcagcctcatccggtcctcgacttcacagtaaagcccatgtcccgcaccatgtcccgtatattcaggcagcagataaatcgcgtaaagttcggcacagtcctgctccccgcgttcttccgatctgccgcagaccgcggctcccacaatcgcctcaccatcttctgcgactaagcagatatcgcctctttccgcgctggcctccaggacctccacccagtggtcttcctgaagcgaggttaaatacgcctcatccataagcccccggtaggctgcgcagtagctggccgtcagctgtctgcttgcctctgccagctcagtcttttgcagctgacgataaatgaccgtcttcatccatcccctcgcttatccaatcacatccgccatggtataaagtcccggttcctttcccgccaggaactttgctgccgataccgcacccttcgcaaaaatcgccttggaataagcggtatgctggaaagtaatcacctcatcctgaccggcgaagattacgtcgtgttcaccgacgatggagcctccgcgaacagcctggattccgatctcatccttctgacgcttctccctcgtctgggagcggtcgtatttatagtggtagtggttgtccatcgcctcattgatggagtcagccagcgccagagcagttccgctgggcgcgtccacctttttattgtggtgtttttccagaatctcaatgtcgaaacctgatgccgccagaacctcagcggcctctttcaccagctttaacagcagattgatccccagcgacatattagcggaacgaagtaccgcagtctggcgggctgtctcttccacatgctgaatctgctcttcggaaagccctgtcgtacacactaccaccggcatcttcttctcagaacagtacgttaacagcccgtccaccgcctttgcagaggcaaagtccacaatgacatccgcgtccaccgtacacgcctccagagaaggaaataccggatatgaatgttgtattgtatcatttaaatcaattcctgcaacaattttaatattctcatcttcttcaacaattttagaaataacctgtcccatggcgccattgcagccgtgcatcaccatttttatcattatgttttcctccattttataatgggccggacgccctgataccgatgcgtccggccctgcattcatttgttatataagtttttataagattccgtattcttccatggccttctttaaacgctcctgattcgcaggctccatctcggtaagcggcagacgaagcgggccagccttcttccccattaagttcatggccgccttgaccggaatcgggttcacttcgcagaacagggcgttgatcagcggaatcgcctccagctgaagtcttgcgctctctttcacatcgccgcggaaataggacgcgcagatctcatgggtctgtgccggagctacgttcgacagcaccgaaataacaccctttccgccgagcgaaagcagcggcacgatctgatcatcattgccggaatacacatccacacagccgtctgccatcgcaagcatggtggcgatattggatatatttccactggcctccttgacaccgacaatattcggcacgttcttacagagtgttacaatcgtctgaggagcgatcgtcacgcctgtacgtcccggtatattgtaaagaataatcggaatcttcacagcatcggctaccgcggtaaaatgtgcaatcaggccgttctgagtcgctttgttataatacggggatacgagaagcaatccgtccgccccgtatttctccgcctcctttgaaagatagacagcggtttccgtacagttggaacctgttccggccacaacgggaatcctcttatttaccacttcacacgtatatttgattacatttaaatgttcctcatgagtcatggtggaggcttcacctgtagttccacagatgacgatgctgtccgtaccgccggcgatctgctcctccagcagctcttccagcttctcgtaattcacctctccattgtccttaaatggtgtaatcagcgctacacctgctccttcaaaaagtgccatagtcttatcctcctgattcaatctgttcctgttgacaacgtttctgctacataaaatcatgcgcccgccccgcgccattcatgctcttatccatgctcttatcatatggtccgcagagcggccattctttacagagaaaaagagctgacagcggggtcagctcttaaagttcagaatccggtaaatacttcttatcttcaagcagcgccccatccatgcaggatgacagtcatatgattcttcatcatatgcccagaacagatacgtcccgggccgtaccgtccttcggcgtctcatcctttcccccaccctcacctgcaccccgatgcatcaggcagaatactcataatcaacgcaacctctactttattatgtatgttaccatactaccattattgctttgtattgtcaactttaagatgatcaatttctctgataccatccacgaagggatccagctccttcgggaatacctttccagtcagaatcaggtcgatctcctcaaccctggactgaagcagtgtcttcatctcatccatctcaataattccctggtccaacagccccagaacctcatcgagaataaccaggtcacattcaccggtcgaaagtactttccttgcaaaattcatgccgttgcgtatgttcatacgctcttccttctgctgctcttccgataatgtctcgaagaacgcatctgacttctcaaaccggaatatcttcagttccggttccagccgctctaaaatctcacaggaggccagttcctgacagccctttaaaaactgtatcatgattaccgtctgcccattcagcagagcagagattcccatgccaagcgccgccgtcgtctttccttttccttcgccgcatataacctgtattgtacctttactcatccttttgcacctcataccagcaaaaaagcaatatattgatatactacgttagaacccgcttatcgtatcacaaaatttaaatttttgcaagttttcttaccgttttcttaatattgccttctcttccgctattccgcgcattccagcttgctgacggaaacctcgtaagcgatccgcttctcacactcggtttcgctgagttttttcgtatactctctgctctgcacgcggccccagacctttacccgcgcaccgacttcgaagccggaggcatatctggcgtttcttccccacgcgatacatggaatgtagtccgactttccataaggccggtttacggcaagcagcagatccgcgatctctctgccgagaggagtcttcctgtaaataggggccttacatatatatccatccagaaaaatctgatttgttttcgtataatccgtaaattcctccaggaaatggatctcacgcacgaagatggacagaaccagacggtttttcgtcccttcatggcggttataggaccggaattgtcccagggcttcaatggtacagcctatgtaattcgcttctacgtcgatgagccgctccgatatcataagaggtatgatatccgcctgctcgctgaggcggtttaccgcaacgtccaccatatagaatccttctccgaatacctcatggctgaaggtgaagccggagatgatctccccgattacgcttactttgttgttctcaatcattttttccgacattgtatttctcctcttctttcactaatttgaagtaacggttcagccgtgcttataaaaaccggaacgatgcacggatgaatggttacaatttgctttgcagctaatattaagtgtatgatcagctgttccgtgaaatgataagaagacatccaaaaatatcgacagaaaatccccgtctgatctcataaaaaatcagttacacccttatttgcccgaaaaaccggagaaaggagcacagccaccgccctttttccgcatagatcgacagtttcggcattagaaagccagcctgagaaagaaggaacgatcacgaaaacggattgggacatgcttctatcatgcaaaaaatgccctgcaggagtattctcccgcagagcacagcttcgtcggtatggctgttgttgatcgtatctttctaacttcaattaacccaaagatttcttattcagcgaggatctctttctcatcgtcggatccaggatcttctttctgattcttaaggataccggtgtgatttcaagaagctcgtcggtatcgataaagtccaggcactgctccaggctcatctccttcggcgtcgtcagcttcagggcctcgtcggcgctggaggaacgggtgttggtcagcttcttcgtcttgcagacgttgatctcgatatcctccgccttcgggttctgtccgattaccataccggagtaaaccttcacgccggctccgatgaacaggatgcctcgctcctgcgcattgaacagaccgtaggtaatggattcaccggactcataagcaatcagggaaccggtcttacggtaggataagtctcccttgtaaggagcatagccgtcaaacgccgtattcatgataccgtttccctttgtgtcggtcatgaactcaccgcggtagccgatcaggcctctggacggaatggagaattccagtcttgtatagcccccgttagccgggctcattccctgcagttctccttttctgctggtcagcttctggataaccgcaccggtaaattcctccggcacatcgatataggcgatctccatcggctccagtttgcggtttctttcatcgtactggtaaaggacctcagccttgctgactgcgaactcaaagttctctcttctcatgttttcaatcagaaccgaaaggtgcagctcgccgcggccggataccttaaaacagtcaggagaatcggtctcctccacgcgaaggctgacatcggtgttcagttcgcggaacagacgctctctgatatggcgggaagtgataaatttaccttcctgtcctgccagcgggctgtcattcaccatgaaattcatggcgatggtcggctcggatatcttctggaacggaatggcttccggattatccggggagcagagcgtatcaccgatatgaatatccgcgataccggagatcgcaacgatggcgccgattcccgcttccgtcacttccaccttgttcagtccctcgtactcatataacttgccgaccttgaccttgcgcatcttctccgggtcgtggtggtttacgatgacacattcctgattgacgcggatcgagccgttgtccaccttacctacgccgatacggcctacatactcattgtaatcgatggtgctgatcagaagctgagtcggtgcttccgggtctccctccggagccgggatatggtcgatgatcgtctggaataaggcgctcatgttctcttccggatcgtctaaattcttcttggcaaagccgcccttggcagatgcataaaggaacgggcagtctaactgctcttctgtcgcatcaagatccatgagaagctctaatacttcctcttccacctcatccggtctcgcctccggacggtcaatcttattgatacaggctacaacggagaggcccagttccagcgccttgcgcagaacaaacttcgtctgcggcataacgccctcgtaggcatccaccaccagaataactccgtttaccatctttaagacacgctcaacctcgccgccaaaatccgcatggcctggcgtatcgataatgttgatcttcgtaccgttgtagttgacagcggtattcttggaaaggatggtaataccacgctctctctcgatatcattggagtccataacccggtcaacaacttcctgattctcgcggaaaatcccgctctgtctgagcagggcatccaccagggtggttttaccgtggtcaacgtgggcgatgatggctacatttctgacgtcttctcgtttcatcttcataatatgtgtactcttctttcctttggataaaaactcaataaaaaactaaggactctatactgtccttagtttcatttacactcttcacaataaattagtatagcaccctatataccagattgcaaggtgtttttcagttttttgccttctccgctctttcggtctacgattccgaatttctccgcagtcactgtaatcgttgtaaacggcaggggaattttatagtggtcccatcgtttttttatggagaaggctctggaataaccggcccggcccggtccatttccgccggaaattcggtcttcaggcgcaccgttttgtcaagcaatcgtaaatagccgtaggaaagctggcataaaccggctttgaccactggattcctcatccggacagctcctcctcccgatcattttccggtactgtttttccgcttccttcgccaccgcctcctctttatataaggaagcagtttccacggctcccgccgataatttccggtacagcggcggatctgtcataagccgtgcggcggctgatgcccacgcttcttcgttctcttctgtcatgaagccgttcttttcctgtctgacaacgtcgacgactccgctggcgcgcactgcgactacgggacagcccgctgccatggcttccaaaaggacaattccctgtgtctccgattttgaggcaaataaaaaaccgtcggccgcatggagataatgggatacttcggtattgggaacccggccggtaaatacgatctgacgtccgatccccagctcctccgccatatttttaagcgactctttcctggttccatccccgattacaagaattcggaagctgtcccccaccatgttcctgagacaggcggctccccgcagcaggaaatcgagatttttctccttttccaggcgtgcagtcgtagcaaacagccatttttctccgtccagataccgggaacggatctctttctcgcggtcaggatttcgtttaaaagcagctgtgctgattcctgtgggaaggacttccatcggagccgcaactccctgctccaccagacattccttcatggacgcggtcggtacgaataccgtatcacactgatccgcaaatgcggtcagatacttcggtacgagcacttccctgctgaagcgtgccgcgtttctcacaggctcccgccccgctgtcatccgttcatacaatttaaaataatgaagatattcttcgtaacgggtatgatacgtatatgccagcggaattccgtattttttacttaaatagacagcggtaaatcctatcacgaccgggtgatgcacatggattacgtcaaactgtccgtcgcggaactctttctcaatctgcttatcgataaagtttccgatcaccagccctttatcccgctgttcatagagaacccggtatctcacaacacccggttcctccttacagcctgccccttccggtgcaaacaccgtcacctggtgccccagattccgcagcccttctgccaggcgctcgatggaaatcggaacgccgccgatgaatggtttgtagttattcgttaacattgcaatcttcatttgttcctccttttaagaaaacagactgatggccctgtcaccgagccagtaaccggcccctatcaggaaaaagttccatacaaaaatgccaagtgccgagcttacgctgtatttgataaaattcatgcggatcacaccggccggaatagatatcacagttctgaccatgggaatcagcttgctgacaaagattccgacagctccgcgccgttccagcatggcaaaattcttctctatgaccgggcgctgggccggaaacttctttaaatacttctccagcagcatatggccgcccagccttcccagcccgtacaaaatccagcttcccagcattcccgcagccagcgctaagagcagggccatgcccagtccgatctgcccttttgccgcccagatccctgctaacggcatgataaccccggccgggaatcccggcagattcaaatattccagcaaaacaattacaaatataaaaactgctccatactgcagaaaatactgtgtcagtgcctgtatatccataaaaaagacctccttgatgagagaatcataaaggaggaatcttaatgccggacgcagattttgtctaaaaaacagggaagaaaaataaatattttcttaactggctcacgctccggtaaataaaaagcagagatttccagcaattcggaaatctctgcgtgtaaaaatggtaatgcttacttccttgctccgttctcatcaacggaatatccatccggcgttgtgcagccgctgtacatggcaccgtgaggacgggaaaccgtctccggtttttcataaacccagcggttatttatctgcttccagcccggactcccctccgtctgaggcgcaaaataataccagttatcgtgaatcagattccagccttctgccatggaaccatccgcattcagatagtaccagaagccgtcagtctcgttaaagagccatcctgtcttcatagcgccgtcggcggccagccagtaccattttccattgtccagaagccagcctgtcaccatgcttccgccggcatcataatagtaccacacctcaccggatttcttccagccgctgcggaccgcagaagacgatcctgtaccggaaccggtgcttccgccgccgctgatccgtttaaatacgcctgtcagatgtgtatcttcccgaagtacaaaggaactgcggccatccccgtcggcggtaagtgtttttccgttggccgacaggctgaccagccggaagccgctgtcaggaactgccttcacggttactcttgttccctttttaccgcttaggggtgatgcggtaatcacgccgcctgttaatccttcctcgattgacacatggaaaatttcttctacatcgggagtcttattaccggtcagatatacatctgcactttccgggagaataaaagatatcacgccttcgtcccggctgagcggcagcggcttaagttctccgcttcccgtttttaacagtgcacgaatcgtatcggtctgcacctggtctccgtcaaatttcatccctgccttcatgggcgctctccagacggccgggccgcttctcactcctttttcatcttccagataaagctggaacttacaggaccgcttccagtctccctccagccttcccggatctccgctttctgttacctttataatgacagagcgtatttcggcatgctttgctgcctccggactctcagtcacctggttcacattttcccgtttcaccgtctcccgtttcgcagaagatggtgttgccgtggaagggctcgccacagaaggcttcacggttcccggcgcttcgtaaccggcgttggaagacgttgccttcactgcctgggacggtgtggctggaatcagactctcaggccacgggatattgagcagagcacctgccgccgtcacctctgcatccatctgtcccggagtttcgatccggacttctgcgtgaatcccgccggcagacataacgcctctgtacagttcttccagaaccagcagttcatccatgcagtactctgccagctcttcattcgatacctcccagaccgcggcaagcgcttccttcaccgctttgatcacttcttcctctccgtaatcacctgcggcttctgcagcttctgcggccagagtaatcagcttcaccacccgttctgccgtgggaggcgttaccggaggagtcactctcacagacgcacaggagctgcctccattggttccctttgtatgaaccaccagtctcactccattgtccgtcagcagcacatccacgttctcgtcgtgactcacaacctcttccgccggccgttctatatccaccgttatggatcctgtattcttcatggtcggatcggaaacagccactgtcagaataccgtcatcactctcttctgtcatgacagacgccgccctgtttacagacagcgctcccagctgtgcaggttgatccgtccagaagttggccccggtcaaaaggccatccgccgtggataccgcctgaacgaaaggcgtgttagccagaactgtgatccccggctcctttgaatagctttctgtctccccggcgctaagccccggtaaaagcacgtattcatacgtatcatttttcgggtttgccccatggtcaaaccacatctccaggtaagtttccgaagcggcgccctccgacgtgccgatcagcgaccagtctcccgcattttttccttttctgacagaaatggtctgatctcctcccgggaaatagtaaccgatgtcactgccttccacgttgccttccaggtgggcccaggacacattgggaatgctggttccggatacatcggcgctgcctgatacgatgtcctccagaccggcctcctgaaccggcagtgcttctgcctcaccgtttacagtcagcacattgtctgcctccgctctgagcctgcggttttcgataatactctccaccgggctggactctccggaattggtgattccggcccccagacacacgatctgtccgtcaaacataaaccaggacttcctggccgaaaactcaggggaatacggtaccgaaggcgatccctccccttccttgacccgtacctcaccggtcatggacatgccgttgattccgttattgccgatgacacttccgcctacccaggattctctcgaccggaaatctcctccctgggcaaatcctgagctgtcaggctgtcccgtgccgatatccttggaaacgaccgtcgtacctgccagccgcagcggattcaccgtattccagaaattctccgtatactgcaggatgtcgctgttatacaaataggtcataccgcttccctgatgccagccgtaacggttctcgtgattcatgatctccgtattctgaatacgctcggagtacatggacagcgccagctggaagtcttccgttctgtgaatcgcgcggtccataagcggaaaattcttatgaaccggctgtacgccgcctgcgatagaatcatcgtccctgatttccatggccttctcttttaccgccatattttctgcaccggtaagagagtccagaaagcccggatcaagttcaatccatgcctttaaagcactcttcagttcctcttccacatcagaagaaacggaattcataagctgtatcatcagggtcatggcttccctgcccgaggcccggttgcctgctcccggtctggatacggaacgtcccttcagtccgtctaacatcagcccgttatacatcccgtttagaaagccttccttcaggtaaaactccagattttcctgtacctcccgcggataatcccacggtgttttcgcaagcagaggcggcagtcccacaccgcccttcaggaactcgatcccgtaggaaccgagatacggcacatgggaatgatcgaggtaggagccgtctgcgtagaatccgctggtgtagccctgatccgcaatctttgtgctgtcttccaccgactggataacaaacgtttccgcagaggcttttgacgccaggtaaaccagttcattgtcctcccttaatatccccagtcccagagcggtcctggagcagtcgatgatattggctccctgcgccgtcctgtatccctgtgcatgggtacttccggttccgatgatcccctcgtgataaggatccggctgaaagaaatagagtgcctctgtatagagcgcagtctcttccggcgtgagatcgtcatataaaagcaccagggccgggattaagtccttcggcagaccaatttcccaggtccaccagttatctgtctgtgtctttggcgtatagcaggtggaacagagccagtccagaatattcttcatatcgctcagcatcacaggatcctggtaataccggcttccctttgccgcgtaagcgctggccatcgccaggagctttttaaatgccggccggaactccactgcatcatcctcatacggtatctctgcatttccagccgcgccttcatccgccggccatggaatgcccaggcaggactcctgccccttgtacgcatacgcttcccaggcagtttccgcctgctcatcaatcttttgaagaatctccctgccgccttccaggaccgttaagtcgtctccaatcatagattccttccagcgcctgcggattgccgcaaaatcagaagcgtccgcggcaggcagctgatccgggtcttcatagagaacggtaacaagccatgtcgcagtcgtcccgctttcatctgcagctacgatgcttacggttcccttttcccgcgcggttatgatcccatatccatctgcggttccttttatcgatgcgatatggctgccgtcggtgtcaccggcttttctggttccatccgtttctccgtcctttaattcccgcttgattttactgctccccgcattgcggacgaagctcccgtcaggctttggtatcttcacttcccaccgaatcgggccgtgtaaggaatccggcgcctgaatccggccatcctgtccccgtacaagagtaatctcgtccccggtcagagcgtccggaacttttccctcaatcgccacagtaaccggagcacctcccatggcggccgtatcaaacgtaagggctacgctctcccccatgactgcttcctgcagtgctttcgggtttgaaaccgacagaacctgtttgcctgccgcttcaagaacgagttttacagatcccacggtctgagacggaatcttggccacagtaagctcgatatttcctgtagagggatcttttttcaattccagagcccccggtgaatccatggtaacgggaaccacctgattatccagccggagagttcccggttcccacttggtgacagccagtaccccttctcccacatcggctgctgcctggactgcagtcgtatttacaaggagtctggcatctgtctggtacaggctggtattggaataatcatccgtagtctttccggccaccatcgcgtactggtacgtctcctgcggcgccagaaacagctcggcaagctgagccgtatctgttcctttcgtattcagcctgtaataaaccgattctttcgtaagataagatccgctttctccgtcgccgaatatgtaggaccagtccaggtccttagcccctccgtttcctgaggcggcgctgagccagtttctctgggtatgaaccccctgggtcgccgtattgaccagcggcgcccacactccgccttccccgctggcattgcgcacattcctgaatccgttgctgggatttgtcagcgccagctttgtctttccggtaaccgggatggtatccacaacggtcacgagtctcttgttttctgaatcgtgcgcctttaccccggctccggcacagatgatctcatcctcaaacaggaaccaggattttacaccttccgcctcattgcccagccggattcccattgccgcaccggtacttaaccctgcgctcagcacggtctccggtgtaatctgcagtttctcaaatccgctgctgccatcccacaacatcgttgtaccaggaatcagcgcttcatccatggtgttccacgcctgatccgggctgctgccctgaaacagcgcaaggcttccgccgccggacaccggatcaaataccgccgcataccgtcccgtgttgatctttgacccctgatctcccacaggcagtgtcactcctgcggccggcgttgtaactgccatctgaaatgccagacacatgctgaacgtccgcttccatctgtttttacttttttgtttcacacaagcccctcctttatttatcagataagaaaattatagaaagatcctgtgcaaaacgaaatgtaacatttttatgtttcttataacttttatggattacccctctgaaattctattattatcttcatatttttatattatttactgaaaatacatatttatatggtaacttataatagtattccttgtgttatcgaattattcctatttttattagtcaattagtatgacccgcttttccagaatgccgtaagccacctcatcctgtacctcgatgccggcccttccattcgttaaatcagttaattccttaagaagccgttcttttccctcttccggtatcagcacggtgagaaccacctggtctgaatactggctgtccaggatggtaatatttctctgccccagcagatactggatctttccgactccgttataatccgtagtcaccgcagtccgtaccgcaggcatcacggccagcaccgtactgctcttaatcccggcctggacggcgccggaataagcccggaccagtcctccggtgccaagcagggtccctccgaaatagcgtgtgacgacggcacaggcgttacagatgccttctccttccagcacatccagcatgggacggcccgctgtctgggatggctcgccgtcatcactgcaccgtttctgctccccgttttccccaatgatccaggcatagcagttatggcgcgcatcccagtatttctttctcgtctcttccagaaataaaagagcctcctcctccgattgaaccggccgcagggaggcgatgaatctggacttcttctctgtgatctcggcggtcccgccctggtataatatcttgtaaggctttctcatatggttcctcgtttcctttgctgtttcgcatgtttattaagcataattatagaaaaaatccttcacttaatcaagcatgttttctctgctcttttttcgcttccacgtataatctttgcaatttcttccaaaactggtaagtgttgaattgattttcattctctggtacactatgaacacttaatgaggtctttcacgaatttagtgtttgtggtataatgattcggtaaaggaggtttcctatgaactatggcaaacatgagacggaaaaaaagatcaaatccgtcaattcaaaagcgaagaaatacaccagccgggtttttcttgcctttttaaagagtctgttcgtgctgtgcctgttctgcctggtagttgccgggagtatcggatttggcatggttaaaggaatcatagacaatgctcctgacgtcgatatcgcaaccattgttccaaacgaatacgccactacggtgtatgacagtgccggcaatgtgaccgagactctcgtcaccgccggttccaaccgtgaggaggcaagctacgacgaactgccggggaacttaatcaatgcgttcgtggcctacgaagacgcaagattctgggagcacaacggtatcgatctgcgctccatcatgcgtgcggtaaaaggcgtactgacaggcgactcttctgccggcggcggaagcaccatcacccagcagctgattaaaaacagcgtttttggcggaggtatggaaaaaagcttcggggagcggctggaacgaaagatgcaggaatggtatctggccgtcaaactggacagtgccatgtcaaaagagcagatcataacaaactacttaaacacaatcaacctgggaaagaactccctgggcgtcaaggtagcggcgagacgatattttaataaagaggtctccgacttaacgctgtcagaatgcgccgtacttgcaggcatcacccagaacccgtcaaagttcaatccggtaaccggacagaaggccaactctgacaagcagaaggtcatcctgcagtacatggtcgatcaggggtacatttccaaggacgaacaggaggaagcgctggcggacgacgtctattccagaattcaggacgtggagatcgtcaccaaggagacttccaccccttacagctattttacggacgagctggtagaacaggtacaggatgccatgaaggaaaagcttggctacaccaatacccaggctcacaatatgctgtactccggcggactctctatctacacgacgcaggatcccacgatccagtccatcgtagacgaggagatcaacaatcccgacaactattcggcggcccgctattccatcgaatacaggctctccgtcaccggggcagacggctctaccacccactactccgaagagaatttaaaacgctaccaccgagacaacggggacagcagctatgacggtctgtacgacagtgaggaagagatacaggccgatatcgaaaactataagaacagtcttttaaaggaaggcgacaccatcatcggtgaatcccttcacaagacgctgcagccacaggcctccttcgtcatcatggatcagaagacgggacaggtaaaggccatcgccggagggcgcggagaaaagaccgcgagtctcactctaaaccgtgccagcaacaccctgcgccagccgggttccaccttcaaggtgctgacggcgtttgctccagccatggatacgtgcggagcgacgcttggaaccgtctattacgactcggtttacacggttggcaagaagaccttctccaactggtacagctccggctaccagggttattccagtatccgtgacggtattatctattccatgaacatcgttgcggtccgctgtctgatggagaccgtcacaccgcagctcggtgtggaatacgcgaagaacttcggcatcacatctctgaccgatacagactacaacgcggctctcgccctgggcggaatcaccgacggtgtgtccaacttggagatgacggcggcctacgccaccatcgccaacggcggtgtctatacgaagccggtcttctttacaaagatcattgatcacaacggcaaggtgctgatcgacaatacgccggagacccaccgcgtgctcaaagattccacggcgttcttattgacggatgccatggccgattccatggaaagcagccggaagtttgcacgtccgggcgccggccccagctccaccagctcgtcggccaatattcccggcatgtccaatgccggcaagagcggaacgacgacctccaacaacgatatctggttcgtcggatacactccgtactataccgcaggcatctggggcggctgtgacaacaatcagaagctgaccaagaaaaacggcggaacctccttccacaaggctatctggaaaaagattatgacccgtgtgcacgagggcatgtccgatccgggctttaccgtgccggacagcgtggagaccgcgcagatctgccggaagtccggcaaactccccgtcgccggtgtctgcaccaacgacccgagaggcaacgccgtatatacagaatatttcgccaaaggaaccgtccccacggatgtgtgcaacaaccacgtacgcgccacggtatgtgcggaatcccattgtctgccaaccccattctgtccggaacggacgaccgccgtattcatggcgctgccggccggcgaagaagggaccacggacgattccgtatttgcaatgccgggctactgcccgatccacaccgaggcgtccgtcattataccgccttcggatgataccggaatgcccgagacagtggctccgggaacactgccctacggccccggctatgtgtcgcctaacacgcagaccagtccggcaccgccagccggatctccggttcagatgagcccgggaggacagtaatccgttttaccccataaaaaagcactggagacgatcagtccggataccggctgttctccagtgttttctttttttctgtcatttcctgccgcttatttcatcttcggcttaaaaatcaccgaccccagatatccaaagatcagcgctcccgagatcccgactgcactggcggtaaatccgccttcaaagacacccagaagcccgtcctctcccatgctcttccacacgcccttccagagcgtgtttccgaagccgagcagaggtactgtggctccggcgcctgcccagtctgcaaacggctgatagaggcccagagcgccgagaatcgtgccgctcactacgagaagtaccataatgcggcccggcatcagcttcgtgttgtccatgaggatctgaaccagggcgcagatcactccgcctacgataaatgcttttacaaattccattgtcattctcctttctttccggaaacagcttcccggaacctggcccggggccaaatacagattatccgatatgctccagcatcaccgcgtgcgcaataccgggaatcggctgtccctcgttaaagctgaccgtggaaagcagcgctcccgtgggtacaaacagcacccgcttccaggttccatctttaatctttggaagaatgtaggaacacagggtagccgccgaacagccgcagccgcttccgcccgcatgggtgtcctgtgtctcctggtcatagatctcgatcccgcagtccgtatggatttcctccagcttgtgatccttgttcttcatgaaatcaaggagaatggtgcgtccgatctctcctaaatcacctgtgatgatcttgtcatagtacgattcatccactccaaagtcttcaaagttctgctcgatggtatggaacgccgccggcgccatggctgcccccatgttcatggagtccttacttcccatatctaccatacggcccgtggtgatgcctgtaatggctgctatgccctcgttcttgtgcttcgataccacaacggctccgcagcctgtcaccgtccatgtagctgaaaacggccgctggttcccataggccagaggaaaacggaactgcttttccgccgtcgcaaagtggctggaggccattgcgatgatcttgtccgcatatccggcggccacagtcattgcgcctaagtttagggcctcccccatggtagaacacgctccgtaaagcccgaacaggggaatctccaaatccaccgttccgaaggaggtggcgatcagctgtcccagcaaatcccctgcaaacagataccggatatcctttttccggatatcccccttttcaatcgccaagtctgccgtctgcttctgcagcgcgctttccgcctgctcccaggtgtccgcgccaaacatgtcgtcctgctccaccacatcgaacagctttccgagggggccctccccctccttcttgccgacgatggaagccatactttctatcaccggcggttcctcaaatttgatactcgcttttcctacctgcattctgtcactcactccatttctctgaacaccgtatttttctctctactatgctactttctccattttccgttttttctattcatctgcctgtcatccctcctgaataaaaatgccccggcgggaccgccgggacagagagtgctgatcacgaatcattatcgcttccttacttaaaatataccggcccaccggccgatccaatagagaattccgagaatccagctgctcagtattccgtacaggatcacagggcctgcaatggtgaatatcttgcagccaataccgaatacctggccttccgctttgaattccacagcgggagccaccaccgagttggcaaatcctgtgatcgggacgagggcgccggcgccgccgaattttacgatcttcgggtaaatgttcagtcctgtcagtataacgcttcctgcgatcaggaccagcagcgtccaggaggccgccgtatccttgtccatcccgccgttcataaaccaggtgctcaccagctgcccgatggtgcagattacgcctcccacaaaaaatgctttcacgaggctcagccatttgttatgggtcggtgtcacctcttttacataggcatcgtatgcctgcttgttaatctccatattttacctccgattcctgttttctgctctgtgacggttcttatcctattttccaaaatttccggagaaatacacgagggagccgatcagcttcccaaggccaatagacaggattaagtactgcagacctacggccagatgaatccgccggctgataaccggcagcgctttcagtgtctccgccagggacatgacgagacagccaacgaagattcccaccgccagaccgtatatccatagcaccatatttccccccatcagcagcggaaactcatagagatcggatacatttcccagtacaccgcctataataatcactgtctcatacagaaaaatatgcctgttggtgcgggtcttcccgatcagcctcggaaagacgccgatgatagccaaaaatgcaaatacgccggccgctatgatgccgccggcactgagaccgagaaacatgaggaacagtcctttaagtaatgtcaatgtcctgctcctttcttccatcgttctggatcagagtcttgctgatactgtcttcgtaaaggcgcatctccacctccagcggtgtcggatccgtattaattttaattttagcgaaatgattgaagaaaccgatgatccccagcgccagccctgcggaatagctcacctcaaggatcgtgaagccgcttgattccttccccatgacgatctggtaaatctcgccgaatacatccttcacccctccgtcgttgttaaaggtcatgatggcaaaggacgcaccgcagaaacagataatacagacaaatatggtcttgatccattcccacacccagtttggagacttcggccggtggtaatcgatgataaaatccacctcacccacattgttgacggtgattgccggatccatctccgtgatcttcttaatcacatccagcgtgctctccacataccgtttatttctgtccagatgaatcgttttaatgcgcagggcattgcatttgtttgttacggcggaatcatcgcagtagaccgtcgccacatcctttaactgaacctccttgtgatggacctcagtaatctggctgatgtttaaatagacagtcttactcatattcttatctgccccgctttccggatgagttctaccagcgttccatccatttcgccgccatccggcaccgcggcaatgaagtaccatacaaaggcagccaccgcgatcaggcatacgataaggagtgcaattcccagcttatgtttcatggattccatacgtgctcacatccttttctttcacttttcatgagtagtatgagccgtatgaagtattttattctataatttttcgcgcatctgctttaaaatctttttttcgagcctggaaacctggacctgcgaaattcccagatgggaagcgatctggctctgggtttcattataatagtatcttcggattatgatttcccggtctttatcagagagtccggtcagcagttcccgcagcaccatccggtttagcagttcctcctgggcggagctttcctcctcaatcttgtcgatgagcagaatgctgttttcatcatttttgttgaccgtccggtagagggattccacctccgctccggcctcgatggaagccgccacttcctccttgctggctccgagctccccggcgatctcctcgatggtcggttccctgccaagggtgaagccgagcgcctctctgacacattttacacgcgtgcccatctccttgatcgaacggctgaccttgatcatgccgtcatccctcagaaagcgcttgatttctcctgttatcatggggaccgcataggtggagaatttgacgtcgaaagacatgtcgaacttgtcgatggccttcatgaggccaatgcttccaatctgaaataaatcctccggatcatatccccggcctgtaaatcttcgcacaatgctccagatcagtcccatattctcggtaaccagacggtcgcgtgcttctttatctccttcgtgagccatttctatcagtctcatggtctcatccataggactcacctgttaatcttctttttcatggtcacaacggtacccttatccggttctgactctacgctcacctcatccataaacgcctccatgaaggagaatcccatgccggacctctctccctccgggtcggtggtgaacatcggttccatcgcctgcgggatgttgggaattccgatacccgtatccttcacggtcacggtcagctcctgtcccagaatcttcacctccagatagatgattcctccgtttccctgatatccgtgtatcaccgcattggtcacggcctccgatacagcggtctttacatcgtccagttcttccagcgtcgggttcatccgggccatgaacacggataccacaacccttgcaaactcctcgttccgggacaggctctcaatttccattctcaaaacttctggtctgttttcttctaacatgctttcctcctcaacctgtgactgcgtcttcctttgagtcatataatttcattaattttaatatgccgcccattttcagtatcctgagcacctgggctcccgctccgtagattgttacctttcctccgctccgggccatctgcttgtatcggttcaacagcactccaatccccgaggaatccataaaccgtgtccccgaaaaatcaaacacaatgcggttgatataattttccgaaaggattaaatccgtttcatattttaagccggtgcagttgtggtggtccagctcctccggcaggtggacgatcagcacgtgaccatccgcctcataagtaaatagtggcttgttcatagttctcctttccaaaaagaatccctctcgcgggacaaaaaaagacacggcaaaagagctcttttctcttctgtcgtgtcttccttttctgcccgcctagaatccccgttccgttctggcctgtgcagttaatgtttcatctttgctgttatttatgatgtccgtaaacatctcgtttgcctgttccttctgattcattcccttgtaaatgacggccgccttatacttggccgcccagtaatccggtttcacagccaggctctttaagtagtaatccagagccgtctgactgtctcccgcgcccgaagcctcgtctccaaggctttccagcacctgatatccccgctcctccatgtcggtcttcacctctccgacaatggccagtacatccggcgacgcgatgagctccgttttcaaatcggcgtaaagcttaaccgccgtggtgaaatcatccttcttatatgcctgcagaattccgatcacgttctggtattgggccagtacgctgtccgagtcgttggtaaatgcagacagggactcttccgccgtttttttatcttcctccaggccggcgatctgcgcgcttaagctgtccgccttctgattcgcctggcttaagctctcactgtacttaagcatctcctggttgtgtttttcattgatcgcccttgtattcgcgggcatgaccaggaaaaagatgacggccgccccgagaagcaggcccgcaagaatattaatgaccgccatatccttcgtgttctctctgtagctgggcggtatgatgacatcgtcatcctccatctggcggtgggacaggacgtttttcagctttctcttttcaggctcccgttcgctgcggctgcctgtgtttgccttgacgatcgacttataccagagcgccttcgggtgattcctgtctatctgcaataccttatagactgcctttcccgctttctggtaatcctccctcgcaatgcagagaatggccagaagcagctgcgccttcacataattcggcttcgcctccaccaccttaaccagctgaaggatcgctaaatcctcactgccgttctgggcgtagaccagagcctggttaaaccgccggatcatgtggcgttccgtatccagacttcccttttttctctggatctcacccagatagtagtccgcccggttctcctggggctgcaagttcatgctgatgacccactgaaccagcgcatcccccacctccccgacctcataataaatgaggcccagaaggttcctggcatccgtctggtacttgttaaaatgaaggctcttttttaaacattcggccgcgccggacaagtcccgaagccgcgcccgctccaatcccatgttataatagctgttggcaatgacacgggtttttcttacataatccatatcttacctgcctattccttaccgacttcctttatcagttccatcatcagatcgttcatatccgtcagatcgcttctcacgatcgcgtcctctatggcatctacttccagacttggtctgtaatcgtttatctcggtttcaaaatcaatcatcgctcattcctccaagaattgtctttatctctcccatcaggtacagggatcccacacaaaacagcagatgatcctcatcctgccatgcgagcagtgccataagcgcctcttttgtcgtaccaaatccatatattctgcatccggaaacggccttaaattccgcctccagcacttccgcctccagccctctgtccgactggatatgagccacggcgactgcatccagcggcaggcctgccgcaatctcacggatcatggtatcgtgcgctttgtccgataccgaggaaaacagaagaaaggcccgctttctgcccgtttcgcagagacgtgcggctgtcttgataaatgcttccatcccgcccggattatgtgctccatccaggtaaagccccggcgctgcctcttccatgcgagccggccatctcatggtctccagtccgcgcttaagcgcttcctccgataactggatatcaccgttctgctgcgcaaggacttccactgtcctcaatgcagccagcgcattcatcacctgatattccgcctgggatggaatcagcacaggtaggtaactgccgtcaagccgctcaagccgcacccggattccgtgttcctcccagccatctatcacatagccctgcctgtccaccggataaaccgcgctgtggctggcagcggcttccttttctatcacagcggccgtccgcgggtcctctctctcatatatgaccggaacgcccggcttaatgattccggccttctggtaagcgattttttccacggtatcgcctaaatactgcgtatgatccagactgatggaagtgataaccacggccagcgggtgccggatcacattggtcgtgtccagtcttcctccaagccccgtctccaaaaccgtaaagccgctctccgcctggtcaaacagctttatccccatataaaacaggaattcaaaataggacggatggcagtatccctctcccatcatacgctccgataaatcccggatctcacggaagctgtcctcgaacagttccttcccgaccggttcgccgtcgaacaggaaccgttcccgcacatcggtcagatgaggcgagataaatgcccccgtgtggtatccccctgccatcagcatggaggttatatatgcacagaccgaaccctttccattggtcccggccacatgaatgatctttctcttctcgtcggggttgtccatccgctccagaaaagccctgatatcctccagggaattcttttttctggtccacatggggatattggccagatattcatctgcagttttttccaaactcatcatactccccggctttcgttttctatgtaatcttgctgctgatgccatcctccccgcgcggcggcagccgcccggcaattccggctttcctatttattataatataactcggccattatgcaacctctttctttcgcaaatacagacggatttctacatttttgttccgctgcctgcgcagaaacgggccgcttccgcgacatgattcctttccgccggagcgcggttgcttaaacagccatgcttcctcagcgcggagtgcgcctcctgcccggagggctaaaaaacaggagcattccgaatcgtaagttcggaacacccctgttatcatctgtcacttattctccgcagtatgcgatcgcttcgatctcaacaagcgcagcctttggaagagcggctacttcaaatgcggctctggccgggcatgcgccctcaaaaaaggttgcatagacatcattcatagcgccgaaatcaccgatattctgcagtaaaacagttgtttttactacgttcgccatggataagccttcgctctctaagatcgccttgatattgcttaaggactgcttcgtctgggaagcgatgtcctcgcctgcaaaagctcctgttgccggatcgatcggaagctggccggatacgtatacgtaatctccgcctctcactgcctgggaatacggtccgattgctgccggtgctttttctgtagccaatacttttttcattctatgtatctcctttcgttcttcatgttatataactagattatcacacattctgcaaaagtcaagaaagttttttaggttatctcaaaaaaatttagcaaacctgtttttcttttcgcttatttacctcttgtcatctagtattgaatactatataataggatatgaggtgaagctatgaagacgaatgacgaaagaatacaggatatcctaaaccatctggataccttaagctatatcaggccggaagcgattccaggcattgatctttacatggaccaggttacgacatttatggatgaacatctgaaggatacgaaacgctatcccgaagataaggtgctgacgaaaaccatgatcaacaactatgccaagaacaacctgctgcctgcgcccaataaaaagaagtattccaaagagcatatcctgcttctgatttttatctattattttaagaatattctttccatcaacgatatcgaggaattgttccgtcccattaccacgggacatttcgcccgaaaggatgaccttccgctggaggacatctacagagagatcttctccctggaatcgaaagagatggaacatctgcgggaagatgtgaaagcaaagtacgagcgtgcaggcggcacctttacggatgacagcctgactgaagaagacagggaatacttacagctcttctccttcatctgcgaattgtcctttgacgtctatctaaaaaagcagatggtggaacagatgatcgatgaactcagagaaacgaatccggccagaaagaaaaagtaaccccttcttcccggcagataaaacgctccctttcgggaaacagtaccttacggaatctgttcccacaaaagggagcgtttctttatttctcttctgtctcttccagacgtttaaataccatatcatatccgtcgttaccataattcagcgaacggttcacccggctgatcgtagctgtggaagccccggtcttctccgcaatctccagatacgtgcgtccctcccgaagcatctttgccacctcataccgctgggataagctgagcagttcattaaccgtgcatacatcctcaaaaaaggtatagcactcttccggtgtcttcagtgtcagtatcgcctgaaacagatggtctaccgcatctgtcttgatttttttgttcatggtttcaatcagtccccttcatttttgctgtatcttcatctatggagtattttaacatattaaagtcataaagtccacccccggacactcatgacagcataaatttttcgatgacgtgagcgacgccgtcgtcgttgttggaaagagtcacgtaatccgccgcatttttcacaggcagaactgcattttccatggctacccccagtccggcatactggatcatggagagatcgttgtatccgtcaccgcaggcaatcatctcatccttcgtcatatcgaggcgtgtcagcagccgctccagcgatgccgccttatcgatccctttgggcagtacctccaggaaatagggttctgaacggtatacactgtaatcacggcccagcgcggctttcaccttcggctccaccagagccagataatctccgtcgtcgagaagcagaaacttcaccaccgggaaatccacatattcggcaaaattctccaccttgcggacctccagcttattgatgtcggattctttttttacgtagatatccccggagtccggtgtaatgatgcagtcgccttcataggtaagaatattcacgccgtgttccttcgccagcgcaatgatctttttattagaggccacagggagttccttagcaaacacagtctcccccgatctgcattctataatccttcccccgttaaaggacaaaatataaccgccatcctctgtaagccccagctctcttgccagcggcataatcccgtaggtaggccgtccggaggcaagcacgatggttcctccctggcttttcagcttcatcagagcttccttcgtcctcggtgtgatcaccttatcccggtttgtcagcgtgccatccagatccagcacaatcattcgatatgccataattccctctcctgctttcgtaaaattctccgtgaaaagtatatcatacttcgctgtaaaatgcaaaagtttggaactgcagcctgtcacatttcatacaatgtcactatgagaaacaacaaaaaggagaatactatgaaaaaaatcgtgagcatcgttctcgccgtatccatgcttgccgtctgtgtgaccggctgtaaaacgaccacaaggaaacagcttaagccggtggttctgaatgaagtcgctcattctatcttctacgctccccagtatgccgccattgaactggggtattttgaggatgaaggactcgaccttaagctggtcaacggggcaggcgccgacaaggttatgactgccctgatctccggagacgccgatatcggctttatgggctccgaggccagcatctacgtctatcagcagggctccgacgattacgccgtcaacttcgcccagctgacccagcgggccggcaacttcctggttggcagggaagccgacagcgattttacctgggctgatttgaagggtaaaaaagtgcttggcggaagggctggaggcatgcccgaaatggtatttgaatacatcctgaagaagaacgggatcgatccttccacagatttaaccatcgaccagagcatcaacttcggtttgaccgccgccgccttcaccagctgcgatgccgattacacggtcgagtttgaaccgtttgccacaggtctggaaaaagaaggaaacggccatgtcatcgcctccctcggcgtcgattccggatatgtcccctataccgcctacagcgtcaaaaaaagctatttggaaaagaatcccgacaccatccagaaattcaccaacgcgattcagaaaggcctggaatacgtcaacacccactccgccgaagaaatcgccaaagtgatccagccccagttcaaggagaccgatgaggataccatcgccaccatcgtcggccgctacaaagatcaggatacctggaaggacgacaccgtcttcgaacaggacagcttcgagcttctggaaaacatcctggaggaagccggcgaacttaacgaacgcgttccttacgacaaactggtaacaacagagttttcgcaggaagcggcaaagtaaacaggaatacccacacataacagagagatcccgtttccgctttttacagcagaaaccgggatctcttttctttcacgcttcttctgatcagtccgggtcagtcaaataccaccatgcactttaaagtctcctctgtatctatcacataaactacttcctgatcccctgcatacgcagcttttatcttcagaatctcacctatccgttccggtgtatccccgctaagccgcgcctctgccggcactcttaaaatctcaggttcctcctgtacgaggaaaccgcactgcagagtccccgcctccgcgatgacaatcaccggctgatcaccggctgcgctctcttcttcccctgtcattcgatttaaggaagccgcgggaataatcgtacctttccagttgcacagtccttcatagtactccggcacacacggtaccggagtaatgcggctgttccatatgatctcccgtatacaggcaagttcgaatccatagactgcgtcaggcatgcggacacacagaaactccagttcctctccgcattccttctctgccgctatcctcaagtcattcatgggtctttccacctcctgtattccgcgccaggtcctctatatccagctgaaggcagatgcttccatcccccaacaggctgcacccggagattcccgtatactttttaaaatgctttcctaaaatggcagggagcgatttctccaccagactgccctgatccgccacccggtcagccacgatacagagttctctcgtgctccctctgacatacgccataatttccgtgccggtcctgggtgtccctggaatatgatagaacctgtgcagggaaatgacgggaatataccgcccctctctgatccagaactctctgccctcctggatcaccagtccctgcccctgcggctggtaattgacaaactgaacaacctggtgtgccggaaccgcaaagaaccggtcccccgtctgaaaacggatgctctcgatgatggtaagagtcagaggcagatgcatgataaacctgcttccttcccctctcgtgctctccagatgaaggtggccgccgaacgtctccaccatctgacgcaccacgtcgagccccacgcctcttcccgagtactcgttggctgcatcccgcgtcgaaaaaccaggcagaagacagaattccagaatctccgaatcggaataggtggactccggacgcacgaacaggttcttttccctgccctttttgcgtacctgttccagatcgattccgcatccgtcgtcgctgacgctgaccacaatctctcctccaacatttgcaaacagaagcgtaactgtaccggtccgcggttttcctgccttctcacgttcttccggcctctcgattccatggtcaatcgcgttgcggatcagatggagaagcggatccagtatgccatccgcgatctttttatccacctccacattctgcccctggacgcagaaagaaacctctttcttttccttcctgcagatatcgcggacaatccttcccagctgcggaaccacattggaaaacggcaccatccgaatggatataaccagttcctccagctccttcagaaaacggcttacctgatagtttttgccatcctctgtatttcctttcgaagcttccatccaggaagacgccgcaataatcagttcgcccgtcagattctgcagctcatccagcttttccacccggacgttgatgaaatcggtgccattctgcgcaggtgcctcggcttcggtctccggctccttgacagtctgcccttccgtcagctgaccttcctgcaccttcggcagtcccgccgcctctgtgcaggattccacgaacagcgcgctctgaagcgtctttaagacagcggccgggtcatccgatgcaaagctgatatagaaaccattatcatgaatatattccgctgtagacgggtctgtctccacatgttcgggatacgtcttcacatccgtacacaaatcatggatctggcggagcgccatgtaggcccgcacatgttccatccggcagtccttttcaaacttcaggcggaccgtaatcttcttttcctttaccttccggacgagagcctctatcttatcccagaaccggtccaccggctccggctcgaagctttcagatttcattcgtttcagttcttcccggataaaatcagtggcttcaaagatcaggtcaaacgtctcctgcttatagccggtaagcctggaaggctcttcccgaaacaccacaaataagtcttccagacggtgggccaaaactgacagtcccgtcagccccatcatggcggaagagctctttatggtgtgcatcacacgaaagatgccgttgatgctctctctggaaaataccatctcctgctctgccgagagcagaatggcatccgactggtccagaagctgattggtttccagtaaatagatctcaagcatctcgcccgtgtcctcgtcaaaaaatcccataccaatcacactcccgactcttcctcataaccataccagatcgtacggtttttccccgttttctttccgcggtacagcgccatatccgcgtgcgtcatattcatcttaaagctctgttctttatcgtaaagggagattcccagcgttacagtacagtaaaacgtggtacttccatgaaggaaaggaaatccctggatctcttttctgatctcctcacagacatcgtagcattcctgcttcgttaccgccatcaggataatcaggaactcctcaccgccccagcggatcaccttatgcctgcggcagacgctctccatgatattggaaatacagacaagaaccatatctccggcatcgtgtccgtaacagtcattcacatgtttaaaatcgtccacatcgatcatgaccagcgcgtcctgacgatccggctccatcaaatcctgagacagcttctccacgacgaaccgccggttgtaaagcccggtcagttcgtcccggtaggcgacgcggtttaatatctgcatgttagccttcagcgtctcgtttaaattcttcagttcatcccgttcccgcttatcctcaaggtgcgctttcaccctcgatttcagttcttccggccggaatggtttcttaatatagtcgcaggctcccagttcgaacccccggattacatcctgttcactgtccttggaggtgataaagatcaccggagcgtgattttcgtctttttcttttatcttttcaaacagttcatacccttccatatcaggtaaaaccacatcaagaaggatcagatcgggattcaccttctccagtaattccagtgtctccttcgctgagtgagattgataaaccgtatactcctcattttttaaaaccttttcaatctgctggcatatcagcaggctgtcatcgaccgccaatatcttctgtccgcctgtcatgctttttctccttccaacctccatgttctgcttaaataacttttatgcctgcgctcatagacttgactgtcaggcttccatccgccgaatcaaatgtgatcgttctgccgtagttcttcccggtatcctccgccgtcaccctcacattcaactcccttaagacggctttgaccgcttttacgttgcgttcccctatacttccaagagcttcatacctggaaaacatcgccgctcctccggccagcttcgccgtgataaaacagcggctggcccccagacgctccatctccttcagaagctgtcggcagcctttgtctgcgaatttatacgggttttcctgtgacaggctgagacctgcatcgggaagcataatatgtgccattcccgcaatcttgtacttttcatcgtataaacatactcctacacaggaaccaagtgcataagtaatgagtttttcaggcagggtgactgcttttccctgtgcaatgcccaccaccacaggattatccctcatattcctcacccagagcctcaaaaatccgctccagagactgtatctccggaaggaacaggatgtggctgaccacctcctgatcgtcaaaatgatatttgtcctcaatcaaaagcagttcatcactcagcctcgcaaaatgaatcatcggaacactcaatatggctcctgtcatatcgatacagaggtcagggacggaaacgtgaaccctcaaatccatcatcacagtcatggcgttaatataagagcagcacatgatattgccgatctcacataccgcggaaaggctcatatcatccagatttttgatatcttcgatctccgtccccagcagtttttcaagcatggtctgtgcgaatttggtactgatcagaaacatgaacataccatttaaatctcctgagagttctaaaagcacacccagcttgatttcctccggaccgcccagcatggccgggacttcttcgaatttcataattttaacattgggacgctcgatttcgattctgtggttaatcatgctggagagcgcagtgaccgcgtttcctgttccaatattgccgatttccattaaaacgtcttttgcattctcactgatatccgaatatttattcatctcatacctccgcagacgatggaaatgcccggttaagggcctgaacgatctgctctgctttaaacggtttcacaataaaatccctggctccgcagtctacggcttccttcatcatggaatcctggcctatcgctgaacacataattacaaaggcgttctcatcgatctctctcatccgttttaatgcctctatcccgttcattcccggcatggaaatatccaggagcaccaggcccggccttaatttttcatacagcacaaccgcctcttcaccgtcgcccgcctcatatacctcgtaatctccggatccggatataatacgtttctgcatggaacgcataaacacggcatcatctacaatcagcactttcttctcactcatgacagttcaaattcctccactaattttttcaatacctgtgcctgcgccgacagttcttcgctggaagcggcgctttcctccgccgtagcggaattcccctgtacaatctcagacaccatctccatactctgtctgatctggataatggattcggcctgacgcacggaagacctggagatccgatctaccatagcgccgatctcttccgtacctttaaccactttatccagcgctctggccgtcttatccgcggcactggtgccgccgtcaaccttttcagtggtctgtgccgccagccgggccatcatcccggaagcttccctcgtctttgccgcaaggtgacgcacttcagacgccactacagaaaatccccggcccgcctctccggcccttgccgcctccacggaggcattcaatgccaggatattcgtctggaacgcaatgtcctcaatctcctttacgatactcccgattgcactggagttctcccggatttccagaatggcatgaaccattgccttcatctcgtcactgcttctggtaaccagaccgctcacctcatctacctttttactggtcatcacagagtcattggcattgctctttacgctgtccgatatctcattgatattggccgccagttcttccatggatccggcctgctcagtcgctccctgagaaaggacctgtgcaccgcccgcaacctgttcggaacctccggccacctgatctgccgtacaggcaatctgcataatggcgcggtttaacagactggtaatctgttccatcgccttccccagcgcaacgaaatcgcctttgaacgccgtctcgggatggtagttcagttttccatttccaaccgccagaaggccctcttccactgcggatacgtaatcgttcaaagcactgatggtttcccggaagctgtctgccagctctccaagttcgtcccctgacctgtatttcagctgaatacttagattcccttccgccagattccttgctgcttcccgaacttcacgaaccggctccgtaatcccttttgtaataaaaaagcagaaaacaaccgttatgattaaaagaagaaacgacagcaccaggatcacagccgtcatccgctgcctgacttcatgccctctttcaaggtatatttccgcattcgttttggagtatgcggtaatcgcttccagacattccctcgtcttctccgcattgggctcgtaatccttcccgtataacaagagcgctttctcgtcatccccttctttcagcgcctctatgacaggctctctgtactgcttctggtttttcagggattcccgcagctgattcaccagttcattatccggcatctgttctttcagtatggttaagttcgtgtccatctcgctgagaatcgcgtcgatctctgccagctgctcctgtcggtccacattcaccccttccgtggctatgctcaggatcgtgcgtccgatattctgtacggaggcccttaagttccctgcggtataagacgccgtaaacgccttattataaaagacatccagtgattttgctacattgtatactccaaacagagagacgatcacggttacgatgtaaaaaatgataataatgccataagaaaccatgagcttctttccaattttcaagttctttattttcttcatcagctctttccttccacctgtcattctatatccagtatctggaacggtttaccgtttctatctccagtcttccgctgcccgcaaggaaatgaacgctccgtccataattttcacccgtatcctccgatacaatcaccgcctccagttcctgaagcgtttttcttgcacagatcacattctccctgccgatatccggctgtccggcctgtccggcaaaacagaagattttcgcgcctccgaccagctttacccggatccgttccggtgccgctccagcctctttcatggcctcatacagcgccagagccgccgtgtccacataccgcaggccgttttttcccgcgttgtcccgccgaatccctggaagcagggtatgtaccatccctccgatcccggcttcctcgtcatacatacagatggcgagactcgaccccagcgccatggtgacgagaaccgtttcccccttcaccaccgccatctggtcaggttttatcacgatttcgctcatccgttcacctccaccgctttcataatctctgaaacggagtcctcacgaaggaccataagcatacagcactcctgcagcgatgcctccgtcgaaaaattattgccgatacagatcccgcctggaaatgatcccgcagctgttccgatcagagacgtaataatggcccctgtcatgtccatggatacggccgaatccgccagtatgattctcaatccggcacaggcggaaagccccgttaaataggaggacgccataatattggccgtctccctgagcagatccagcatctgcccatccatctcctcagggacctgctccgttcccagcagctttctaagaatgacatccttcatctcttctttatatatctgaagaagcatgccgttaatgtcgcctgcagatgggatcagaactgccaccacattttcctccgcataaccaatccactccgccagcccgtcatagtcgaccctcttcatgaccggaggcgcataacacaccttttctcctatgatatgggataaagaagccatgctgcttccggttccgatattccccatttccagcagcgtttctgccgccgttccatacggcagttctctttcgtccttcatttctccctcctgttacaaatacgctgttacaatttttaagatctcctcgtccttaaacggcttgataatgaaatcggatgcaccgcagcgaatcgcttctgcaatcacctgctcctgccccactgcagaacacatgatgacctttgcgttcctgttaaacgccaatacctcattcagtacctccagcccggaccgttccggcatcgtaatatccaaaagcatcagatccggctgatactccttatatttctccactgcttccacaccgtctcccgcttccacaaagttatcgtatcccccctgggacagcgcgcgtttaatgacttttctcataaacatcgcatcatctgctatcaagatcaatggcttttccatgccttacctcccggttttcttattcatattcatgcagaacctggtaatctctccgtttattcgtccaagttccatctgtctttccgctccgccgtttcggtaagccgattccggcatggagtaaatatcactcgtctttttatcctgagcgatggtgcaggctcctgcctgacgcatggccagcagcccgtcggagccatctcctcccatacctgtgaggataacccccatggcattctctttcaccgtctccgcgacggaatgcatggtgacgctgatggaaggacagaagccgccggaccgttcccccggaatacagcggattataaagccgtcctccagctttcccagcgtcaactggcacccgtccggggcaatataaaccgtaccgtcgcagactgcctctccggaccgtgcctcttttacctgcatccggcactggggattcaaaaagtccgcaaatttcccggaaaacccgtggcttaaatgctggaccaccagaattccgcaggtggtcacaggcagatccttcagaaccgtcagcacggctttaggaccgcctgccgaagcaccaatcaccaccagatatctgcttttcttttctgcctgacctcccactgactctccccccttcgacgtaaagcgggcggctccttactttctgtaaacagccgggcacacatactcaaacagttcatggtttctgggcagtaattccgtatgccccacaaacagatagccgccgggttttaatgcccggtacagcttgtcgatcagtttctttcttgactcctcgttaaagtaaatcatcacattgcggcacaggaccagatcgtactgccccagccccacactgggcttcagcagattcatgtgctgaaaccggactttctctcttatggcatggccgatctcaaacgagtttcccgactcgtccatggccagatacttctgctgccacagaaccggaacattctccagttccctggccggatatctgccattccgggccacagccagggcctgctccgatatatccgtacccacgatggaaaagggcggaagccatctgccctgatccttataatcctgcaaaatcatagccagagaataacactcttcaccgctggagcatccggcacaccagatctgatacgaaagccgtccccattccggcgtaagattggaaagtatgttttcccgcaggaaatcgaagtgcttcggctctctcataaagtatgtatagttagtagtcagacggtttagcaggatggcctcaagctgctttgtcctgtcctctgccatctgtctcatgtattctcccatggagatattaccgcgtttttccagttccccgttcattctgcattccgccagaatcttcttctttgacagatcaattccatactggctggacatataggtcgttaactgtgtaaactcctcattcgtaaaccgtatcaatcgcgtcccctccggtaacctcatcggccgccattccatataagcttccgtcctcttttctgatcagtacgacacacgccggcgctttcttcggtaccgttttcatgcctttttccggcctgaatacaggaatcaggccgcccgcatgataaatcatacccacaatcttctcgggagcccccggcacttcgatcatatcagggcacggaagaatcacttccacctgttctaaagccgtcagttcccattggccttcataattcagacacagactctctctgtcaagcgtctcctgttccacgtgtgcccctccttttcttcattcatccgtcagatccttgtattcctcaatgggcgcaggtctcccgtaccggtagccctgagccagattacagccgatctccgtcagaaacgcctcgtgctctgccgtctctattccctccgaaatcacctgaatatccagttcatgggccagatgaatcacgttggcaatgatgatcttttcccggtcactcagaagcttctggaaaaattccttatccagcttgataatatcaaccggaagatccttgagcagactcagcgatgagtaacccgtaccaaaatcgtccatggacaggacaaagcctctctccttgattcgtcttgccacctcaaggatttccccgggattgtttaaaaatgcattctccgttatctccagctccagataccggctttccacaccgtattttccggcaatctgctccagctcctctaaaaaatcaggcttcgtcaagtgaattctggagatgttcaccgcaatgggatacggtgttctgcccttgtccttccagcttttaatcagcctgcagactctctcaaacacgtataaatccagttccgtaataaagccgtttttctcaaacagcgggataaactcgtcgggtggaatcatctggccttccggcagcttccatcgtaccagcgcctcaaacccgatacagcgctttcggggcagatccaccttgggctggtaataaaccacgaattcctcattatccgccgcactcttcatacgaaatgcaagctcccgttcctttgcgaacttgcgttccgcctccctgttataaaaactgtatatacttttatggtaatcctttaacgcctttctggccatattggcatggtctaccaggatcgacatatccgtgtctccaggctccaccaggcacacgcccatgatacagctgatcgaaaaatcctttttctcttcccgcgggatctgttccacccgccgcagcagctggtccagacggtgctgcaggccattaaccgtctgatattccagaagcagtgcgaacttatcagcttcaattctggcaaagcactccccgccgccggtaaaatgattgagcagagaactgatgcccaccagaatatcattccccgtctcgtagctgtaattggcattaatcaccttgaaatttttgatatccatggtaacaaccgcctgtaaaagcggcgctctcttcaggcgctttcgcccctcgcttaagaaccggttgtaattccatgcctctgtcagccggtcatggtctatcagaatctgtgcgaagcgctgaaaacggcattccagaatacgggctgccaggacccgcccggccagcgcaaaggtcatggtctcctccagcgtccagagccgctcctttttgctgtcgttcacactgatatatccgatataatccccgttttccataatcgggaactgcatcagggctctcgtttttctcagtttctggcgctccgcaatgacgggatccagaatctccagttcacagatccggttgcaggccagcacttcccggttccggaacaaatccagataccggtctacgataagtcccggagctgtcttcaaatggtcgttgcggaccatcggcttctcttccctccaggaaaaggatatctcatagtcctttccccctgatttgcgctccagaatataggcttcgccgcatccgtaatatgcacagatccgttccagtcccttttcaatggagcactccttttttccgggcagaagctgatccatcatgacgcggacaaattccatatcggcttttccgctgtcttctatgtattcaggaacaggacggatcaaacagccttttgccgcatgcatttctgccgctgtctgctctccctccccgcattcacactcctcagcaaaacagaaaggccttttctcccgtttcgcatgcgccagagccgccagcgccctctcacgaagcagctcgtaagtctcctcccggccgtctgtcagtacacctccagcggttacagaaaggcctgcgaaacgctccaggcactccctgacactgttcatggaagtaagcgcgtcttcccggctgcggcatcccagaagaaagatgaggaaacagtcttctcccactctcgccacaagatctgtccgcctcagggtacactgcagcagaaaggccgcctgctttacagaagcttctgaaagttttgtccctccatttgccgcctccagaaaaaaaaggccatcgcctccccagtgttctgtatcttttaagtattcgctaatcatcacttcagccgaagcctctgtccacgtattggtcagacggtccagccgttcttctctgtttgaaaccatgacccgtttaatccctctctttattcaaaaaccgctctatatccatcacgaaggcccagcatccggaggaatcaagatacactgcctgcgtcaaaaaatcgtttttctctccggtcacatcctccggaagcttaaatattcttgtgtcaggaacctcaaacacaccagccacgcggtctgccagaatggccggaagagagtcctccgcatctaaaaggaccgcatactcctgttccctgctgtcgccccagaaggctccaacggaataaatctcagcctcgcacccctcaaaaacaatcgtcttctcctgtcccgcatttccctgaacaatatggcgtaccagcttcagcggaatcaaaaaaaaagcgccctttgactcaaaacataaaaatgtctccatcataaggcacctccttcgcatttttctcacttgagtatactatttattatattatcgtatcctgcttgaaaaagcaaggtaattacacctcttttgcttccagcagccagccttccagactgagtttaaagcgcctcataaaaaggcgtgaaatccacagaatcgaaataacggcaactgccgccatcaccaggataaatgatccaaatcccatccatctgtcatatgatgtcacaagtaccagggaagccagaattgtcaatatactgaccgccgcgatctttcggtctgcacgcatcttctcccaccggtttctgaccagacgttcctttcgtatctcctccggttccgggccggacagttcatcctttactctttcgagggtttcctcataaatcttcctggcatctttttcacagtattcagaacaattcttcttaatttcttttaatccgttccatataatcttcatgatatcctttgccgacgtaaacatgtctaccctccttttgttctatcatacaacaaattaccataaaaaggaatcacaaacagaccaactggtaaataattccatgatgtcccaatcatactgcatatttccattttgaagaccatatgaatatagaaatcctgttttatggagccattatgcagatcattacccaacgagtactgtcggataccgtatacagcaaagggactgccgtactcacttatacgatccgttatccttacttcacaactacctgctccgagtcagccgccttaagtatcaatgcgttctattctgctgccgcgaaaaagacggaggagtactgccgtacagttctggcttcccaggcctccgttcaggcagaatacgcccaaaaagacaactatccttttttcggatatgagttcataagcgcttataccgtcacctggaattccggctgcatgacaagcctttacactgaccagtatacgtataccggaggcgctcacggaagtacgatccggacctcggacacctgggatttcagcagcggcagatacttaacgctggccgatttctatcctcacaatccttcttaccgggagggcatctacagaaatctggaacaacaggtaaaggaacgggagaaggaatcatcctccacctatttcgacgattattcttctctgattcgctccaccttcaaaccggaaaatttctttgtaactcccaatggaattgtcatctatttccagcagtacgacattgccccctactcaaccgggatccccgaatttttgattccatttaaaaggaaccggtgatggccggaatccccggcaaatggtgcgttttccaggtgcctctcctccggccggattcatttttttatttttctttcattttctgcttgcaaattctgccaaaaagtgttatcatatgattcgttcgcttctaagcgtatcatatcgaggcgtggctcagtttggtagagcgctgcgttcgggacgcagaggccgcaagttcgaatcttgtcgcctcgatgataaaaagtgcgggatatctctatgagaatcctgcacttttttatgtttgctgtacttattatgatattccgtttcatcatgctcatatcggttctattgcaggctaaaatttcaaaaaacagaaaaatcagaaaaaaagtgcaaattagtgattgcaaattttttatctttttgctataatagcggacatgggggtatagctcagctgggagagcgcttgaatggcattcaagaggtcatgggttcgaatcccactatctccatgagtcttatgctggaagtcctgttcttacaagatttccagcatatttttttgtttaaacccgtacttatcctgccttagcaaagatgatccacacgcagttctatcttccgccatctccgtaataccgttctgcttcctcccagatcttccgccattcctctgattccggttcccccagattatacgtttccagatcttcactcagcggatacgcattccggaatacctggacaatggcttcatccctgctgatcagcagtgtaagcgtactgtcccacgccacgatctcaagttctgccagcggatgctgaatcgagaccggattcttccagaaaccatcgtaaccatccgcatacggcagtccataactcagtacctcctgcaatggtatctctctcttaaatcccgacaggacaccccagtaccacggaaaactctgctgatggacaatctcatcaagccgttccccctgcacccagaagaaagcctccctgccttgattcccgctatacggttccagaagttccggaacattttcataatccgttatcagccagttatgctccgtaactgccggttgaattgcagaaaatgccccggaaagacaggaataagccgtctccccctttcgcagaatgacgcctttcattgcaccctccttccatcacttcaaaagtcttcggtaaattgccatatctttgtcggtatagacatcaaaaataacctgccggaccgactcattctgctctaagaaaccggcaaccgtctccaccgcaatttcagctgccctctcctgcgggaaacggaacacgcctgttgagatacagcaaaaagcaactgaggttatatgattttccgcagccagctccagacaggatctgtaacagtccgctaacatccggcagtccgttctttgcagaggaccggtgatgaccgggccgacggtatgcagaataaaatcacacggcagattaaagccaggtgtcagctttgcactcccggccggctcctcgcagccctgagcttccatgatctcattgcaggcaagccgcagctgaattcccgcacaggtatggatgatgttgtcgatacaggagtggcagggccggaagcagcccagcagcgcgcggttggctgcattgacaatcgcacctgtcttaagccgtgtgatatccccctgccagaggcagatacggctgttctccttcacaggagccagatccgccccatccagtatgccgcgtgcggcattctcctcagacagatacatatcctgaactgctaaaaaatccgaagaagccggcatcggaggccttacattcatcagggaacgcaggagccgtttctgttccgccccctcctccggtatcacaataccgcggtactgaggcatctccctctgcatggtccggatcagatatatgcagcgctcttcctgggtcatatcgttcttatctttcaaatcacagccctcctctgaccgcttcgagcgcttttgcaaggtccatatcgacatagatggatttctctctgatctcttccggtccccaggcttctccctggttgatacagatgtaggaaccgttcttctccctgtctgtcatctgccagaacggatatttaatgattcccggagtattcataccgactcccagttccagaaatacaatcttcttattccggttgtttcttataaagctgctgtatccggcacatgcgcgctcccaggcctcatcctccacaaagaatctgtcgcaccgcagattgacttccatctctccgccgcaaaccgggcatttcggtaccagctctgttggtattcttaaattttcctgccgggacaccatggccctgacgtctttttcattatcgtacagctgtctgtgacaggcccttttgcactgaaacaggccgtaatcaccctgaactgcaaagatcctctcctccgggaatcctgccatctgaaactgatgatccacattcgtcgtcagaataaagtaattcctgtcctttaccagctgaagcaaatccagatagggctttccgatccggacgtcatagcggttataatagatatgtctgctccagtacgcccacttctcctcctgtgtggaaaacggataaaaaccggcggaatacatatctgtcattccgtagtgctcaataaaatctccgaatttctcatgaaaccgacggcctgcatatgtgagaccggcggcggcagacataccggaaccggctccgacaaccaccgcctctgcttcccttagaagtgttctcaccgcggacagcgtttcattcatggtatcccctccttttgccttctcacaggaaatctttgatataaactcctgtgctcctgtctgaattataaaccgctgcagtctccagggcaagaacgcacaaaaaagtgggatacgcacctataagttacttagtgtcaaacagataccattatagctgtcatcaatatccagattgccagcctcctcatcggtacaacacataatcctgcatctcgcggatgaaaccggcttttttcagcagttcacctgcatgttccgggtactcctttaagatcagccgtttctggtcaggaaataaaagttttctctgaaaacagcggacaaattcagaaagcaccgcctccattccttcctcctcaaaaatcctgaggaccttcccctgacgctccatcaccgctgctgcccttccctgccggagagcggcggccgttcccggtatattcataaagctgctgccctccggctgttccagcacttttccccagatctgggccggatctgatgcgttcagccagatgacctcgtcttccggctgttttaaagcagccgtcacgctctcatactcctctttcctgataaactgtgctcccgacataccggatacgaagtagccgcgcctcacattccctgtgtactcccagatccgaaggacatccagggcctttctccaggtcagttcccctgcctcttccctgtctccggctgaagcgcctgcagatatcatataggcagatccggcacaggaatcgcaggatctgcggaaggtttccttacacagaacggctgattcctttaagaatagatccagccactcctccaggctcctcttcctgaccggccgcacgatatcccaacggccggctgacagcgccatcacccggacgttcacccgctgtctcgcagtcgccttctttactttttcccggttctgccactgtctcaccggcacaaaactgtctgcacatacaaggcctttttccgccagcctaagaagcacgtcctgagcgctgtcctgctttggaacctccgtaaggaacttaaggaaactggctccccgccgcattagctcctggtacatcagtttctcgtcaccctccagctcctccgaaagcccggtgagaggcgcctcccagtcgatgtcttcatagcggtaaaaagccagtgtcccatcggacttcatctgccagaaataatccccctgcgccaggagcctgtcaagcatggcctccgtataattctttacacggcgggcaaaaaagacggattcccagaatttaaccgggtacggccttccgcagagctgctccaccgcccgcctcagctgttcctcacccggtgcgcttagaaaggctcttcctgccatcagggccgcataatgtgacgcaggctgtgtcacagcctccaggcgcatgccctttattgatgcacgcctggccctgacatagatcttcgcatggtaaaagatcccctcgtcctccaccaccagggattctccggccagcttttccaggatatgttctgccaatccctccgggaaaaagtaacgctccctcactgcctccgcattctggcctccgcggtaataaagcatccggcgcacaatgtgcatggctgcctcctcgttcccatccagaagcgcctgttcgtactcttcccgttgctccgccgcaatccatatgccaggttccatataggcaaccagttctctctcagccagattctcaagccactccaccggcacaggcagttctccggctatcaaatcgccctccatcatcaagagggagtgaagctgttcctcgtcctccggaagtttcttccgttcctgaagcctggcaagttcctccgcctgcggctttatcatgtctgctgtcttcagttcctcgtaaaccgcttcgcggattccctgtgtaaccggtgaatactcatacatctctgccgcttccgcctgccattggaacggaagcgacatgggagagggcacatccacgcagacctcccggacggtaatgagcccggccctgatatcacccaaaatccggagcactccgtcaatatcccactgatcctccaggcactcccgcttcgtttcacgtatcaggggatgatgcggctcgtgtatcagggaggacagcatctctgtactcttcagcctctgcatccagagaggctggcgtccattccgcttcattcccatcataagcgcccgggacgcgttgtaccggaatgtcatattaaacagaggggtcaggggaagcgctgcttccaaaatgctccgggcctgtttctcatcaatctgaaacaacagcccttctggaagaacgtcatccccataaggatacagaaggactccctcctcctcatccacactgccgatatcaattccgcataattgcctggccgtatgctgaagaagaagcgacagcggcgcattgacccgtcttccaaacagcgcatgcaccataacctgattactccccgtatggtctgtgaaccgttccacaacaatcgtcctgtcgtctggaagtcctccggttgcatcgatctgccttctcagaaacgaagctgcgttgcaggccgccgcatcgtccagccccaaacggttcaatgcatctgtcaaggcgtcaggaccgttctccgcggccttccccagctcccggaacagcctgccgaaggccagactggtacgaagagtcctgcctctcgtctctcccttccagaatggtaatctggctccttccgccggcacctgtgtcactaccacggtatcccggtcctggctgacgatcttccatgcaaatgaccccagcacaaacttatctccaatctgggattcatatacaaactcctcatccagttcccccagtttcaccccgtcttccgttttcgccgcatagagtcccttatccgggatcgtgccgcctgcagcaaccgccagcatccggctgtaggcgtctccgtttacacgctcatgaattctgtcatagagaacccgcggacgtaccggaatctctcgcccatgttcgtaatcccccgccagcatccgtagcacactcttcacatcctccctcgtcacgtcccggaaagagtaagccctgttcagaatgtccatcacctcatccacacggtacccgtcgcctgccgccatggacaccagatgctgggcaagcacatcgaggcacattcttggcggcttcgtatgctcgactccgccaagtctggcggtctcagccgtcatgccgcagtagacactctccggtgccgtccgcggatacatgtacatcacgctgacagaccccggattatgacctgcccggcccagacgctgcatcgtgctggacactgtacggggacagccaatctgaaggacctggtcaatgtctcccacatcgatcccgagctccatagaagatgtcgcgcaaagaagccggagccgtccttcccgcagttcctgctccacctccgcccgctgttccttggaaagacttccatgatgaactctggcgaacccgtcaccgcccagcagattgacgtaataggccagcttttccgcataccgccgcccttccgaaaatgcaatcacacttttacagtccagacacttctgataaaccgccatccccagttcttcccagaccggatcctttcttctcccatttgccggagtcgttcccaccacctcaatgaagaccttcttttccatggccggagcacaaatcactgccggctccggggacagatattccgcagacagttccagcggctcaatcgtggccgacaaaccgatgcgctgaagattacggccgcaaagcctgtccagcctggcgacggagagcatcaggtgagccccccgcttcgtatcgatcagtgcgtgaagctcgtcgataatcactgcctcagccgttttcacaacactctggcccgaccgtgaagtcagcatcaggtaaagggattccggtgtgattatcaaaatatggggcggatgcttcaccatacgctggcgttccttctgaggtgtatctccggtacggatcccgaccgtaatctcctgctgtccttcttcccttccgatcccatcgagaggcctccttaagttctcccgtatatcccccgccagggactttaaaggcgaaacatagatcagatagagtttctcttccagtctgccttccctggccagcgtacttagccggtcaataaaaaccagaaatgcggacagcgttttaccggtacccgtgggggcgctgaccagcaccggcttcccagccgcgatcgccggccacgcctcttcctgcacctttgtcgctttcccgaacgtctccgcgaaccagccggctgtgggctccgaaaaaattttaagaacatcctctgtcatcgtaacctccatgcaaacccacctaaagaccggccggttccagttttctttcccgctatttcactgcataaaaatagtttttcttatcataacacaaattactccggattaacaggcgcctttttccagcgctttaactccggaaaaaactgtctcatcatattccgcgcctcttcctcactcatcccactgttcgctcccgccatcatgggaacacagccttctatcatctcttccatggtacaatccgtcgtaaacgctccatcttgaaagcagtaattacagtaatccccgttcctgcttccgtcttcattcgttccgtacagttcatccgtctctcccatcggcataccacagctctgacaatacttttcttccatcttttcttcctcactcttcgtttatctcagactctttcgtccggatcttaatcctaccacaccaaacacgacagctgtctgtcatgatcacgaagaacatacggttttaaagtgcgttggaaatcgtggaatagcagtccgatttcaggaattcatccaaatactcccgtgcagcttttgtcgtccgataggcaggaagggaagaaaagaccatagacaggtcatcgatctcttccatcgctgtcttacattccagaagaaactccgtattttctttcaggctggtatactccggtttctcagggttcattctgtgagacgcaatcgcataggaaacccgctttccgcaggaacagacccctttaccgcttaaaccgcagtattcttcaagaaatcctgccatctttttcctgattctggacagcctctgccggtaggcctccggagaaagatccaggatttcggccgccagacggctgtccacccgaaacatggttcccagtatatagatacagcggctgtcagcgtccaggcactgaagcatcacattggtacaggaaagctttaattcctgctccagcaggtttctgtccactcccatcgttaaatccggtatatccttttcttttccgcttacaatatcctcgccatagtattcaaagctcagcggctgccgggcaaacatactctttctataatttttcagatgattcaccgcaatgcggaatacccatgtggaaaacgcgctctccccacggaaggaggccaaattgttcatcacccggatcagtatttcctgtgacgcatcctccgcgtcctgaatggttcccagcatgcggagggagagattaaaaactaaatcctgtacttcggtaagcagctgctccaaagcctcttgatccccctccacagccctgcttaccagcatttctgtatcctctcgtttcttctcgtccatgttttttcctctctttcattttacatgtaatcgcgcccccatacaacggtgcccctattctattagacaacgcaatttcgaatttgtgacagaaaagttctaaaaataaaaacagaaagttcttgaaagcgctgtatttctgtgctatcatacagatacaaataaatataagttcttcggggcggggtgtaattccccaccggcggtatagtccgcgacccactgtcacagtggctgatctggtgtaattccggaaccgacagtatagtctggatgagagaagaaattgtgtgacaggcagcagtgcctgacacggtttgatgtaaatcatgacgccccagattataaatctggggttttttattctttaattttatatcagccagtcatccacactgcagaaagccgcatgattcctcttaaatatgaacttacaaaaccaaacttcaggaggatccaacaatgaaagaaaacaaactgatgtcaacaaaaaacgtggtattaatgggcatgttcggtgctctcgccggcgtcctgatgatctttgaaataccgctgccattcatcgcgcccagcttctacggactggatttaagcgaagttccgatcctggtcgggacctttgctctgggaccgattgccggtgctgtgatggagatcgtcaagatcctggtgaaattagtattaaaaccaaccagtaccggatttgtaggagaatttgccaatctggcagtgggctgctccctgatactgccggcaggaatcctttaccgtttcaacaagacaaagaagggagccgtactgggcatggccgcaggtactgtcatgatggcagtggttggcgttgtgatcaatgcacttatcatgataccgttttactccaatttaatgccgctggagacaattatccaggctggcgcagccattaatcctgccatcagcaatgtgtggacatttgccatcatctgtgtcggaccgttcaatattataaagggagtcactgtatccctgatcacggcacttgtatacaaaagaatcagcgtcatcatccatagtgccggaaggtctgagcgcaggactcaggcacggacgtaactctgaaaccttttaccgttaagccaaacacccggagggagtcaaaaggaccgcatccgatatacaattcagatgcggtcctttttattcccggggctccactatgaaatccgcatagagctctcttctgcttccgccaaggggacgcacccccttgatgatccggtatctgccggactccagttcatcatacagacgttccagatctaccggaagagccttataggaaccggaactaacctgataggtaatgctgttccagatcacctccggattcaccggcacttccgtcatctccactccgtcaattctcataagcttcatctcatctccaaacaaaaccggggatccggactgattattaatctccagaatcagcttcttctcaaacggctcatcctctgaccgtttcaaatccaggaataaatcactttccggcttaaacaccgggtctgcctccacagccgcaggatcttctccaacaaaagaagcatccgtggacaggataaagccgtattccgcccggcttccgtcatcccatacgagctccagcttaaaacctctcagaataccgcccgtcatataagctgacatgtccgagctcagcatcgcatttacattagtcgggagacagaacttcatctcatggttatcatactccagttccgttgtgataaccgtcttctcatcataacgcggacttccatcttccttcaggatataatcggaaagaattgcctcatcgggctgcttatccccggtcagctctatggtaatccagcgcccgagcggcacatagggaatctcccgttcatctttcgcaaggactgtaaatggttccgggccgcaggccgccgtactgactgtatcgccgtcatctcccggctcattccacaggattacccccgaggcactgggaatctcccggctcttcctctcatggcttactctgatctgaggaagcggatcgcccttcactaccttaaagaaatactggtaatgggagtaattcttctcatctccctgtgaaaattccagctgcacataatagtcttttccgttcacaggaatcagaatatcggaaggattcatcacctttccgctgtccaccgtgtcgaaccccatactgtagatgatgtaatcaatgggattatccccattccccttcaccttaatcttaaagtcatctgcatagaaaacctccggcatatggtactccccaaccgattccttcacgatcttctccggggtgagccagaggccgcaggctgctgtctcctgttcatttccatctttatctgtctctgttatcaaatcattcgtccagttctccaaaggcacataactgatgccgttggataccaccgtcacttcccgttcctccaatggctgttcctcaagcttctcagcggtctccttcgtacatccggccagcataacggccagaaccagtattgtaaaaatctttcggaaatatcctgtcatccgtattccccctgccgcaatctgatttccccattctccttttatcataccataagaaaagaggaatttctttgcgataacctgacgatttcattaatatacaaatccataccagcgtttcagacttccctcgtcaaatacatactcaggtatcacaagaggatattccaattccgaagcatagtaccacgggtcactctcgtgaaggggattttttatgatctgaaactcctgggcaggcatatatccctgggccagaaggaaacagcggctgccgtctctgttctgggccacatcggctaccatgacacagtggcccggactgccgcccttgataaacatgtctcccgcctgaatatcgcttacatttaccggaaccgtctccccgtctaaggagagtgtgccggcatagatcatcactgttcttaagtattttaaaaacgtctcataggaatcatcagcagcggcttttgcaacccaggacgtctcatttccgtctaccatcagccgctttcctgctttccaggccggataatccattaaaaatccgttggtcaaatgaaacgcaattttatcgtaatcccccatcttccagaaatattccgaatagatacgaatcacgctgtcggcgcactgctgtaagtctccgtcaattaaaggcatggaaaacacagccgcgtgagcgctctggtttcgcttcccgctgccatcgtacagaagaacaggactctgatccggcttcattacgtaccgtcttaagtacccctgaaaactccccatttccctgggaattctcgtatacccttccggtgtataaaaacgttcctccagagttttgccttccgggttaatcagagagtccctcttttcagatggtttatccggcacctcatcatcaccggtcagatagatgatctcctcctctgcctgcggcgccgacgcagccggaaccatttcaccagcgtaggtgatgttcccgcctcccgttctgcatcccgccgacagaaccgccaatattaaactgccgcataataccgtatatctgatggttcctctcatactattcctttccatcgtgcaccctgaactgtccgttccttcagggatccccgcttcgtttttattgtaacataagtcgtctgcgattactacatggtttcactccgagttcacccgccgctgccttttagttacaattcccccgggggaccttactcctgtttttcgaatacgaaccggacttcaccggactttttctgccctgcatgaaccgcctgaagccctgactcacgggcatacccctttgcaaagaggttaaaacagtcggttgaacaggactggttttccacgcagaaaaacggcgcatccggcgtaaatacaacaatatggccaaattcttccgttgcttccagttttactttacaatctttatagaaaatctccgcatacgctccagccgggcagtctgtatacacatgatccagggaaaggccgtccaccagcacaggcgtacgtaaatccggtaccgtttcccctgccggaatcagctttccggtaggaattttctcctctgtcatctccatgacggaagcggccggaacggaaatctttacttcctgttcccgcttagagaaatagggatgaatcgcaatgccataggaaagctctccctctccccggttgtccacctgatagctccagaccacctcatccggcagtgccttcaccgtaatacttaacgtacttgggaacggaaacatcgcaaagtccggctgtttctcattccattccaggacaccggttaccagggccgcctgtccatctgtttccgccgtcttcacctggaatggaagatttttcaccagtccgtgcatcctggcgtcatactgttttccatacgcctgaatctttaaattctccgagcggttaggcgtcggatagagaacaggcacaccgtacgttgccttcctctggtaccgcgcctcttcccagtcgatcatgtgccgtccttcccagtcgatctgatagatattcatgccatccgccggattcacaaatacttccatggattcattctgaagaaggtatccttcttttccgttccaaactgttttcctgactttcatctaagcttcctcctgtctcaactgaacttgtttcagtataacacaaacccttctgtttttccaccgcagagatcctctctgatgataaaacagagaatctgacaggcccggactcatacagacgcacggttttcggacgcctggttctattacataaaaagacagcagaaggatcacgcttacaactgcgcagtcctcctgctgtcttcctttactcaccttaaccggtaagatccattatgcaaatggattctcagacggataaagcatgcccttcggctggttgaatccgatatcttccacgccaaggtatttaaacacttcaaataatgcctttccaaaatggccgaacgccactgctccgtggtgcggataattcttctcgatcagaacatggcggtagaatctgcccatctccggaattgcaaagacgccgatggaaccgaaggaacgtgtggcaaccggaagaacctccccctgtgcaacataggcgcgaagctgacaatccgcagtactctgtaagcggaagaaggtgatgtctccaggaaggatatctccctctaacgtcccctgtgttacctcctcaggaagcgctctcgccatgatcatctgatacttcatggaacatgcggaaagctttctggagcatgtattgccgcagtggaatcccataaaagtatccttgtgcgtatagttgaatttgcccttgatgtcgccgtcgtacatatcatccggtactgtattgttgatatctaaaagtgttaccgcatcctggcttacgcaggttccgataaactcactcagtgcgccgtaaatatccacttcacaggataccggaattcccatgccggtcagacggctgttgacatagcagggaacgaagccgaactgtgtctggaatgccggccagcatttgcctgcaatcgcaacgtacttgcggtagcccctgtgttcctcgacccagtcaagaagtgtgagctcatactgagccagttttggtaaaatctccggctttaagttgccttcgcccagttccttctccatgtccttcatcacatcggcgattctcggatcatctgcatgtttattgaacgcttcaaataaatccagctcggagttctcctcaatctccacacccagattgtaaagctgtttgatcggggcgttgcaggccaggaaattaagaggacgcggcccaaagcttatgatctttaagctggataatccaaccagggttctggcaatcggaaggaattcttcgatcatatccgcgcattcctctgccgttcctaccgggtattccggaatgtatgccttaatattccgcagccttaagttatagcttgcatttaacataccgcagtaggcatcaccgcgtccctgtgttaagttgtcgccgctctcctctgctgccgcgatgaacatgctcggtccatcaaaatgctttgcaagcagcgtctcggaaatttccggtccaaagttgccaaggtaaacgaccagtgcattacagcctgccgccttaacgtcctccaatgcctgtaccatgtgaatctcgctctccacgatgcagaccggacattcatagatatttttcacatcgtatttggctgcataagcctctacgagcgcctttcttctgttaacggataaggattccgggaaacagtccctgctgaccgctacaatgcctacttttacttctggtatattgttcatatgtatcttcctcctgattctttctatttatttttttctctgtctgcctgtgcagccatctcaaatgctgaggttttcgcccttcaggccgatatacgcattctcagggagtccgccctcatcatgcccgatcagccacttgtttcttgcaaagagcagctcatcctctttgtttttgatctccagcggctccatatccgtgttggttccctttggcaggacaaccacgcaccggaagcctccgtcttccacgtgacagggtgcgtagtgaagcgtggttccgtagacttcaattacagttcccgccggcaccagaaaggcttccatcagagaagtatcgtacgtgtaatctgcctcaatatcctgttgctttccgatgatcaggattaaatccgtcaccgcaatattaatctcggagtttctgtggtattccacggcgtttaatttcttgttgtggccgttgcagtaaccgatctgaatcggaagttccccatacacattatttttgatgatctccgcctcgggaagtgcttccagttccggaactgacggtacgtagatcacatcgtccggaaggggcgtcctctccatctcttttaaaatccccgctgtgtttacaccggtaatcacctttccataagccgaaaatgctttgtctgaaatgtccttgatctgcattcccatttcacgcgtcctcctcttcttataatgccgcaagctttttatagctgtccttcaagtccccgtaaagctctttgtaaagttcgtggtatttcttgtatttgccggctgcatcctgatcagcatctgtgctctgcgcctcagtaatcagttcatcacaggccgcttccacgctttcatagatcccgcatccgactcccgccagaatcgctacaccgagcgccggtccctccgtctgtctcaccgtattcacgctgcagtcatacagatctgccagcatctgcctccagacaggactcttaccgccgccgccgcaggccatcatgctgtcaacatcgatgcccatctcctttaagatgtcattgcagtcagacagcgaataggagacaccctccatcacggcgcgcagcatatgtgccttcgtatgaatcgcagagagtccgaagaacacgccgcggcagtctggatccagatggggtgtcctctctcccatcagatagggaagataaatcagcttatcactgccgaccggtatctgtgcaatatcacggttgatcaggtcatagacatccacgccctctctctcagcctcttccacataatcctggcagaaattatctttaaaccactttaaggaaagaccggctgcctgcgtaacgcccataacatgccacgtccccggaactgctgcgcagcacgtgtgaacacgtcccaggggatcgatcgtcacctgactgctgtgagcaaacacgactcctgacgttccaatcgtagtaaatgccgtcccatcctttaccactccggtaccgacagccgcagccgcattatcacccgcgcctcccactacctttgtcccggtggaaagtcccgttttctccgcaatatccggcagaaccgttcccgtaacctcacaggactcatagactttgccgagaaggctcttatcaatattcagcttttccagcacctcgtctgaccagcagcggttcggcacatcgaggagctgcatgccgctggcatccgacacctccgttgcaaacacaccggtcagtatgtaacggatataatcctttggaagcaggatgtgtttacaacgctcataattctccggctcgtgatttctcacccataagatctttgccgccgtccagccagtcagaggcggattggccgtaatctcaatccagcgctcccgcggcatgattttaagcatctcttccacttcttccccggtcctctggtcacaccagataatggaggggcggatcacttccccgtcttcatcaagcatgacgagtccgtgcatctgacccgagataccgacaccttttacctcgtccttctcagcgccggctcttttcactacttcttccacggtggcaatcaccgcatcccgccagtcctccggcttctgctccgcccagccgttatgaggctgatacagcggatactccctcgaagccgacgctataatattgccttttttatcgaacagcacggtcttcgttgccgacgtccccacatcaatacctatcaaatattccattcgctgcctccttacctgtttcacgcaatttgccatagcttcattataccgtttttcaccggattacgtgagcaggaacttgaccacataatagcactttcttgctcttttttcaaatctccctatcgttttccctcagaactctccccgcgctcctccttcagtttttttctgtattcactgggcagacagccatacctttttgcaaatgccttcgcaaacgccctgctgtctgcaaacccgtgattcaccgcaatatcccccagctcgtggtccgtatgcaccatctccttcaccgcatattccacccttaaatcctgcagataatcacggtagctgatattggcataccgtttaaaaattctggacagatacgtgggagaaaaaccgaagcggtccgccaccttctccagggagagaggttcgtcgtaatgatttttcatgtactccgtaatctccgacagcttctccaaatggatcttctgccggataatatccggcgcctgcgcctgatccttaaactccgtcagaagcagatactttacaaattcaaacagcccgctcaccttcagctcccatgcatacgccttgttctcatatgtccggtacatctccatcacaagccccatcagcttttcattctgctctcccgatcttctggaaaatgagaggtacggctgttcctgcaaatatacttcaaacgtctgcaccggaatctgaagaaccagcgtccggttgggaagcggggcgtcaatcgaatggacttcgttggaatttacaataataaaattcttttcaccgatcgaaaaatgcctctccccgagataaaaatcgatttctcccttcataacaagaaaaatctcgatcgaccggtgccaatggctggccctcttatactttccctctccgccctcaaagagaaacagcttaaacggcagattatcattcggtataatcatctcatggctggaatccatctcttctcctttatcactttccccggacagtcctcaactgaattcgacagaaaaagcagaccatgcactgcatccgttggcctgcctttccgggtactctcttatctttgttccaaaagcttttttaaacgttcaatttcctgtttttgttcctcgatctcctgttttcgttcctctatctcttgtttctgctctttaatctcctgcttctgtgcctcaatctcctgcttctgtccctcaatctcctgtttccgtttctcgatctcctgcttctgtccctcaatttcctgcttctgttcctcgatctcctgcttctgtccctcaatctcctgtttctgttcctcaatcatatactgcaccgtatttctgtccaaaatctccaatgcttttgaatacatgcccaccaactcctctggttttacctgaaattgagccatctcttcgtaaatttcacggaaatccgggtatcgctctatgatccgcataatatcctccggcctgtcggaacttaaaaagagaagccaggcttctatttcttcacctaaattgtaagtgatttccctgaaaacatcaagagctacaaagatatatttttgcagtaaattaagctccagtcccgtatcaaacacctgactggaacgatggatatactgcccggggattttatgaaattctgcgccgctgttttcaatcaaaacaatggtatacacattccgaagttttttataagtagatcccctttcttttctgctttttatccggctgtactaccgaagcatcaggtccgaggaataacaggcggcacgctctcccggaaaagcgtagccaatgcgctgaatttcaatatttactaattctccgctctcaagttcagccagaacatccataatcagcagagaaccttccgcagaaatccggttggattccggggataagacctgcttcactgtcactctctgcttcataatgcaggaaagcatggcagataaacgatcactatgtacatccggattaaaaatcagtttgaagaagggatcatagctgatcttcaacccccggcttcccatggaaaagccgattaactcttcccggaattccctcgtcaggagttgaaattcaccccatatttccggattgctcttcagcatacttaacacctgttctctgcttctttcctccagcggaaatggcattattccggacggtatgtttaatgtctcccgctccttccctccttttctttcctgctttttctgacttgtcagcatattatttgattttacctgtgccatatgcattccctccctggatttctgcctttcagctatgaatgaatggccgatacggccatgactggtttcgcagcgcactgttctgagaacagtttgccaccaataaataaaccggttagaattacacagatgtgtatctccaatgaagcagaagatatctgcctgaatatgtttagtatactctaattttatcttattttcaagtattttttactattattttatgtattgatttcagcttacagcaaagggaaaacaaaataacgccgcccacacacaggactgtataacgttcctgtgcggggcggcgtaactttgtattatataatcgcgtttcttattcctcgtcagaataaaccggtgcatcctcatccacctgggccatatcctgcatctgaagagccttcatgctcaggctgatctttctgtcatcttcattaaagtcaacaaccttagcctcgatctcctggccgatggataatacatcagacggcttatctacatgatctctggaaatctgagatacatgaagcagtgcatctacgcctggctccagctcaacgaaagcgccgaaatcagtcatacgtgccactctgccaacaactacattgcctgccgcatacttcacagcggcatccttccacggattggtctccgggaactttaagcttaatgcgatcttatcgccgttaatatccttgattaagactctcatcttctcgccggctttgaaaaccttcttcgggctttctactcttccccagctcatctcggaaatatgaagtaaaccatcggcgccgccaaggtcgatgaatgcaccgaaatcggttacgttcttaatcgttccttctacgacatctcccggatggattctctcaaataattctttctgcatctcggctcttctggcaaccataagctgctttctgtcaccgataattcttcttctcttaggattgaactcggtaattacgaattcgatctcctggtctgcatacttggataaatccttctcgtatgtgtcggataccaggcttgccggaatgaagactctggcgccttccactaccacgcttaaaccgccgtcaagaacagcagcaacttttgcggtaagaacttcatggttctcaaacgcttcttccagtctcttgtttcctctgtcagctgccagtctcttgtaagataacgcaacctggccctcgccatcgtttaccttaatgacttttgcttccatctcatcgccaacagatacaacagtcgtgagatctaaattctggtcatccgtgtactcattacgcgggatgatgccgtcggacttgtaacctatattcaagacgatttcatcttctttgacgtcgatgactttacctgtgacgatctctcctgtacgtattgtttttaatgattcctctaacatttgttcaaaacttaactctgacattagtatgaacctcctcgataatatgattcggggttgaagccccggctgtaatacctacgctgcgcacagaacttacacattcaggatctaaatcacctagtgtctggatatagtaagtgttcttacattccttttggcatatctcgtacagcttctgggtattggaactcgtcttcccaccaaccacgatcatggcgtccacttctgaagctatccgtcttgcttccacctgtctctcctgtgttgcattgcaaatcgtatttaaaacaagtatatcataacgcgttttagaaaatttttcaactaaatcttgaaatttcttgtaattaaatgtcgtctgggacacgatacacagcttttcaccctctgaaagcggcaaattgtccacttggtcgggtgtttccaccactaaagtatgatcatttccccagcctttaataccctgcacctccggatgcgattcatttccaatgatgatcagacgtcttcccgcctgattctgttcctgtgcgatcttatgaatcttcttcacaaacgggcaggtggcgtccacaatctcgattccgtttgcttccagaatatcgtatacatgctttcccacaccatgggaacggatgatgacgattccctcgtggagttctttcagctcctcctcggattcgatgacccgtacgcccttttcctccaaatcctttaccacctcttcgttgtggatgatcggcccgtaggtataaatcggtttccccgcgtgcctgatctgttcataaaccttatccacggcgcgtttaacgccgaaacagaagcccgcggtcttagcaacaatcacttccataacgttttgtctccttaattcttctggccgatccctttttctgccgccagcttaagtatctcgccgattacctcgtcaatcgttaaatcggaggtatcaactaaaaccgcatcctccgcctgcttaagcggggaattttctctgtgcatatcgcggtaatctctctcctcgatctccttttcgatctcctctaaactgcagggctcgcccttttcagtcagctcgtcatagcggcgttttgcccgcaccgccgtacttgccgtcagatagatctttagatccgcctccggaagcacgcacgttccgatatccctgccgtccataatcacattctcatttctggccagttccttctgcagctccaccagcttctcgcggaccggtaaatagacagacgatgcggaggccatctggctgaccgcctctgtccggatcaggccggacacattttctccgtttaatatcacctgctgggctccgtcctcgtaggaaatggtaacacccacctcttttacagcctccgagaccgtttcttcctcatccggccggattcctcttcgtatgaaatacagcgccatggcccggtacatggcaccggtatccacatagacaaaccccagctttgcggaaactgctctggcaatggtactctttcctgctcccgccgggccgtcgatcgcgatgttgtaactcttcgacatagttgcctctcctttcatcttaaggggtgtgccccgttatctcttttcccctgccgcggcctcgctcccggccgtccaggcagtggaccatgcgatctggaggttgaagcctcctgtcaccgcatccaaatcaagcacctccccggcaaagtaaagcccgggaaccagctttgactccatggtcgagggattcacctctttcacggaaatgccgccctgcgtaatgatggcctcgttgtaatcgcgaagccctgtaatcgtcagtgtaaacgactttgtggcgcttatgatctgcttccgttcctccctggtgatttcattcaccttcttttccggcaggattccgctccgttccaccataaccggaaccagcctggaggggaaaaggttcaccagcgagttcttaaactgcttgttgatcatcccctcaaattcacggagcagccgcgcatccagctgttcctccgacagtgcgggtttcaagtcgatgacgagagaaagcggccctttcttcagttccttcaccgcatggctgctggcgcttaagagcaccgggccgctgactccgtaatgggtgaaaagcatctctccgaactcccggtagatcaccttttttccgcgcatcaccgccgcctcgatattcttaagggaaagcccctgcagttccttcaccacaggttccttcaccacaaacggcaccagggccggcgacagctccgtcaccgtgtggccagcctctctggcgaaccggtatccgtccccggtagatcccgtagacggatacgacagacctccgcaggccacaatcaccgcatccccgtacaccttagtctctgcgccgccctttttcaacagaatcccgcggcaccggccttcttccatcagcagatccctgacctcggaatgcagatggacctctgcgcccagtctctccagcgttttggacagcgccttaatcacatccgaggacttgtcggacacgggaaacacccgattgcccctctctgtcttcagcgggcagcccgcctcttccaggagtgccatcatatcaaaattattaaatccataaaagctgctgtaaaggaatttggaattagtcaccacattccggaacagatcctctgtgtcacaggcattggtcacattgcagcgccccttgcccgtgataaagacctttttccccagcttttcatttttttcaaaaatatggacggtgccgccattcctggctgctgcaattcctgccagcatccccgcagcgccgccgcccacaatgattactgttttcatcttctgcctcctgctctctattaatttacactaaaaggcaggaaaacacaagtgttcccttttatttcacaggattatgactgctgacgttatagtgtacgccctgtaatctgcggctatttcctgccgcactgtttaacccgttcctccagggcgtcaaccaccgtccttaaaaccttcacccgggcataatacttgctgttgccttccaccacgacccacggtgcgtacgttgtggaggtacgcaccagcatctcgttgacagcggtctcgtactcatcccacttttcccggtttctccagtcctcatccgtaatcttccactgcttcgccggattctcctggcgttccttaaaacggcgttcctgctcgtccttgtcgatatggagccagaactttatgactacggctccggcatttgccatgtgggcctccatctcattgatctcctgataagccctcttccagtccgcctccgagcagaacccctcgatccgttccaccataacgcgtccgtaccacgtccggtcaaagatggcgatatggcccgccttcggaacgttgttccagaaccgccagagataatggtgcaccttctcgatatcattcggggaggcggtcggatttacacggtatccccggggatccaaatggctggtgagccgtttgatggcaccgccctttccgcctgcatcccagccctcaaatcccaggaccaccggaattctcaggcggtagatctcgctgtgcagaaactccagacgcttctgaaggcggtcgatctcctttttatactcttcttttgtcagagtctttgtcagatccacacccgaaagcacaccgtttaaatacttgtcttccttcaccgaaggatttttaggtgtttccggcttcggagcctctttttccctcaaagccgcctcgaaacggtccgccacaagcgtcatgatcttagccgcggcgtaatccttgtccgtcgcctcaatgatagaccaaggcgcgcgctccgtgtcggtcttttgaagcatctcctcgttgatctccagataacggctgtattccttatttctcctccagtcatcctttgtcacacgccaggacgtctccttagaatcctccagctttttgaagcgtttcttctgctcttcctgggaaatatagaggaacagcttgataattaccattccgccgtcatccagctggcgctcgaacgacaggatatcctgaaacgcctccggcagattcttctccctgatctgaccgtcaaaccgctcaatcgtcacctgacggtaccagctgcggtcaaagatggcgatccggccgtcggccggcgtcttggtccagaatctccacaggaacgggcgcagctgttcttcctcggtagccttgctgttggcaaagacctcgaatcctctgggatccagcgcctggatcagccggttgatctgcgttccttttccggctgcacccatgccttcgaacacaatcatgacgggaattcccgccgttctcagttcccgctgtaaaaggcccagtctttcgctctgctctccgatgacctgcttatacgtatctttatccattttctttgataaatcaattttttccagcataacccgttcctccttcaatccatcttatccagccgccggagacttcacctcttaagcttctgttttctcaaataccccggatgcttcttttatggcctcacttaagcttccgtcttttcgaatacctttgcaatatccttcataacctcactcacctttatcatctgcggacattccttctcacagtgatggcaggagcggcagtcaccggccttcttttccagcgcagcgtacgcctcctttgcctcttcttcccgatgggcggccgtcatgttgtacagggagaatatctgcggaatatccagtccaaaaggacacggcatacagtatctgcagccggtacatcccactaaagccatggaatcaaagacgcgttttgcttccttcaccacttctttgtcccgctccgcagccatgcccacgctgcttctcttcgcatactccagattctcctccacctgcttttcatcgctcattccgctgagcagcagactgacctccggctggtcccaaaggaaatccagcgcatattccacaggagacttatcctccggaaatacctttttcagatggggcgccggattggccagcctgccgcccagtaaaggctccatgatcacaactccaagacctttggaagcggcgtactttaatccttttcttcctgcctgatgatcaatgtccacgtaattatactgaatctggcagaaatcccatccatcataataatctatgatatcctgaaacacctcatatgaatcatggaaggaaaatccaagataacggatttttccagcctctcttgctttttccatccgtttcaccagttcgaatggttttaccttatcctccatgcgttcaccgctcagtgcgtgaagcagataaaaatcgatatgatccgtattcagcttctccagctgctcgtccagcagtgtctcaaaatcctccgccttttccagcttccatacaggacatttggttgcaagatacgttttctccctgtagccgtcagccagcgcttttcccacgatcttctcgctctctccctggtggtatggataagcagtgtcgatataattcacgccctcatcgatggcatgacggatcatggcaatggcgcgttcctcagccaccgtctcgtcatgaagaatcggcaatctcatcgttccaaaccccagtgccgacacttgaattcctgtctttccaaacttacgatactgcatcttagtcctccctgatgtataatatttttgttctattttaccacatatttcctgcattctaaagtattttctgaatgtaaccggatatttccccgtaccggttgtaaaacagttacatttctggtaaaatagggtatcaacaaaagaaagaggtgactgttatgaaaaaatacgtttgtgagccatgcggatacatatatgatccggcggcaggtgatccggataacggaatcgatccaggcacagcttttgaagatcttccggaggattgggtatgtccgctctgcggtatgggaaaagatgtatttgtcccggaagattaaatattccatgtaagacgacagaaaaccggtccgcacaggcgcttaagccatcgtgcggaccggtttttctgtccggatattccggatatatgaatacttaaatttcagttgagatgaagatatcgtagattgccctgatggccgcttcaaagtctgcattcttaacgccgatgatgatgtttaactcgctggagccctggtcgatcatcttcacgttgacgcgggcgtgggccagcgcggaaaagattcttcccgccgtacctctcgtagccttcatgccgcgtcccacgacagcgattaatgccagatcggattccagttccacataatcgggctcgactgcacggtgaatccccgcaatcacggactgttcgtattcctcaaattcagactgatggacaaatacggtcatggtatcgattcccgacggcatatgctcgaaggagatgccgtatttttcaaatacctccagaaccttgcggccaaaccctacctcggcgttcatcatggctttctcaatgttgatggagcagaagcccttcttgccggcaactcccgttatggtatagcgcggcttacggcaggtgctctccacgatcagagttcccttctcctccggcctgttggtgttgcggatattaatcggaattccctcttttctgaccgggaagatggcgtcctcgtgcaggacactggctcccatataggccagctcgcgaagctccctgtatgtaatcgtctcaataacctcgggatcagcgatgatgcggggatcagctacgaggaaaccggagacatcggtccagttttcatacatgtcggcatgaatggcttttgccacaatggaaccggtgacatcggatccgcctctggagaaagtacggatactgccgtcgtgagtggctccgtagaatcccggaatcaccgcgcgttccacgtgctctaagcgttcttccagctcacggttggtagtttccgcctcgaagctgccgtcttcgtcgaaaaagatgacctcagccgcatcaatgaactcgtagcctaaatagctggccatgacaatgccgtttaagtattctcctctggatgccgcgtaatcacggccagccttctttaagaaattttcctcaatagtctcgaattcatgatccagatttaaatttaaatccagcccgtcgataatctctacgtaacggctcttaatcttctccagaatctttttgtagctttttccctctgccgccgcatcgtagcactgatacagcatatccgtaaccttttcgtccttgtcgtttctcttgcccggcgctgacggtaccacatagcgtctgctcttatcggatcgtataatgtccccaaccttcttaaactgtcttgcactggccagagaactgccgccgaatttcacaacctttttcatgtcttctttctcctctgttacatatccataaaatcaattttatttaacggaaataatatcgtacttgcaggaagctgtcaagtattttgtaaaacggctttttccgcctcctgacgggccgccagccgtttatgctgcttcagccagccgcctgacgccatgcgcccggcatagacaacgcccctcacagcccagtccagaaccatggcaatccagactccgatcagccccatgccgaggtacctgcccagaacgaagctcatggcgatcctgcacagaagcatggacataatggtgatgcacatggcaaatgttacatcatctgccgcacgcagcgcattgggcagtgcaaaggaaggcgcccagatcagcacacagcataacccatgaagcgtgcagatgattctcgccagctctgccgtctgctccgatacgtgatagaggccgatgatatgcggcagaaataccagcatcggaaaacagatgagaaaatgggctcccataatgagaaaaataaagttcttcgcataccgtttcgcctcccggtaccgctttgcacccacggcctgccctaccaccgtgatcatggccagagaaatggcgctgccgggaatcacctgaaatgagcagatggtacccgccaccgcattggcggcaatggatgtcgtaccaaagctggagaccagccccgccacgagaagcttaccgccctgaaagagaccgttttccactcccatgggaaccccgatccccatgatccgccggataacagccggatgaaagcccagatgaaagttcttatcgatgtgaagcggaagcttcggattgcggatcacccacaccagaatgaccgccgcagtgatccgtgacagcagcgtggagattccggcccctgccacctccagatgaaagccatagatcagaattgcattccccgcaatgttaatggcgttcatcagcatggagaccttcatggatatcccggaattccccatggaacggcagatggccgccgacccgttatataccgccagaaacgggaaagacagtgccgtcagatagtagtatgtcctggcgtaattcataacggacggttcgatcgttccgtagatcgtccgcagaatctggtagttgaacagtaaggacaacaccattaaaaccgatgaaaatatcagaaccacaaaaatcagctgattggaggccttcagcgcctcgtcccggttttcatcccccagctcctgtgccgctatgacagcgcctccggtagccatggctgtaaacacgttaatcagcagaatattgagtgtatccacaagggaaatccccgaaactgcagtctctcccactccggccaccatgatcgtatccgccattcccactaaaacggcgagaaactgttcaatgatcagcggcaggatcagccgcctgatggccgtcttcgaaaatatcggtgcttcttccatctctctctcccttttgtatccttccagccggcttcttctgatcggtcagaagcatccggagaattcgtctgttagccgcgtcgttttgttcgtctgacgcggacatttgtcctgaaaaaaattcgtcccgatccgcttctccacagatatccacccccagaatccggcggctgtccaggatgcggtacgccctctccagctgctccagcgtcatggtgccctgatcccagtctgtcaccacttcttcccgcccgaacgcgtccttgtcgatggacagatacacggcctccgatgcctccgcttcaaggattcccagccatgtgtcacctgcctccgccatgctttccgaaatgatccgcacacggccggcatagtccggttctgcggtatctgccagtgaatccgcgacaccgatcagaaccacatttttgaggaacggcagggcgtccagagcctctttgatccagcagccgcaggacagaagtccggcgaacatggacggcttcatatccgtatgatgatcgaacaccaccagagtaaacggctcccggatatgtttcatcagcagatagcttaagtagtggaaattgcctccgtctataaaatgaatccagccttccagcccgctgatccgcgcatcaatctcctccctggaagtctcatcacagaatccgttgaccccggacaaatccgaacagtcaatccattcacagtccctgtctttatagaagctttgcctttcatacactcctgaaaaattcagcactgaaattgatttcatcgctcttttctcctggtttttctcttctttcaggcgctactgagcgcccagtttttccatctcatcgttgacagaagcctcgcaggagcgcatggcctcaatcgtcttttcaaacagctcctccagcgtccagccgagcctctcggccccctgtgcaatcacgtcacgggaacagccggccgcgaaccgtttatccttatatttcttctttaaactggagacctccatatccatcacgctctttgacggacgcattctggcagcagctccgatcaggcctgtgagttcgtctgacgcgaacagtaccttctccatctcatgctccggttccacatcggagacgagtccgtaaccgtggctcacaaccgcgtgaacaagctccggttctgcctggatctctgccagaagttccggcgcctttctgcagtgctcctccgggtagttttcaaaatccacatcgtgaaggagtccggcaatcccccagaaatcctcatcttccccgtatcccagttccctggcgtaccagcgcatggtaccttccaccgtaagtccgtgaaggatatggaaggactccttattgtatttcataagaagggaaagcgcctggtctctcgttacattagttttcatatttctgtcactcctctgtcatttgattacgattcagttgtgtaatattgatgctgccatccatcatatcactgctgatttccgatatcaagcttgaaatgccgctttctcccgctactttaatcccatgcttcttaagaagccgcgccgtcaccccgtctccggcagtctttacgccggaaaaggtgccgtcgtagatcaccccgctgccgcaggaggggctgcgttcctttaaaatggcgtaccggcagccatacagcttcgcgatcttaagggcttcctcccctccttgttcgaaatattccgtgacatcgcagcccttccggttcatcacgcggacctgcccgccgtcccgccggcattcggctggttccctgggggtccccagccctcccatctgctccggacaaaccggaatcagctcatactcttttaacagctccagcacctcatcacgccggccgttctttccgtcatagcggcagtttacgcccaacagacaggcgctgaccagaattcttatatttttcttatccatcaaaaagcctccgttccttatcctcaccggttccctgcatcactttttgggggcagtaataaccggttttcatcatgtcccgcatcttccatcatggaatccatatagctgccgaaaaagagctctgctcctttttctttccaaagcttccagccaggtgtatctgccatttccttttccggctttatcatacctgcaaagtaattccggttcatctccacggccagttccgtcatctgcgcccgctcttcctctgatacactcagtgcttccagctccttcttcatcttttttcgcgtgcactcgtcaaaatatgcctgggacagttcttcgaaattctcaaaatccccggcaataccggctttttcccgatcccatcgcccgacatgcaccttccgggtttcatacgatgtgcttccatctgaaccaacggttaaaacaccataccggttcggggccacggtaagggagccggttgcaatgtcatagagccctccgttctccgcaatatgctggatatggacatggccgcttacgtttagaaccaccccatggcctttcagaaggcgctccagctcctcgtgattgtccaacaggaatccccgagacaaaagcttattctgtgccagaacattctgatgggtcaccgtgatcacggctgcacctgcctcctccgcgcgttccatctgccgctctgcccactgaagcgtagaatcctttatacggccgggcgcatcctccgtattggcatcaagcagcagaatccagacccgttccgacagctgatacagaaagctgagggaatctccatccgtttccgccgcattccggtaaccaagctgtttataaagatcgcggaattccacgccgttcacccgctccgtccttgttaccgtctctgcctcaaaactggcggcaaagggatagctgatatcatgatttcccggcagcacaaggaccgggatcccctgttcctgaagacaggacagtttttctgccagttcctcatggctcgccttctctccgttaaagctgagatcaccgcttaagattaccgcatccgggcgaagcttttccatatccgtcacaaaggcgtctacgatttccggagcatactggaccagctttccgtctccgttggcagccattctcataaaaccggttccgtagtcggtaagctccggcgataaataatgcagatctgtggcagtgacgattgtgaaagaagaagtctctttctccgccgacggtctgctgcttccacagcctgcaagcgcggcacagagaaaggacagaactacaatctgtgtttttttaatcataggcacacccaccagtctatcataattttgcttttcaaacagctttattatatcaaacctgtattcacggcacaagcttgtaaaagctgcagcgctgccttataatgaaatctgcagcttcatacaaccatctcagaggatatgtaaaatcatgaaaaagaaacacagcccgttttttactaaatctaaaatgaaacatctgatttctgatgccggacacagtctgccaggaatatttctttgtgccctctttctgtgcatcatgactgccgtcaccggaaaagtatgccctgcccggcttttactgggaattccatgccccggatgcggccttacacgagccgcagttctgctgttaaaaggggatttccgtggcagccttctgtccaacccatttctcctgccgctgctggccggaggactcttatttttgtatgaacattacatccttgaaagaaaagcacgcctgttttccgcctgcatagccgtctgtatcttccttatggtggttttttacctcatccgcatgaaatattggtttcccaaccgcccgcccatgatctatgagccccagaacctgctgcacctgctttttacagccctgaaatcccgtatctgcccacgttccgcatgaggcgccgtttcccgccccggtctgtcgaataaaaggaatagacaaatttcgccattatatgatataattttaacgatagctgtcataaattacaggaggtactgagtatggaaaacaacacaatgatgacagaccctaataaggctgtcatgaccatgggggaatggctgatcacgttaatcgttctggctatcccatgtgtcaatgtaatcatgtattttgtctgggcatttggcaatggaaatgagaacaggaagaatttctgccgcgccggactgatcgttatggcaataggtatcgtgctgtcacttgtcctatacgctgtagtcggcgcaggcctggctgctgcactgagtgcaggctattaagttttatcagaccgcatcaccaaataaggggctgccgcaccaatgattattcaatcatccgggcggcagccccttttgttttatcctctctattgtgtcagcctctcttttgcatcaccgcatcaatgattccatacgcctttgcctcttctgcactcatgaagtgatcccgctccgtatcccgccatatctcctcctctgttctccccgtattttccgccagaatccggttcagccttctcttatcccgctgcagcttctcggaatagatctggatgtccgtcgcttttcctccgatcttctccacggccggctggtgtatcataatctcagcattgggaagcgcaaaccgttttcccttcgtacctccggccagcaaaaatgcgccgaaactggctgccagcccgatacagattgtcgatacgtcacaccggatataacgcatcgtatcgtatattgccagaccggccgttatggaaccgccaggactgttaatatagaaagaaatgtccttcgatggatcctcggcctccagaaacagcatctgtgccaccgccagcctggccgtctcatcgtttacttcttcgcccaaaaagataattctgtctttcagcaggcgtgaaaagaggtcgtaactgcgttcccctttcgacgtcgtctcgatcacattcggtaccagactcatgccgcgcacctccagagatctgttctcgtacggcaggcggtatttcctgtcttcttctgttttgtctgttcacgcagcggcgtaaaatgctttcgctcccggtaggccatcggcgtacagccgtaaacccgccgaaacgccagggtaaacgcctgctgggactgataatccgcctcacaggatatttcaacgattgtcttatccgtttccaccagctttctggctgcttccgtcagcctccgttccatgatatagcggtgaatggtacagcctgttacctctgaaaatatccggttcaaataaaaacgggaatatcccgtatgcgcttccattgcttccagactcagactttccccggattccatctttttctcaacagaatccaggatttcttttacaattctgttttttccatccatatgtgaatgcacctcctgatttgatccaatacaaaaccagttttccaatggaaaaacagttctgttttctcccattatagcaggcagtttcccccctgtcttaataaaaaatgatgttttcgctaaaaattcattcatccggttatactataatacaatcgaccacgttacagttcacgggctgtgaggcgccgggcggaccgtgaactgtaactcgaccgcttaattcatactaagttcgtataaaaatacaatgacattttgccgattttgtagtatacttcttacgaaattataagtgtgagattatgacgaaaggatggcttcattatgtactgtgtaaaaaatattaaagatgacctgttttgggtcggcggaagcgaccgaaggctcgccctgtttgaaaacgcataccccataccaaacgggatctcctataattcttatcttctgttagatgaaaaaaccgttctcttcgacacggtcgaccgggcaatcaccgggcagtttttggaaaatgtggaatccgttctggcaggaagaacgctggactatgtgattgtcaatcacatggaaccggaccactgcgccacactgggtgagctgatcagacgataccctgacatctccgtggtctgcaacgcgaagacgattccgatcatcaaacagttctatgaatttgatatcgataccagagccgtgatcgtgaaagaaaacgacaccttctgttccggcagacataccttcaccttcctgatggcccctatggtacactggccggaggtcatggtgacgtatgacaccacggacaagatccttttctccgcagatgctttcggtaccttcggcgccatgaacggcaacttatttgcggatgaactctatttcgagcgtgactggctggcagacgccagaagatactataccaacatcgtcggcaaatacggcgcatcggttcagacgctgcttaagaaggcggccgcactggacatcgaagtcctctgcccgcttcacggtcccgtctggaggtccgacatcgcatggtacgtggacaagtatttaacctggagcagctatgagccggaagagaaagccgtcatgatcgcatacggttccatctacggcaacacggaaaatgcagcaaatattctggcctgccggctggcagaccgcggtgtgaagaacatcgtcatgtacgacgtctcctccacgcatccatccgtcatcatctccgaggccttccgctgcagccacctcatattcgcttccgcaacgtataatggcggcatcttcagctgtatggagcacctgctcctcgatttaaaggctcacaatcttcagaaccgcaccgtggcactcctggaaaatggttcctggggcgtaacagccggacgtaagatgggggagatcatctccgagatgaagaacatgaccatactcgatgaaaccatcacgatcaaatcctccttaaaggaagaccagatggcggaactcggcgctctggcaaatataattgtagattccatgaactagcgggtccggtttgacggactctcctgacaatacttttaaagccctgtccggaactgcgtggtctgacacgccttcccggacagggctttaaaagtataaaagtaaattcaccagccagaccacctcagtaaaaaatatccttccatcccgatccgtcagcacggcctttgtaccgcggaaccggtaatgatgcggccgtctatcggttatcagccgctaatcattcgcgtatgtctgcacttataagccttcacagcctcttccagcttctctaaaaaggcttcctctccgaacgtattgagcttaaagaacatggcctggcttcccccggatgtgatggcggtcagcctgagttccccttcatattccaggatcgtcacattcaggctgactcggttgcctcccatatagctgtacctctcatataccatcgtacagcaccgcacgccgttgatctcctcctcatgttcgtcctcgaacgatgcagatacactgccgtttaaaatttcattttttaaatattttttgaaatgatccagattccctgttaagtcagcttcaaattttgccatgtatctcactcccttctgccgcagccggcgtatcatcatagaccgcgaacggtatccactccaccggctctcctctgttctgaatggcgtctgcaaaagcttccacttcttctttcgaattctttaagagtccaaattctcccggtttcagtttgaaccgtttcaccagttccttctgaagagaattgcacaggtatgtatgaaaacctgagatatcccatccaagaatatcaaagccgagaaaatgacgttctgcggtccgagacgctacatttttagggattatcctgtcctccatggaaggcagatgcgcctcttccagcgcaatcccgatcagacggtatccccggtccactcccttttgtttagaaaaataacgcctgtatatttcgtctgcatcctgtttgaacacgaaacggctgtccgtatccagccggtcctccccaaacagccgcagggtttcttctgaaaaatctataaattcccttttctccagtcccagccgcttccggtattcctctctttgcctttcatcattggtcatgcaggaaaatggctgcggctccacatcacagatgcagctgctggcagtcagaatccattgggaaaaatcctttagaaattccggacaccggcagggacgtataatataatagccgtaatctacatacattttttgtgtccttccttttctgggtctattctaccagatatcttttttccatgtctttcattttccttaatatttgcgctataacatttgtcatataagtgaaggaaatctttctttttccggctggcgtttatgactatggggaagatgtgaggtggcgggattgggtctctgatgatgaaaaaggggttgtccagaaaatgtaattcagcagcagtccacaaataagtattttaaaagggtgtcgcaaaatcatcaaaacagatgattgagcggcaccctcaattttaatgaacagattactcctgccatggctgtgtcaagtcaataataccctttcctccatttcaaataccactcaggggtattctttgacagtctgacaatctccccgcatttatagatagcaaaccggcgaaattcatttgtgttatcatatagtgcggccaagtcacacagaccaataacttcgtgaagatttctaaagctttctccgaatcttttctcaacatccctgtctggtatcccatgaccacccattttcactcgctcagcaattctctgcttcgcgatctctggagaatccactccaacatagtgtaattctatcccatatcccaattgctttgccctgtgtattgttcgcagtatagtatgtccgcacagagtagtctcctgattaaatgtaatcccttcctgtaagtaagaattcaatcgttcaattgcaattctgcctgccttcattaaatccgcagtatttctccaatctccaaattctcttaatatttcatcggtattgatccgcggcatcgtatcctgataatgtgttgtcctgtataaagttgattttcctgccccattaacgccggcatacaaaatgtattttttcatttagaacctcttttgggctattactttcttttgctttctctgcaaaataaaatcacttagcatagaaaaaaaatcctgctcttcttctgtctctgcatttaaaaccagctccatggtttcgtctatatccatatctttacattcctcatataattttctggcagcttcagccttcgacataaaactttcctcctttttcttctaaaaatatatagaagttacgctgaaagtcgaatttaacgaccgttcagcccgcaccaccagatttggcagtgatatccacttgggttctgtatttcactcaatccacgccaccacgcaggcggcgaaccgaaagtatctcatgtcattaaaccatatattattacaactgtaacatttattatacaggaaaacgttttaaatgaaaagacagaaagcgcattttcttcacgtctgtgttttgccagacagttctttcactccaaatgccatgttcataagatgcatacaccgcttgtatatccctttctaaaatgatatactggtaactgctcagcaacacatctccaaagctgagcgtataccttaaaacggccctaacaggcgtattccggtacaaatcacagaagctttttgataagggtgagaatgatgtgcagaaataaaaagaaaaacaacgatgtatcgctccatgcaaagccggcagaatcagtgacctttgcatggagtagctgcagtcgctgatcaagtatggctttgctgcctgccaataccaaaacagggagtgaagcgctatgaaatatatcaatgcggccgcggttcttcccgcctcgctggtggaagagctgcaaaattacgttcagtccggatatctctatgttccggccagagagggccagcacagggcctggggcgaacggaacggaggccgggaggaactgaggaaacgcaaccgggatattcttgatgcctggcagaatggagtgtccatggagaccctggcggaccagtactgcctctctatacatgccatacggaaaatcatctatcaaaaatagttatggaaggactgcggaaaacagtccttcttttttatacaaaacagtacagaagcgactggtagattgagatttcacagggtttcgggtatgcttaaagcaaaggccagtaagaaaaagccagaaagaaaagaggttgtttcagatgaacatttacgatattgcacagatgggatacggggaagccgatatcacaccggaaactgctgttgaactggtcggatttttccgtccggacaatcactcaaagggcgtccgtgatcccttgaagctccagacaatggtatggaaatacaggggagaaaccgcctgcctgatcaccctggacagcctcggttttacggtccaattatccagtgtcctgcggggcctcattgcggacctgcttcatacgggagccgatcacgttatggctgcattttcccatacacattccgccccgaacgccgcagaggaaccggaatactttgatttcgtatgccgcatggcccagaatgctgtaaaagatgcgctgaagggcctgtccccggcctttgcttcatggggtatcggagaaaacagtgtggggctgaaccgcagaacggattctgcagacttcgacaaccggcttgggatcctgtctgtgaccacaccggaaaacggatctcccagggtactgctgctgcgggtcactgcccatgccaacattctctccagcgacaactatctcatatcagccgactacttcggcattacaagagagcggctggaggcgcgcttcggctgcaaaatcatgatgatacaaggcgcctccggagacgtacggccccggtttcatcaggaaaacacagaatatctggagatccacagcttcgaagcggcagaaaagggattttcagaagaatatcagaaacgataccgtgttcagagcaaaaatgccctggaacagacggcggactccatctgtcaggcagtgtcagccgttcttcccgcaatgacagcaaaaccagtcacccatctgaccatgaagtcggttttcagccattttacagcggatgttccctctctgacgcaggcggagcggattgccggtgaagcgctcaaggaagccggcatcgatggaaccgactggctcagggaagtgaaacgccttaacggtgagggcgtttcacaacagttttcagaggtggagatacagtacttctccctcaatgacggctgtctgtgcgggatagccaatgaagccatgtgcaggatttccattgacgccatggtggcagccggaacgccgctgctctttttaaacggctataccaacggatgcaacagctacttaccgacagccggagaatatgagaaaggcggttatgaggtactctggtcgaatctcgtgtattttccataccacggccgggtcatgccctttaaccgtgatacggccgggcagctcgttgaggaagtggttcagaactggaggaagctccgtgcggattatggttaaaaacggaaaggcggtttactctcccgataccgaatcttttccgctttccggtgttcacctctcgcactgcgctcatactgccggatacaatactccttctgatctgctgtctgcgtaaaatccagtctgctgcgctcctcttccagagcatctgccggcgtctgcgggcgttggctgcaataaggacattccggatcgccgcaccgcagatcgatccactggttacagccgggacaacagaccgcatcatgcttaaaaaacagaatcagcctgcctccgcaggtctcacaaaagccacccgcatacattccggctttcagccactgttttataaattctctttgttttttgtaattcttcgttttcttcttcatttattttcaggttgggccggactggcggcactgtattatatattatgcagtccgggattggcccatataaattctttatgtggatggaatctgctgaaaaactgattccattcccgctgtttctgtagtagaataaaggatggtgcccctgcgcactactgttacaaaactttgatcaatgactacggagcagattaactatggaaaaaagcacgtcttcgaccctgatgacagaggggtccatctggaaaaaaattatcgcatttgctgttcccttatttctcgggaacctttttcaacagctttacaatacagccgattccctgattgtcggcaattttctggggagcaatgcccttgccgccgtcagctcttccggcaacttaatcttccttttggtaggtttctttaacggcatcgcagtcggagccggtgtggtcatcgcccggtattacggcgccggacggcacgatgacgttcagaaggccgttcacactaccattgccttcggccttgccgcaggggcggcgctgaccgtaatcggtgtagtactggcaccgatgattctgctctggatgggaactccggccaatgtacttccggaatccaccgcctatttccgtacatattttgcaggctctctgtctttcgtcatgtacaacgtatttgtcggcatcctgcagtccgtgggggacagccgccacccgctggtctatctgattatatcgtctctcatcaacatcgtgctggatcttgtgctggtgggaatctttcactttggagtggaagccgcggcgcttgccaccattgtctcccagtttgtcagcgcgtttctctgtctgcgccggctcatgagaagtccggcggagtaccgggtctgcctaaagaaaatccggtttgacaccgggctcctgcggcagatcatcgcaaacggtctcccggccggtttccagaactccgttatttctctggctaacgtggtggtccagtccaatatcaatcgtttcgggaaaatggcgatggctggatgcggcgcctattcgaagatcgaaggcttcggattcctgccaatcacctgctttgccatggccctgaccacgttcgtaagccagaatctcggcgccggacagtatgagcgtgcgaaaaagggggccggcttcggtattctctgctccatcatcaccgcggaactggtcggcattttcatctatgccttttctccgctgctcatttccgcctttaacaatgatccgcaggttatcataaatggaacggcccaggcccgcaccgtgaccctgttctattttcttctggcattttcccactgtatcgcgggaattctccgcggcgccggaaaatccacggttcccatgctggttatgatggtctgctggtgcatcatccgggtgacgtacatcactgtaaccgttcactttattccggatatccgcgtggtattctgggcctatccgctgacctggttcctgagttcggtcgtctttctccgctatttcctgaagggtaactgggtacacggctttgagcaataggaactctgtcacatgtttcggaacacaggtatgtacaggatgagcgtcgcggccatgaccacggcgcagacagcgatcagcgcattcgccgccgcgactgggatatggggcacgagaatgagaacaaacatgacgacaaacagcagcgccgtacacacttttccaaaccacatggcgccgtcaagctttttgccctctctcagcttcaccaggcccataaccgccatgaagccttccttgaccacaaagagtatcaccagaactgccatatacggatagcgtgtccacaggcataagagaatggccccgtgcgtcatcttatcggcaaacgggtccagaaatttgccgaattccgtaatcatattgaatttccgggcaaccagcccgtcaagcatgtccgtaatggacgagattcccatgacggccgccgcgatgtaatagccgcggtccgtctccgcatggagataaagagatacgaagaccgggatcatcagaagccggaagtatcccatgagatttggaatggataacagttccttcctggtaaattttttcattttgcatcactcctatccggcgatttttcggtgccagccagtaaattatgtaaagcccttcggatcatacactccatttcaccggggcttctctccggttcttcgtaaagccatttcatcataatattccataagcctcccatgttaaaaaacagacagtactccagctcttctccgctcatggtttcgttccagtacgactgcagccggctgtaaatttcgggccagaatgtgttggagacctcgatgagacagcagatcttatcatccctgcatacagaccgcagaaatgtcttatgctctttccagaacgaaaaatacacctctgtgatgtgcgccgcaaaataggcggtatccctttccagataccggacatactcccggcagaggcgctcacagcagcttcgaaacaggtcttccttcgaggaataatttctataaaatgtccgccttgacaaatccgcccgtctgcatagctccactaccgtgatctcttcgaacttcttttctgtcatcagagccgtaaacgcgtccatcagccacgtccgggactgccaaacgaccggattattcgtctctttcatctctacacccccgtttctctgatccttcttaccggattaattttatagtggcacaccggcccccctgatgtagcacttgcccgcagggccttgacgctgtcagatacccgcattatactatggaatacgttcagttacaagtacaggaggttgaatgacatggatccaatccacgagagtatcccgcaccggcacgcagtatcccgcggggcagacttgatcccgtccctcatttcccacgggcagatacatctggccgcggactgttcccgctgctgcggcctgtgctgcacagcgctctatttttccaaagtggagggattccccggcgataaggaagccgggattccctgcatccaattatgcgaagatttctcctgcaggattcacagttctctgtccggacgccgactgaagggctgcatcaattacgactgcttcggggcggggcagacagtaacagaaatcgtatttgaggggaagaactggcgtcagcttcctgacccggaggaaatgtttcgtatcttcctcattgaattgaagctgcacgaggcaatgtggtatctggaagaagccgcactgctgcgcccggcagccgcattgagaccccgtatccacgctgcgctcaccggcctggagaagctggcaggcggatcccggcaaaacctgacggaagaagggatccgcgataccatcactgcagccaatggtctgttaaaggagacgataagcctgacgcttgattatgcggcctctcagacgatgccttcgaaaaaaggacgcgctccgcagtctgcccgcagtcactccgcctgttcccgtaaaactcccaaaacgaacggcgccgggcccctgcgctacctgggatatcattttcagggtgcagacttaagcgccatggacttttcctcttcctttctcattgccgctgacttgaagggatgccgtctcttcggaacatgctttctgggaaccgacctgcgggatgccgatcttagaggcaccgatttaagggatgctttcttcctcacacagatgcagataaatgccgcaaaaggcagccgggatacccgtctgccttcctggttaaaaatgcctgatcactggaactctgcctgatcatccggaacagttcagtcctgcccgccggaacatttcgccgcgtcaatggcaagtacgatcatcagacagaggagcgcatcctcttcccttacaatatcgagaacgtacgtgtctgtaaagcggagaaattccttactggctgtcatgatcagactgcctgagctgtcttttacacgatagtcccattccagccagtctccgtccaccgtccagccgttgcagtccagtgtgaatttaggctttaaaaaggtcagttccttgcggatttctccgatctcctgtccgtttatgtacatcaggaacttaggcagaaaggtgagcactctctcctgtacggttccgatatgattatcaaaacggtcatagatttccagcaaatggccccagcttaattttccttttaccgtattgacggtatttccagcctcgtcatagatgtcataactgtcaaaccaggaaaacagccgctgtttaaatagtaattgcatgatcgttcctccctgttatgagcactcagcggtttggccgctgcctgcggcgctttttgacttggcacgggtcacagccactccgtcaccttatcgacgaaacagactccgtctaaatgatccagctcgtggcagaaacatttggccatctcatcgattccggtcagagtgacctcttctccattttcatccagcgccttcacgattacggtctggggccgaatggtccttccgtatttctccggaaagcttaagcagccttcgatgcagtcctgttcccctgtctgttccacaatcactggatttaccagcttcatgagcccagttcccatatcgatgacgacaaggcgttttaaaattcctacctggttcgctgcgattgctgctccgttaggtgtcgcatgaagcgtatctgtcatatcgttaaggatttctcggatccggtcatccacttctttcacttctttgcatttctttctcagtatctcgtctccgtcgtaacgcatgtttaatactgccatgattccactctcctgcttttatattttattcgctgcggtgtctgtccatttcaggacggcgctcctttacatgctgaacggccgtggtttttcccacggccatacagccctgcagcgatagaattactgccatataccgttcctccctacagccagatatctcttccgttccatgtcacactctctgcatctccctcgtcgaggcaccagcccaaaaggctggccacaaatccaggtgtaacaggaaaagcttccataaccggctcgtcggctttctctgtatcctggcctgcgtccggctccctccctgcatccagtttcggaatccggtaccgctgccagcagccgctcgtcgttctgttcttaaatactcttccgatggataccagataccgccgctccccgttctgttccgtgggatagagcacaatcagccctttgtcctccgatgcgatatgcagtacgggtctgtcataatcatcatcccgctttacccaccagtaataggtgctgtccccatagattaacgatcttttatgcttctttgcaattgccacaaaaaacctcccggaatttctccgcgttattccagccgcttttcctcctgctccatctggcgtcggcacacagccaggactggatagagaatgacggccagagcaaggcctccaaggccctgaatcaaattcgacggcacgctggccagggctgctgccattccataataacaggtttcatagagccagtacccgcaggctacaaacaccatgtcagtcagccctccgatcaccacaccgacggtccgttttccggccgtcgccgaaagtctctgaaatacaaggccgcagcaaaaagcggtcagtcctttaatcagaaaggtggccggcacgtacagcagatatccgcccaggaaatccgccagcgcggaaccgattcctgctgacaggagcccctggaccggtccaagaaagattcccgaaagaatcaccagcgcatctcccggatggatatatccgttcgtacccggtgtcggaatccggatcaccatcgtcgctgtacataccagcgccataaacagcgccgtcatcaccatttttctggtattattgttcgttttcatacaaagtctcccttccggttttcaatgataatgcacttactataaaccgaaaatggactgttttaaatatccagtttttaacttttcagcaatgccagttttgttttccagccgcacgcctgctctacctctgttttattgtatcataaacataaaattcgtgaaagacctcattcggtgttttgaggtacttttgtcctgagttgttacaggtcgcagcccatcaaacggcagcagcactggaagattttttctttattctgcgaattttataattttgccaataggagaccaacgaaaagcttccactggggcatcgcgaacaagaaagacaataagataattggggaattctgggtctacttaatcgaaaacgaccggatggccaaggtttcctaccgcctctcgcctgcctgtcagggaaatggcctcatgacggaaaccctgaaaagcgtggtggatttctgcttcacacacacggaacttcagaggctctggaccgatgtggacgtgagaaacactgcctcctgcaaaacgctggaaaaggccggcttcacacgggagggctgcatccgacagggaaaaatggtctcttcctggtgcgactactatttatacggtctgctgaaaacagaccttctcccggaacacgaaagtcaggcgtaacgcgatctaaacagattaccggactcgcgcgacggggcgtggattgaaccaatgaacagtacgggttttcctgtcaaacaaacaatgcctgcgtcatacctccgcgtttcaactccgcgttgcggtatgatgcaggcctattttattctttgattatggaaagcatgacagagatatcttcagcagccatttcggccttcgatttttcaattaaaatattctgcccggtcataatgtaggaaggcataatgcgtataccctgataccagaattcactctttcgtatcttataggtggacaccggcggaatcacatgtttcccaatggcctttttacttatcatgttaaaggcttttttcgccacatcccccatcaacataatcactttcacatggggaaagagagacagctcccactccagatacggcagacttttttcaatgctgcttctctcaatggccggggccgtcttcggcattttcactgcgttcgtaaggtaaatgccctgctcaagcagttctcccgcactgtccgcctgtgctccggccttctggaacagcggaatcgccgtcgatagataggccgccccgtcaccgccgtaaaagtcatccgccgggtttgcgggcacaacctcattaatcaaaactgcccgaatcctctcgggcgtcacctccacatcctgaaatacaaatgcttcatgatcaccatttcttttttccagttcttctctgatattcatcatttctcctcataatgctgcagtgcagacttcagtctcttttccaccgcccgctttaaagaaagcggactcagcacagtcactttatctccaaaggacatcagaaagccgtacagccactcattgtccggtatatcagcccggacagtaagctccccgtcatattccgtaaccgcccggtcatcgaacacatcatacactctggaggccgcttcctccgggaaacgcagaaccacggagacaggttccttctcattctcccatcgtgtcagatccggctccgttccttccgggatccggtcaaactggatccctgtcagcacaatctccttgatccgcgataaccggaacagccggcagtcttctctggccaggcaccacccatacagataccacgccttgtccttatagatcagccgatacgggcggcagtcccgttcactgaccattccattggagccatagtacttaaaatggatctgccgtctcgtcataactgcctgtttcagtacgttaaaatccatccgttccctctccgggtcgcttccccagcgtgaaacatccacttcgatccagctcgtatccgccatctgaaacgtggccctcagcttcgataagaccgtctccatatcagaattctgaaccgccgccagactctgcagaccaaagagaatatccctcatctcctcttccgaaagcagcgatttctccagcacaaatctgtccagcagacgaattcccccgcttctccccgccaccgaatagaccggaacccctgccccgctgatcctgtcaatgtcccggtaaatcgtcctcaccgacacctcaaacttctccgccagctccggcgcagtggcctgtcccttttccatcaggtagtaaataattttgaacagccggctctctgtcactgctatcacctcgttttcattgtatcagataaaacctgacacgctatgtcaatcatagtaatcctgcaacgcgaattaagaaaaaatttcccttgaccttatcacagtgggaaggtgtacaatcttctcagaaccggttctgtacctgacaacactatatcaatacaacacaatttcactttgggaggttcctatgtttaccattggagaattttcaaaattctgctgcatctccgcaaggatgctgcgccattacgaccacatcggactgctgcatccggccgccacggatgagcagaacggttaccgctactatgacagcagccagatccccacatttcagcgaatcgagaagctgaagcgatacggcttctcgctggccgaaatcaaacggctgctgacgcttacggaggcagagttaaatatccagattctgctccagtacgagcgggtaaaagaacaggcggccagcctgacggagacgctcacctgtatggaacgggatatctcccattttaaggagggcataaccatgaatcggaactatcatatcattgtcatgaacacaccggagcagcgcgtcttctccgtaaaacgcaccatcgccatcagggcccgggatatacacggactcatctctgacctcatggcacaggcaaaggaacgcggcctgcaccgcacgggcccctgtcagctggtctatatggggagcgaattcaacgaagacatgatggaggtggaagcacagctccaggtagcggaagctcatccggacacgaagcttctgccggactccctctctgtcaccacgatccatcaggggccgctggaggagatccacaccgggtatcaggcgatctgtcaatatctggacgaacatccggaatatcagctcaccggaatcagcattgagcggtatctaaaggatgaaactatggtctcttccgcagaagaactggagacagcgattctgtttccggtagtaaaggcataacccgtttccatttttaatttcgaagaaagcggtccggaaaatcctgttatattttccggaccgctttcttctgtccagaggctgattaccataatgaccaggcctcgtgccttaaatgtccaccttcctgctgtcaaaatagacaaaccggtcgatggcctccaaaatatccttaaaatcctctctcggcgccagttctatatactttctcagaatctccgtctcctgtttcttatacggcccataaaaaatgtcatacaggttatgacctctcatatagatcttgaactcttccatatgggctttcagttcctccaccgaagagatggtgccacccagcacctccgtcagatggcggcccgactgcaggcggtataaatactcctgccatttggaaaagagcgtctcatagaacgcctcctcactcttcacgattccaagctctgccataatctcaggatttaagaaataattttcaaaggaataatatttaagaatcagcacattcctccttgtgaccttcggcagcttgtcgacatcctccaggctccgctcgtcataataccggcacagctggcccgccagctcctccggattctttccgtctccgtcacggatcatcagaaactgatcccgcagatagacctgattcatatattttaagttggcgtaagtcttgatattggtacagctgttcgtcgttataatcgaaatccgggacagattaccgtttgcatcgtggatttccgaataatacttttccagcagaaggggcagacggctcttatcctgctttccctccacaataaaaacaaagcttacattcaggaaatcgctggccccatatccgagatcgtctaaaatcgcatcgatatccgtatgtctgcgtaccacggaatagtcctcctcgtccagcaccacctggcggatctgacggctggtaaagttaaacagcatattgggggaatgcgtggtaaagattacctggttcttcttcgacagctgatacagtatctcgctggatatcttctgtaaatggggatggagaaatatctccgggtcttccacaatgatcacgctgggaatccgcttctcatcgtccgtatacgtctgaagcagcgacagcatataaatgctcttcatgcctccgctcagattcccgatgggattcagtctcccgtgttcctcgtgatacgtctcagccgtcacatgaaacatctcatccgggttgcagtttaaggtgaacttgatttcctcgaagccgccgtttttccggtaattggcgttgaccttctccgtaaaatctttcaaattcagctggtacatcttatattccagaagcttcgatgtctcgtaaagctttaaatcttccggctttttctgattgatcaggccgatgcactgaaagcactggttgcactcctttgcggcgtcaaacatgcagacgtgggcgcggagtctgatgagctgctcatcctcctggaacataaagagatcatcctgaaactgcttcagctgccgctcggtatcaatataataaatcctgggaaatacctcctggatataccggttgttcttcttatatccatcgtacaggcgggactcccccttccagttaaccacaaaggtaaaggacagggtctcatcctcgcaggacggcagtttcgcacagaaatccctgtaccaggcgtcataccgcttgtactggctcacaatccctgcgcggtgaaacatatgaaggtcatcctctgtaaaattcagggtgatggatatctcaatattctgttttcgctcgttgaagtcgctttcctggatctgataggaacctgccaccgcgcggatggcatccagcaccgaggtctttcccgtattgttctttcctaccagaatcagggcattttcgataccatgaatctccatctcacggatggctttaaaattcctgatgtgaaccgatgtgatctgcatatgcgttcccctttcggtttaagtataggagaagccgccgcaaatttcaagcttcggctgaaaaaatctgcactggcccttcccgcgcttcatactatggattatattctaaattcaggagtggttcttatgttcgattctgccgtagtgcttacccccctgcactatgtttatctcattggcgttctcgtaatcctcgcagtcatgatccttcgaaaagatacccctgccgtctgtatcgcgtttttatttcttctgggcgtcatcggtctaggctccgtcacgggcggcatcatgaccgtatttaattctattctcttcgctgccagagaattcatggaagtcatcgccaccatagccctggtaaccgctctgtccaaatgcttaaaagacttaggcagcgattacctgatgatggttcccatgtcgaaaatcatgaagacgccttccgtcacatggtggattctgggaatcaccatgctgctcttctcactcttcctctggccgtccccttccgtggccttagtcggcgccattatgcttccattcgcagtgaaagccggtctaaaaccgcttgccgccgccatggccatgaatctcttcggccacggaatcgctttaagctatgatttcgtcatccagggggctcctgccgtctccgccggcgccgccggaatctccacatccgatattctcacgcagggccgtcctgttttctgggtcatgggtattgccaccgtaacggccgcatatcttttaaaccgtaagagtatggcagccggagatggcgtctgtgcagaggcgctgccggaggagaggaacacaagaacgaaagcagccattgctgtcgcaattcttactcccgcggcatttctcgccgatattcttctgatgctggcctttgacttaaaaggaggagacgccaccagcatggtctccggcaccgccgtactcgtcatgtgcatcggcgctgtcgccggatttggaaggaagtcgctggagaaggtgactgactatgtgacagacggctttctctttgccataaaaatttttgctcctgtcatcatcatcggtgcgttcttcttccttggcggaaatggtatcaccaccattatgggcagccagtatcagagcggtatcatgaacgactgggccgtctggctggctcacaacgcgccgttaaacaagtatatggccgcgttcatccagatggcggttggtagtctgaccggcctggatggctccggcttctccggtctccccttgacaggcgccctggctcacaccttcggaaccgcggtcggagcctcggtccccgtgctggcttctctcggacagatcaccgccatctttgtaggcggcggtaccatcgtcccctgggggctcatccccgtagccgctatctgcaacgtcagccccttggatctggcccgcaaaaatcttccgccagtcttaatcggctttctttttgcatttataaccggctgccttcttctgtagccgaacctgttaccaacatcacaaatttaaaaatggaggaatctgccatgtgtggaattgcaggcttttatcacccgcatcgcaactacctgaacgaagaagcccgttaccgggatatattaaaagacatggccgcggtgcagaggcatcgcggtcccgatgattccggcgtctttttgaacagacatgccggcctctcccacgcccgcctgtcaatcatagacctggtaaccggccaccagcccatggaaaaggaggtcggaggccgtacattttccattgcctataacggcgagctttataacacggaggagctgagaaaggagctgcaggccctgggacactccttctccaccaccagcgacaccgaggtaattcttaccggctgcatcgaatacggccctgatttcgtcaagcggctgaacggcatctttgcatttgcctgttacgacgccttccacgaccgcgtcattctgttccgcgaccggtcaggtgtcaagccgctcttttatatggtacggggagacgagattctgtttgcgtcagaaataaaagggattctggccgttcccggcatccgtccggagctggaccggaagggactgaacgaagtattctccatcggtcccgccagaacatacggctgcggagtatttgccggtatggaggaagttctgcccggccattttctcatctgttctccggatggcatttcctcccactgctactggaaattagtcagccagccccatgaggacagctacgaagagacgattgaaaagacatcttttctcgttcaggactccataaagcgtcagatggtctccgatgtacccatctgcacgtttctctccgggggagtggattccagcctggtttccgccgtctgcgcagcagagcttaaaaaacagggcaaaaggctgactaccttttcctttgattttacagacaacgataagtattttaaggccaattcctttcagccctctcaggaccgtccgtttgtggaccggatgcagaagtttctcgattccgaccaccactatctggaatgcggcaacaccgatcaggccgaccgcctctgcgattctgtgctggcccacgatctgcctgccatgggagacatcgattcctccatgctgcatttctgctcactggtcaaggaacacaacaaggtggcactgaccggggaatgtgccgatgaaatattcggcggctatccctggtttcataaagaggaatgcttccgggcccacaccttcccgtggactatggatctggaagcaagaaaaatacttctgaaagatgattttctcgattatctgcagatggatgcctatgtaaaggaaacgtatgaacggtccgtatcggagactcccaccctgtccgaagattcgcccacagaggcgcggcgccgtgaaatttcctacttaaatctgcgctggttcatgcagacacttttaaaccgcatggaccgcgccagtatgtactccggtctggaggccagagtgccctttgcagaccataggatcattgaatacgtctggaatgttccctgggacatgaagacaagggacggtctcgtcaaaaatcttctgcgccagtccgggaaaggccttctgcctgatgatatcctgttccgcagaaaatcgccctacccgaagacctacgacacgaattatgagaagctgctcaccagccgtgtccgcgaaatcatgagcgatgcttcctcgcctgtcatgcagtttctggacagaaaaaaactggaaacatttcttaaaagtccctccgattacggaaaaccgtggtacggccagctgatggccggtccgcagatgctggcctatgtgctgcagatcgattactggatgaagacctacaaaatcacgctgctctgacctgtcaggaaaaattttatagacatttaataattaccatgaatattttccgacaaattgtattgtaaatctgaacattcatgatataatatggtataggctttatatactaagaaaagagggatattatgtttggttcatcaaaaggagcaacaacagaagcattagaaaaattagttcagaagggtaaatgggataagattaagaaaagttatctgaatgcagatgcagaaacaaaggtacacttagctgaggcgtgtgcatccgcagttggagacgattccagcaacgtcttgatggcgctccttgattcccctgaggatgaggtaaaaaccgcagcacttaaatcgcttgcaaaggtaggcaacgatcactgcgtgagccgtatccagcaaatgttaacctcgatttcaccggataagacagcgcttcgcggagaagttcagacgacgctgcaggcactgcgcggaaagcagtaagtgaaacacataaaagaccatactataacagcggcccttacagcttcataccgggccgctgtttttcagcatattattcgtcctgtttcggacggatcagccaaaccgtctgtcggatacagcgggaaatcaggcctgttccatttcctccgtcacacgctgcatctccttcgtatcaccgatgagaatcgctccggtcagtctgccgtccgcataataccgggtcttatagatcttcttctctgcatcctcctcgtgctccactgtgtactgtgtttccccgttctttcccacatccccaatcgcaaaaagagaggtctccataccgttaaaggtcagagccgccggtaccgtgtggtaaacaagaccgtcgccggccgcattcgcccccgctgtcctgcccatctccacagcctgaggccagatcgcgtaattgatcccctcatactccgcgcagtctccgcatgcatacaccgacggaatggtggtttccatgaactgattgaccttgacggcccttccgatctctgctcccgcatctttcgccagtccggaattcgccctgacgccggcggataccacaaccagttcggccgggacaacggtgccgtcgcctaaacgtactcccgtcacatctgactcgccttcgattgcttcgatcttgacatttaagtgaatggcaatccccacgtccagaatcagcttcttaaggaattcaccggctcccgcatccagctgacggcccattaactggggtgcaagctccaaaacggtcacctccaggccggcctttttcagttcccatgcggcctccagtcccagaacaccgccgccgattaccacggcatgcttcgtctgcggaagcagggcactgatcttttccgtatcggtgattctgcggatggctgcgacctgcggcttctcgtggcccggaatcggcgggataaagcattcagaacccagggcatagatcagtttatcatattttaaacgaattccatcggagaaggtcacttctctggtctccggatcgatcgattccgccgtctttcccgtcagggtcaaaatccggttcttctcataccaagacgcatcatgaaccagaagctgttctctgttgttctctcccagcatggatttggtcagcatggggcggctgtatgggagcatatcctcattcgtcgccatcacgatggaggctgtggaattccgttctcttatggcctctgccgcatttaatccggcagcaccgcctcccagaatcagaaagagctcctccgtgtctctgtggaaggacttctcctcctccgtaaatggaacaaaattctcaggccccactccacatacaggacatacacttaccccctcctcaaatactgcaccgcataccagacactttaccagtttcttttttgtttcacccatgtgaatacccctttccgcctgtcagactgctgtttcttattttttaaaattagtattaattactattattgtaataatatcacatctgcattccttttacaagataaacttcgttaaaattttgtaaacgcagacagaaaactgtaaggtcccctccggagctatctgtgttaaaataacaggaagtgaaataaaaaaagaggggattcgattatgaagcagtatacgattggagacgtgtcaaaaaggcttggaatcagccgtgactcgctccgtttttatgaaaaaaaggggatcatctctccgcagaagctggaaaacggctaccggtgctacagctatgaggacacgagaaagcttctcgacatcatgttctaccggaggctgaacttcagcatcgaggacatcaaccggattcttcaccagagttcctttggttcttattataccatgatccaggaaaaaattgcagaggaagaacaggaagtggaacggcaccggcgttctttgattcatctgaagtatctgactcagctctataagaatattgatgactatttaaaccgatacgacatccggccgctccgccgctattacaaagcagatgagagtctcattgacaagctggccgttcatgatttatgctatatctatcaggaatatcaactcagggaaggcatgccggaacaggtggatgaatactatctgttcgccgcggatactgcggccatcatcggactggaagaacagttatccggccgcctctttattcagcacgaacattgtatctacacagtgatcgcatccgccagccgcattcccgacacccgttccatcatgaaggcggtctgctgggccagagatcacggatactcgctggaaggtacagcctacagcggattcctgctgagctgtgcggtcgatgagatgcagacagaccggacagaagaggcagggatcagccagccggtttactacattgaactgtatctgccgcttaaggagctatcgtcatgaaccgccgcccttccctcagatgatactccacaaaagaaaaggaggcttttatttatgagtaagggaaaaggagtcatgcaggagtttaaggcgttcattctgaaaggaaacatcatcgatatggcggtcggcgtcatcataggcggggcattcagcaaaattgtcacctctctggtcaatgatattctgatgccgcttttgggtgctgtcacgggaggcgctgacttcaatacatttaaaattattctcagtccggccgtaacagacgcggcaaaccaaattattaaagaagaggcggctgttaaatacggacttttccttcagaatatactggatttcctgattatcggcgcctgtatgttttttatgattaaagcggtagccatggtcagttcccgcttccgtcacgaggaggaaaagaaggaggaagcggcaccggccggtccgactcaggaggagctgctggctgaaatccgcgatctgctaaaagcacagcagaatgcagaatagagaatgccaaagaaaaagaatgaaacaaagaaccggaagcaccagaccggccctgtcacagcggccattctggtacttccggttcttttcgtgtcaggcttcttccagcattacaatgactccacagctctttaagcaaagagttccgtcttcctgcagggtactgagcgtcccatccgaagcgctgtcgtcattggtaagcagcaccctgtaattcttttttggaagccggagttccttttcctcttttccgaaattagcggcaagaaagatgtgctctccgctctcactctcccggttgaaggcaaagatatcctcatctgcctcgaaagccggaacaaatctgccataggtcagtatctcacggtacgcctccgattttctcagtgcgatcagtttctgatagaaacgaagcacagaatcctcgtctcttaactgatcctccacattgatctctttatagtttggatttaccttcagccagggggttccggcagtgaatccggcctcatgctcccggctccactgcatcggtgtcctcgcattgtcccggctgtaacggcagcaggcttccagggcctctttctccgtgcagcccgcctccagagccgtccggtactgatcctttgtattgatgtcgtcgtactcatcgatggtctccatagggcagtttctcataccaatctcctgcccctgatagagaaacggaaggccgcgaaggaggatattgacagccgccagcatcttgattcctctgggatttaccgcatgctccggcagataggtggaggcgccgcggggctcatcgtgattctcgatgatattggccagaaaaccaacattctgaacctccagctgggattcgatcacggtcttcttccactcggagaacatgaccggcttcgcatcgtaccacccatgttcccctcccgtcagcaaatgggcggaaaaatcgaacatggtggaaaaatggccgttttctcccacaaattcctttaattcttcttccttcatattgaatacttccgcaacggtaaaggcgtgatacggttcgaaggccttctgccgcagttcttccagcagttctccaacgccctccacctcctccaccattttggtacaggccgccaggccatcagggccgtcggccggaaaatccgggaaatcgggatcctttttaatattgatgatggcgtcgatccggaaccctgccacccctttttccagccaccagcggatcattgtgaacagttcttccttcatcttcggattattccagtttaaatccggctgttcctttgcaaacagatgcaggtaatagagatcggtgcccggtaccggctcccagacgctgcctccgaaataggaacggtaattgctgggggcaccgccgttttttcctttttcaaagtagaagtagtctgcatattcgccgtatggatctgcaagtgccttctgaaaccattcgtgctggtcggagcagtggttgatcaccagatccatcacgatcgcaatccctctctttttcgcctcggccaggagctcgtcgaactcctccatggtaccgaactccggtgcgatcttatagtaatcggagatgtcgtatccctgatccacaaatggagactggtaaatcggggatatccatacaatatcgattcccagttcctttaaatagtcgagtttctctataattcctctcaaatcaccgattccatccccgtttgtatcataaaagctcttgggataaatctgatatgccactttttcatgccaccattttctttccatggtcttcctcctgctgtttcaaatgtactgtcattataatacggctgcttccatatttcttgcagtatacttcccatttctaacacaattcttctgtcttctgttttttctttctccaaaaatgtacgttagccggcatgctgctgttccggattcgtctccccgggccggaaagcacgaaaaataccgttttttgttaaaaaacgtttgtatatttatgatttttcttttataatagataggcagtctttttctaaacaggggaaattgcgaaagataatgataaggagaaatgatgactatggaagaacgtttgatagggacaatttcaagaggcgtacgtgcaccgattatccgcgaaggagatgaccttgcaaaaatcgttgtagattccgttataaatgctgctgccagcagccgctacggctttgagatacaggacaaagatatcgttgccgttacggaggcagtcgttgcaagagcgcagggcaattatgccagcattgacaacatcgcagctgatgtaaaggagaaattcggtgatgcatccgttggagttattttcccgattttaagccgtaaccgtttcgccatctgtttgaagggaattgcccgcggcgtaaaaaaggtcgtgcttatgctctcctatccgtccgatgaagtcggcaaccacttaatcgacgaggatgagctggatgcaaagggcgtgaatccatgggctgatgtgctgagcgaagagaaatacagagagctgttcggctataaaaaacacaccttcaccggtgttgattatatcgagtactacaaggacgtgatcaaagagcagggcgccgaagtcgaggtcgttctggccaatgactgccgcaccatcttaaactacacggacaacgtcatctgctgtgacatccacaccagagcgagaagcaaacgccgccttctggcagccggcgcaaagaaagtgtattgtcttgatgagatcatgacagaatccgtcgatggaagcggatacaatgaaaagtacggtcttctcggttccaacaaggcaacggaagagaccatcaagctgttcccgcgtgactgccagccattcgtggacagagttcaccagatgatgatggagcgcaccggcaagcacgtggaagtgatgatctacggcgacggcgcattcaaggatccggtcggaaagatctgggagctggccgatccggtcgtatcaccggcttatacggatggtctggaaggacagcccaatgagctgaagttaaaatacttggctgacaacgattttgctgatttaagcggcgaggagttaaagaaggccatctctgagagaatccgcaccaaggatgacaatctcgtaggcgacatggcttcccagggaaccacccccagacgtttaacggatttgatcggttctttatgtgacttaacctccggatccggagataagggcacgccgattatctttattcagggatattttgataactatacgaaataaccaacggtatctttccgcacatcgtgcataagttaccgcgacaaataaaagaaaccggcgcccctgccaaccgtgtgttgaggggcgccgtttttttacattcttccttccggataactggaggctcatatattttttaccactgccaccgctatgcccgagctaaagaccagcacgaaccagatcaccatcagccacagcggccactggatctcaagcatccggttgacagggataatcaaaaggctggaaaggcagacctgattaaatcccacgatctgcttttcataccgcagtcgtctgttttcggcacgtctcaccaggagctctccccgtcttctcttctctgcctcatcgtctcttaaaccggctgtcaccgcctgtaagacagaggctgccagggtcaccagcgtaactgacagcgtccaaatggttatgacttcctcggaaaccggtatccttaagactgaattaaccgggaaaaataccagtgacacgattccgcacatggccaggaaccagacaattttcctcgccaggatcaccggcttcgttctgtctttcttcatccgttccgcccctctcttctctataaactccatctgtaaatcaaacagttccgtatccagcgtttgaaaatcccagtccttcttttttaattccaggcaaaccagcttcatccggctgatggcagcctcctcctctctcagctgacactcccgctctttgaggagctgtgcaagagaccgctttccctgctgaaaactccggatatcagaaaccggcactcccagtgtccggagatacttgattttctccagcacctctctgtcctcttccgtatagtcccggtaattattttcaccgcgggccggagacaaaagcccctccttttcgtaaaagcggatgtttgccttcgtaatccctacctgctgctccatatccttaatcgtcattgtccttcgcctccttctttcctttattataagggttcaacaaggttgaatgtcaataaaaaagaaaaatttccgactgcagcactcttttatcccggagatacaaggaaaaaggccggcagcagaatctctcctgtcccggcctgatacaccttacttctatttcacaaccagatttacaatcttattaggaacgtaaatctctttcacaattgtctttccttctaacagcggcacgatcttttcatccttcaccgcaatggcaaacgcctcttccttatcacagttcgccggcagaaccaccacgcttctcagtttgccgttcacctgaacgcctacttccacggtggcatccatggtctttgcctcgtcgtataccggccatttcgccatggaaaggaatccgtctccgcccaggctttcccagatctcctcacaaagatgcggggcgatcggacataacagcttgatatagatgatgagctcgtccttcgtgattgatcctttcgcgtaaatctcattcagcagccccatcagtgcagctatggctgtgttgaacttcatttcttcaaggtcattcgatacctttttaatcgttttatggaaggcagtctccagctctggtgttgctccctcaccaccggcaatatcgcacagtccggcaacacgttccaggaaacgcttgcagcccttcacggaactgtcgctccacggggttgccgcgccgtaatcgcccatgaacaggacatacgtacgcagaacgtctgcaccgaactcttccacaacgtccagaggatcgacaacgttgcccttggatttactcatcttgtcgccatccggcccgagaatcagtccctgagcggtacgcttcgcataaggctcttccgtattcaccagtcccatatcatacaggaaatggtgccagaaacgggaataaatcatatggcgtgttacgtgctccattcctccgttgtaccagtcaacaggcatccagtattttaatttctcaggatctgccagcgcctcctgattatgaggatcgatatatcttaagaaataccaggaggaacctgcccactgcggcatggtgtccgtctcgcgcttcgctactcctttacacttcgggcacgtacagtttacgaaggattcaattccggcaagcggggactcgccatcctggcccggctcgaaattgtccaccttcggcaggcggagcggtaattcttcgtagggaaccggaacgacgccgcagacagggcagtgaatgatcgggatcggctctccccagtatctctggcggttaaacgcccagtccttcatcttatactgtacaccggcttctccaacccccagcttctccagctccttcaccatgcgggcgatggaatccttcttattggtcaggccatttaagaaatcggaattaatcatcttgccttcaccggtatatgccgcctcggagatgtcgccgccctcaattaccggaataatgtcgatgccaaactttttagcaaactcgtagtcacggtcgtcatgggccggtacggccataatcgcgccggtgccgtatcccatcataacataatctgcaatatagatcggaatcttcttgcctgtcagcggatgaaccgcgctcagcccgtcgatacagactccggtcttctcttttaccagctgagtacgctcaaactccgtcttctttgcgcatacttctctgtattccttaatcgcatccatgttgccgatctcatctgcatatttatcaatcatcggatgctccggcgcaattaccataaaggtaacgccaaacagcgtatccggacgagtcgtgtagatgcggaacgactcttctttgtcagcaaggctgaaatctacaaacgcaccttccgatttgccgatccagtttacctgctgctgtctgatattcggtaagtaatccacggtatccagcccttttaagagcttgtccgcgtattccgtgattcttaaaaaccacacggatttggacttctgcacgatgtcgctgtggcagatatcacattttccgccctggctgtcctcgttggataagacaaccttgcaggaaggacagtagtttacgagagccgtatcgcggaacacaaggcccttctcaaacatctttaagaaaatccactgggtccatttataatagtcctcatccgtggtgtcgactactctcgaccagtcaaaggagaatcccacttttttcagctgattggaaaatctggcaatgttatcgtctgtaatttttcttgggtgaacaccggtcttgatcgcatagttttctgtcggaagtccaaaggcgtcaaatccaatcgggaataagacattatatccttccatcctgcgttttctcgaaatcacttccaggcttgaatacgccttgatatggccgacatgcataccggctccgctcgggtacggaaattctaccagaccgtaaaacttcggtctctcatcgttgtccacagcctggaaaatgcgggcgtcatcccactttttctgccatttgggttctatctttttaaaatcgtgcttcataatctgcctccatttttttgctgatacgaccattatatagattccttccataaaatgcaaggttttgacctctccgcttttacgatatggaggtttttaccagtcaatgaaagtcttttaagccgtatctcataaaaattttccgtagacagccattctccttcattcgctccgccccctgctcatacggaatcattaaggccggagcccccctggtaaaggaaaaaccgccggacagtgtgccacgccggacggcgcagggaaatcattcttacatgacttccctgcgccgtatacgcggttccagcggcttcctgatccggccgccggtctctcacttatttaaaatacttcacaccggattcaaaaatcttcatatcctgctccccgtaaatattcatggcaaccgcctcgccccgtctctcggagtgggccatcttaccaagaatcctgccatccggacttgttatgccctcgatcgccatgtaggaaccgttcgggttccagaattcatccatagtcggatttccgttctcatccacatactgagtggccacctggccgttatgaaacagctttttaatccaatcctcattcgccacgaaacgtccctcgccgtgagaagccggattgcagtatacgccgcccagttcggcttcctgcagccatggagacttatttgtcaccacttttgtataaaccatcttggaaatatggcgtccgatggtgttcattgccagagttggagaatcctttctctgtgccgtgatggttccttccggtaccagtcccagcttaatcagcgcctggaagccattgcagatgcccagcatcagaccgtcgcgctcatttaacagcttttcgatctcctccctgattaccgcgttccggaatacggttgcgaagaatttcgcggacccctccggctcgtcgcctgcggagaagccgcccgggaacatgacgatctgggcttttgcgatctcttttctgtactcttccacagactccctgatatcgtcagcgttcctgttcttaaatacctttgttaccacatttgcaccggcccgctcaaatgccttccggctgtcgtactcgcagttggtacccgggaataccggaataaatacgttcggttttgcagtcttatgtctgcagacataaatgtcctttgtatcgaagagtccttccgtcaccggtgtatttacaacgccggatctggtcgggaacacactctccagggtctctgtccatgcattcagcgcctcgtccatggtgatagccgcactgccgtattccagcactccgcggtccgtcacctcaccgattaccgtgtaagagatggacagttcgcccacctttccatcaggaacttcgcagacaatatcgccccagcctgctgcaaagaagtctctcggatccacattgtgctcgatcttaacgcccagcttattgccgaacgccatctttgccacggattcagccagtccatgaccttccaccgcataagcggaaatgactctgccagccgtaatctcgttataaagcttctcatacccatccatgagctgctcatagaccggtaaatcgtacgaatccttctcaatacggaataccacaatcttacttccggccttcttaaactccggagtaataatgtgcttctgatctgcggtatccaccgcaaaggaaaccagtgtcggcggaacgtcgatctcgttaaaggttccggacatgctgtcctttcctccgatggaaggcagcccaaagcccagctgggcctcgtaggcccccagcagtgcggagaacggctggctccagcgggaggcctcctccgtcatccgacggaaatactcctggaacgtaaaacggatctttttataatcgcctcctgctgccacgatcttggccacagaagatacaactgcgtatacagcgccgtgatacgggctccagctggataaatacggatcaaagccgtagctcatcatcgtcaccgtatccgtctttccggaaagcaccggcagttttgccaccatggactgggtctctgtcagctgatacttaccgccgtaaggcatgaatacgctgcccgcgccgatggaaccgtcgaacatctctaccagacccttctgagagcagacatttaaatcggaaagtacgttcagccactcgttccggacatcggaaatttccttcttatcaaacgcactgccctccttattcgggacctccacaacgacggaagcctcctgatgagctccgttcgtatccaggaacgcacggctgatatccacgatatttctgcctctccagttcatcaccagacgcggctcctcagtcaccacggcaacctcgacggcctctaagttctcttccgccgcataggctaaaaactgtttcacgtcctttggatcgatcacgacagccatacgctcctggctctcggagatggcgatctccgttccatccagaccggcatatttcttcggaaccttgtccagatcaatcttcagaccgtcagccagctcaccgatggcaacggatacgccgcctgcgccgaaatcgttgcacttcttaatgatgctgctgacctccgcccggcggaacagtctctggatcttacgctcagtaggcgcatttcccttctgtacctcggctccgcaggtctcgatggaagactctgtatgtactttggaggaaccggtagcgccgccgcagccgtcacgtccggtacgtccgcccagcagaatgatgatatcacccggatcggaggtctcacggattacatttttacgcggagccgcccccatgacggcgccgatctccatacgttttgcaacgtagttgggatggtaaatctccttcacatatccggtggcaagaccgatctggttgccataggaactgtatccgctggctgcaccggtcacgatctttctctgaggaagctttccctttaaagtctcgtttaacggcttcgtcggatcggctgcgccggtcacacgcatggcctgatatacataggtacgtccggacagcggatcacggatggctccgccaagacaggtggcagcgccgccgaagggctcgatctccgtcggatggttgtgagtctcattcttgaaattgacgagccactcctcttcttttccgtcgatttccaccggcaccacgatactgcaggcattaatctcgtcagatacctctaagtcttccagttttccttccatgcgcagcttcttcatggccatcagtgccagatccatcaggcagacgaatttgccgctcttgccctttaacacgacttcacggtcggataaatatttatgatacgtatgttccatgggagcccggtaatcaccttctgtaaaggttacatccttcagttccgtctggaatgtagtatggcggcagtgatcggaccagtacgtatccagaacacggatctccgtcatggacgggtctctcttctcctcatccctgaagtaattctgaatatgcttaaaatccttaaatgtcatggcaaggttcagggaatcgtaaacttcctttaatgcgccttctccgaaggtctggaatccgtcgaatataataacgtcggctggcgtctcgaagacagtcaaaagcgtctccggcttcgtctcatccgtctctctggaatccacaggattgatgcagaacgacttgatatccgcggcttccacctctgtcagagttccggaaatcacatacgtagtggccgatttaatcaccggctcctcatcttccttcaaaagcttcacacactgctctgcggaatcggcccgctggtcaaactggcccggcagatactcaacagcaaacaccacatcggcttcgtttctcggaaacgtctcctcatagacctcgtccacaggcggctcggaaaaaatcgtcgcaagcgcggtacggtatgtctcatcagataaattctctatatcataacggatcagaacgcgcacgtccgtcacggtatcaattccgagataactggcaatctcctccttcagctcatgggcctttacggcaaaggccggtttcttctctacatatactcttcttacgctcataatttcctccttggaaagaatctgcttctcattaatacaataataccacaagatatatcaattagaaaaattaatatatcttatggtattaattaatgtttcttatatttatgaaatttcataaaaatgctataaaaagaaggaaatcagccaggagaccgcccactgaagaaccagactgacagcccacagaatgattacccctatgacactggtgcctcccgccttctgcagagcttctgtgcgggcggtcttctccgaggcgcgccttgcgcggcatccctctttgtccagaatggcgcttatatggcggcagtagagccagtctcccagcagaccgaacacaaccatggacagaacgaacaggcctgccgctgtgcccatgaacaccagcgcattgtccgcagacagaaccgtgctctccaggacggataataccaccgtatagaccacattaaagcccataatggctgctgccgccttccacatcttccggtaggcaaaccataacgcggtaaacagcgccgcacaccagttgaagctgtaacctttctcatgaatccgttggaactttctcagatagacatcactcttttttccgacacacatcataatatctgagatgagatactcaccgatcctcatatcggccatgcgttcccccttcacttttcgcgttcccctctccttaaaaccgcagcatcgcgcaaacggcttttttcgtaatccgttctattataccacgctttcccaaaaatggtttacttttttctttcacttcttttctacatctgtgtaatagagatgtcttggcagtccatccaccatgatcggcgtcagttctgcctgaatgagcggtttgatgtagcttacaaactcctctgtgacatagtcgcccgcctcattgatccactcccgcggcaccttcttttccacgtttgccaccttatggacatcgtagatatccgtcacacagatatacgggtcgtcggagacgcgctttaagatgatcattttgcctgtctccccttcgaatgcagccttcacagcagccccgcctacctgaaacgcctcggtgatgtcaacacgggaaacaatatgggaagcgcagcgctgcagagagttaaactcgatggctctcgtcttgcatccgacttcccgcgaaatcttctcggccagatacctggctgtcccggtaagctgtttgtgtccaaaggcgtccacatagtcaatgctgtcagtcagctcacagacataacggccatccgccatcttgacgccctcggatatcgcaaccaccacagattttttccgcttatggaggtcttctacttttttcataaacgtatccacatcgaagggaatctcaggaaggaagatcatgtccggcccttcacagtcttcacacttggccagggcggccgctcccgtaagccagccggcattgcggcccatgatttctaaaagtgtcacattctgctggtcgtacaccaggccgtcacggatcacttcctttgtgatggaacctatgtattttgccgcgctgccatatcccggcgtatggtccgtcgcggccagatcattgtcaatggttttcggcacgcccatgaaccggattttgctgccgtttaagatggagtaatcggaaagtttttttatcgtatccatggagtcattgccgccgatatagaagaagtattccacctccagtttctccagaatggaaaatatctttttatagatctcctggtcttcacagatctccggcagcttgtagcggcaggagcccaaataagcggaaggggttctctttaacagttcgatatccagatcattgtttatgtgttccgacaggtccacataccgttcttccagcagtccctgaatgccgtgcagcatgccgaaaacgcgtttcgcacctctgtcctttgccgtcttatagacgcctgcaagactggaattaatgaccgccgtggggccgcctgactggccgactattacatttcctcttacttctttcatctccacattcctccatgaccatgattattcttatttttgtaagcacttacaattcttacgttcctatcataatatagagaaattgtaaaagtcaactgtagatattttattcacaaattttcattgttttacaatgggtacatgcctttttcctcaaaaaaagcagggcgttttatgcgctctgctcttccactgcagtcacattcgactccagcatttctttcaattcttccatcccgattccctgttccgtaagcaaaccgcggatcgtcttgaactcttccagttcaatctgttcgtttaatgttttttccttctcttttaaggtgacgagacagttctcatactgcctgatgctctccctaacctcatttaactgatcctgcaacttctccaccggtgattttcttacgcctcttgccatattgaaaatgctccttttcctttatgatataggttgtatcattcttttttagtatatgttaaaaagtgggaagttattccataatcagtaaagtaaaaaacagcattgaattccctttagatttattcaaagtatcgctggatatcataaggagagaacacgcctttatttgtcacaattccactgaccagatgcggcggggtaatatcaaatgcaggatacaaccctttcactcccattttcgcagtccttattcccattgcttccagtacctgttccggatcgcgcatctcgatttgcacgctgtcgatagtcggatgcgccagatctggtgcaccggtcgcaaaatacggaataccgaagtatttgcataccagcgcgatctgcatggttcctaccttatttactacgtacccatcacatgatattgcatcagcggcagaggtaaaaacatcaataagaccatttttcatggcataggcgggcatattatccgttatcacagtcacatcgaatccctggtcgtatgccacactggcagtcagtctggccccttgaaaataaggcctcgtctccgcacacattactttcatatccttgccccgcttgcggattaccttaagcatcattcccactatcgtctccccaaaacactgtgtcagtaccgtgcctttatccgggaagagctctaccagatattgtgctgtcttctccagacgaaaatacttttgattaatctcatccagtgtatgaaggaaaattgcttcgtccatacgttcgcccttcttcaaagcctcaattcccacctgacggcatttttctgtaatagcttccattctggctgcggttgttggtcttgcatgagataacgtatctgctgctttttccaggtattgctctgcttcctctcctgttttattccggcactcgtatgctgccagtgccatccccataccggccgccagataggggcctgcactctgtgtaaccatatctgcaattgcctgggctacttcctcgtgtttgaggcatgtaacaaattctactttagccggatatattctcctgtcaagtatacgcacttttccgtcttcataccatgccacattttcatactgcagcataaatgccaaattttcatctgctcgaatcatcatcttctccccttcctgttataaatactctttacattgcctttctgtatagttcaataatctcttcctttcccggttgtatcggtgaggataaaatacagccatcctccagtgctttctcagccaactggctgaaatcatcactctgaaccccgagatctgataaaggaatctctgtttttacccgtctcgacaagctgcgtactaattccactgcataaagagctttttcccggctggtcattcctctgcagccggcttcatcccacagccaggcaatctctgcatatggtttctcggctgcttcaaggttaaattccatcacccatggcagcaggattgcattacaaaggccatgaggcagattatacgttcctcctaactgatgtgccatggcgtgtaccaaccccagacctgcatttccaaagctcagccccgccagatattggccacaggccattgcctccctggcccttttactgcccggattttccaccgcctccggcagattcttataaataagtgccattgcatcttttgccagcagctctgtcagcaggctgtgtccggtactggaaaagctttccaccgcatgggtcaaagcatccatccctgtctgcgcagtaatattcgcgggtagctgttccatcagttcggtgtcattgacagcaatcgatggcatggcataatcatctttaaaaatcaatttccgcttagcttccgtatcactgattaaatatgctctcgaaacctcgcttcccgttcctgcggtcgtattgaccgctaccagcattttccctctctctggacttttatttcctccctgataatcctctaaacagcctcctcccgcctctaaaagccggacagccttggcacagtcgttggcagagccgccgcctaccgccacaataaagtcacagtcctcttcttttagcagccgaactcctgctttcacgttctccagagtgggattgggctgtacctcatcaaagacaacggtctgaaaaccggcttcctccagcacgctttcaacttttccgctgattccaaggttccgcagacttttgtctgtaataaccagcgctttccttaccttctctctttgcagaagttccggtaaatcttcccttgccccgtatccgaataaactgactggtgccgccgcaaatttactcctcatcctgtccctcctccggaagatggtatctcttcctcaatattctcactgcgtcatcagggacacgctgcggcgttcccatcagctttgcaaagtggtaggcctttgccgcatcttcgacatatacagcacgtaaatacgcctgctccaccgtctttcctacagccgccactccatgattctcaagcagtgcggcattgcgcgccttcatagcctgtgcggcatggatcccaacttcatcggtacctggaagtccaaaagctgcaacaggaatgtcaccgcccaggaagggaagcatctccaccagtattaacggaatcccttcccccacaattgcaaaccctgtcgcatagggagaatgtgtatgaatcacagaattcacctcctcctttcgcttataaatctccgcatgaagacgccattcagaggagggagtatgctttccttccacgatactgccgtccagacgtatcaccataatgtcctcaggctccatttcccggtaatccagattgctcggtgttatatacagcaactcattttctctatcaaaataactcacatttccactcgttccggctaccagaccttctctggaagatttctccgcaattttttgtatacatattttcacttcctgatttatcttcatcgctcacctctgactttttaaaatggcccccagttgatcttaaccgcaatcagcaaaaacaaccaggtaaccgcgtaaacaccaactactactctaactgcaaacttaaaccactgcccgaatgggactctggcaatcccgcacatagccattaaggcgccaagtgtgggataaataatattcgtaattccatctcctgcctgaaatgccaaaatactcgtctgatccgtaagtccgattacctgtccaagcgggaacataataggcatcgtcgctgccgcctgcccgcttccggatggaataagaaaattaatcagcccatgaaccagtgtcatcaggatagccgccatatagggaccaaaatgtgccagcggctgggaaagagagtaaattactgtgtccagaaccttcccattttcaagaataacctgaatggcacgtcccagacctaccatcatcgcagcggcgaacatctctcccgctccctttgtaaatatatcaatcgcctttccggacggaaaatgggcaatgacagccgtaagaatggctgcgattaaaaaaacagacatcatctcatccagataccagccaaattttgcagggccgattatcagacagagaaacaggcccgccagtaccatcagtacctttttatcctgtattccaatcctgtagtcctcaagcttacgcgaaagtcccagcccctccgttgcaattcccttcaccagactcttttccggatttttccggaccttttccgcataataaataataatcaaagcagatacaaccgtaccacagaaccagcaaaccgtccgcagcaccattcccgagaaaagaggaaggccgctgatggcatccgcagttcctacagtggaagcacataccggccccagtgcgaagccgattccgccgcctactacaatcatcgccaatcccacaatcagatcgtagcccagaccgagtgcaatcgacactccgataatggtgaacggaatctggatttccggtcccaccaccagccccagacaggagaacagaaaagttataataaatataacggcactgcctggaatttttgatcgtttcaccttacagagcatcacaccgatactgttctccagcgccccagtggcatttatcactttaaatgcaccggaggagagaagaatcataaaaatgatactggaggaagccgagagccccttagcgatcgccacaaacattgcaaaaaaaccggaaggattcttatcaaccacatggtaggttccctgttcaatgatcattctgccgctttccggatctgctgcccggttaaattcccccgcgggcaccagccaggtcataacagtggcaatcacaataattccgaataaaattataaatgtatgcggcatatggtcgtaccatttcccctttttattggacgtttcttttggattcatactaaaaccacctttgttttttacgtttcttgactgttttccaaaaataatgtaagattaaattatatttgtacaagaaagggttgaatcattatgttagcagccgtgcgtcaggaacagatcaaagacattatattgaacgaaaaaaccgtatccgtcgtcagactgtctgagttattctcagtcagcgaagagaccatccgcagagatctaaacgtgctcgaggaggaaggcgtactgattcggaaacatggcggagccatcgtcgccaaccgcgtcttaagcgaggttaataacaatgttctggaacgggtctttgtagagaataagcaaaaaatcgctcttcaaagcagacgctttataaaaagcggcgactgcttatactttgacgcctcgacaacggcatatcacatctgcaaggagattgatgatatgaaactgaccgttcttacaaatgcgctgaatgtcatgactctcttcagtgccagagagaatgtaaatctaatcggagtcggaggctctctatccaagacaagaggctgttttatcggtcgtattgccgttaataccctgcgcagctatcacgtggacaaggcatttatatcctgccgctctatcagtatggaagaaggcgtcaccgactccaacgacgatatcgccgagacgaagcaggctgttatccggcgcgccaatcaggtatttctcgttgccgaccattctaagttcaataaagtttcttttacacaggtctgcacctttgacaatatcgatgatatcatcacagacgagccgctttctccccagtggcagcaatttgcccgcgatcataaaatacggctgtgggatccctccaggctgccggaggaatcctcactttaactgccgcctttttaaaaggggccgtaattaatcttcaccgcaatcagtatgaagacagccgacaccacaagaaccgccagaaccagtttataggcaaatctcacccatttttcaaaaggcaccctcgcgagtccacacattgccacggtagctccaattgtcgggaaaatgatgttgggtattgtagcgccaatctgcatggccagtaccgtcgtctgctgcgtaatgtttaaaacatcacccagcggggataatagcggcatcatggttacagacagagcgcttcctgacggaataaagaaatggataaccaccgtaatcaatgcaattccaatggatgcagtaccggttccgaagctggagagcggcgccgacagagcattgacaattgtgtccatgatttttccattctccagaagtacctgaatcgcacgcgcaattgcaacaatcaacgctatattagccgtatttttggctccggtggcgaaaccgtcaatgatatcattcgttttaagtccgtacacgtaaccagctgccagaccgccaatcacaaaaatagcactcatttcatccagataccagccgaatttgcaggaaccgataacaattgcaaaaaacatgcccagaattacaaacagcacgccgatctgacggcctttaattgtataggatgagatatcctgagaaaaaccgagcccttctgtattgattccatttacaagacttttatccggattttttttcaccttggacgcatacatggatatcatggcagaaacaacacatgtcacaacaaaccacataaccatacgaaatccaaatcctgaaaatgtgggaagaccagcaattgaatgcgccgtaccaataaccgatgcgttgatcgggctcatcgcccagcccatatatcctgcgcccataaccatggccagtcccacgatcaaatcatatccaagtcccaacgcgattgaaacgcctacaatcgtaaatggaatctgaatttccggtccaacaataattcccagtgcggagaagagaaaagagacgatccatataaccagggtccccggaacgtttcctttatttacttttttcagcaatactccgaccccgttttccagagcacctgttttatttacaaccgtaaatgctccagttgacaacatgataattgcaataatattagcagatgatacgaacccctgtggaatcgccttaaaaatatcaaacaggccagtatgagcagcttccaccgcatggtacgaaccgggtacgaccgctggtcttcctaccccttccatggcttctctcgtaaattctcctgctggaagaatccatgttaacgcagcagcaacacagacaagcagaaacaggattacatatgtattcggaatccttgtccaccagccctttttcttttcaatcgttttcttctgttcactcatttgatttcccctccttattattttgttcccataactcacttgtgtagaaatgatatttggtttttaccgtataccatttatttttctccacaaatggagtgggaaaatgtgtaaaattgacactattcggaaaaaactgaggttccaggcagatacctgatctccttccatatctctttccacttttccccgtacattcccgcagataatttccactgtacaactgaactcccgggctgtccgtatccatcgtcatctccactcccgattccagcccccggagatgaatctgatttctgcctttcagtatcagattatgatcaaaaccgctggtcgcatgaatctgtggatctgattccaggcactggtttctcaaaggcctggtactgtggaaatcaaaacacgttcctcctgttttatatatttctcctgtaacaagcccatctgtacctacaggagtgtaaaaatctgccgaaacagccagttcctgatccatggcgttttcgcatccctccccgtttaaattaaagtaggaatgatttgttaaattcaccacagtgtcccggttcgacaaataagaacattccatggtaagagtatcatcatcggtccaaatataacgcactaatgtcagtagagttcccgggtatccctcctccccgtcgcagcttatgtatttcagacagagttcctgtccttttgccatacagtcccaaatctttctgctgaacccttcttttcctccatgcagatggttgttcccatcgtttttatacagttcatagcaagttccgccaagctcaaaacaaccgcctgttatccgatttgccacacgtcctgcaacagctcctataaaaccgccggcctgctcatattcttccacggaattgaatcccagaactacatcaatatcctttccgtaccgatcttttaccacaacagcctgaaggatacagccatagtcaagaaccgagattttatttcccctttgattttctattgtccatcgatggatttctttccggtccttcgtgtatccaaacagttcctttgttatcgacatattatatctcctgcttaaatgcggccagttctgtataacagctgcctgacgtcattgcttttctgtccaggacaagccgttttgccgctgctatgattcttttctctgtctctattcttttttcttcactggttattgaagtgatatcctttaccttggaaacacctaccacccggcgtatcagctccattccggctgttcctgctgcatctgccagtacttccctcaaataatacgaactaaaaccgggagttctcgccagcgcgtcagtcgcgacgtcgtcaaatgcagcgaggaacttaatcttaaacaactccacagtatcttctaccgctgaacaaatccatgaaagaaattccctgcgttcttcgcttacctccagttccgcgcccgcatgatatcctgcaaaaagaagatgggcgattacatttcccaagtcatatcccatgggaccaaaaaaggcaaattccggatcaaagaccttgatactgtcctctttaataaatatagatccagaatgcaggtccccgtgaatcaacgcctgcgcatggttcataaaatcaaatttaagctttgttccttccagccgaagtgtattgtcctggtaaacttctatttccacgaactctttcatgccatccagaacaatattctttccgctgaaattgccaaggggttccgtgtacaccagctgctccgtaatctggcataaatccggattgatataccgcttcaccatttttttcttttctttatgatccatcgccagatccgttgaaggtaaaagcatttttacaagataagttgaaatctgatctgcaaacaatggaaatattttataattcagaagagctgatctcatgattacatagtcttttaaatcttccatggcacagcagcacatcaccggatcataaccataaacttcaggcacaaaacctttaaccattttgccctgataaatcagaatttctgcttctatacgattgcggtctacatcgataagtcttccggattttgctctggtctcaataccggaatgttttaagattattgatttccccgtattctgatcgcagatacggaatacataattaagattgccatcaccaatctccacacacttaagatctgcgccttcgtcaaaaaaattatatttttcccgggcatattgaagtgcatcctgctcattcattaaaaagtagctatcaaactttcccattttttctcctttatatggttttttgtttgttattgtggttttattttaccattcccacatttatcagtcaatatatctgtgtttattttttattttttgtgatttatccacatatttttaattaatttttgacacattcatcattttcttttttatttttgaccgtttatgtggtttttactttttcagtgcttttcaatttctgttttcaattattattttaactctcaggtctaacttccaatagtagtactataacaaaaagctcctgatgtgcttgtaaaataatccattcacatcaagagcttttcctgaacttcgctcttccctattctgttttcagatgcgcggtgtcattcacctccagcagcatataatcctgagtaaccggattatagttcacagtggtaatgctggcattgtcaacaataatctccgattcctccggatgatttctcattaagtaagcgacaatataagccatggtcgcgccgtgggacacaaccgcaatatcttcccggccattcgtcatacccatgaccgtctcaatcgcgcctgccacccgttccatgaccatcatctgggtttctccgccgggcggcgccacctccactggattgatgaaccaccgctcatactcgtttggatactgttcctttatctcagcccacgtcatgccttcccacttgccgaattccacttcgatgagccccggaaccagatagatatccacatgctggcggtcgccgatcatccgtgccgtctccaccgcccgcatgagcgtgctggagaatatctttgtcactggtctgctgtccatcccttccgccacaagcttcgcctgggctctccccgtgtcgtttaagggaatatcatggctgccctgaatctttccctggatattccagtccgtctgtccgtggcgtatcagatataatttcattcttctccgtcctccgccccggtaatctcaataccttccacctccgccaagtcttccagatctgcgttttccgcattcatgctcatggcgtccatcgccatcttcatgatgtccttcacttcacctgccgtcattttcatcttatctgccagttcttccaccgtggcctcacgtcccagttccttcgcaagcatctgggacacagtctgcaggacattgactctggccgccagttcttctcccgtctgtttcgcggactgctgttcctccaccgccaggtcaagggcagccttcatccgtgccgctaaaaagccctcgaaatcgccgtctcccgcgtcggtcaagaattccgtcaccgccatggtaagcgccatattggcctcagcaaccagatccgttaacaggacgcctttgccgtcatactctttcgcacactttaatgcagcttccaaattgccttcgatcagacgcttcttcgccccttcattaccggctgcagcatcgtttaacagctgcgtgttctcctcctgtgtacagggtgtgattgctttcatctcttccaggtacatctggtaaaaatcatcatgcataactcttacactccttccggccgttaactgttactgttcccagccccataggcccctgcctcccggtcagccccagccggctcatggggctgaccgggaggcaggggcctatggggctgggaacagtaacagttaacttaccataatctggtatttttgtcaatttcctttacaaatccatcgcattcgtgatagaatgtccttagatttataaggaggactaataatggatatcaattacgaattgtataaagtcttttaccatgttgctgccacgctgagcttctccgaagcgtcgaaacagctgtttatttcacagtcggcggtcagccagtccatcaaagtgctggagaaaaagctgaatcagacgctcttcatccggagcacgaaaaaagtccaacttaccccggaaggcgagattctcctaaagcacgtggaacccgccatcaatttgattcaaaaaggggaaaatcagcttctggaggccaataccttaaacggcggacagctgcgcatcggcgccagtgacaccatctgccgttattatctcattccatacttaaaccgtttccataaggcataccccaacgttcatataaaggtcaccaaccagacctccatcgagtgcgcccatttactggaaaacggacaggttgatttcatcatcaccaactatcccaactccggcctctccaattcgcagaacgtccgggtgatcaacgaatttcacgatgtcttcgtcgccaatcaggagtatttcccgctgaagggcgaggcagtcagcctgcagaagctccagacatacccgatcctgatgctggacaggaagagcaccaccagcgaattcctgcaccatatgttccagcgggaacagctggatctcgttcccgaaatcgagttgagcagcaatgatttactgatcgatctggcgcgaatcggtctgggaatcgcctttgttcccgatttctgtattccggaaaatgacaaagacttattcatcgtcaggttaacagaaaagatgcctgcgcgccagatgatcgtagcctataatgaaagccttcccgtttcccaggcttccaaacagtttatggacatgatgtgagagccggcgctgacaggattttcccgtcagcgccgattgtataccatcagagaattcccccacatctcgtcccggtaagaaaactcttccggtctgtactcctcttcccggaaccccgccttttcatagcagcgcttcgcacccggattacagtcgaataccttcagcgtaatccgcttcatccccaggaaatccacggcatacgctgccgccatagccaccatctgctgtcccactccgcggcctcttacctccggtgccaggacaatgtatcccatatgcacactgtccgcctcgtaatccgccgccgccattttaaagcttccaaccggttttcccgattcatccagagccgtaaatccccaggccctggaatcctgatccagttcagcgtaataggcatccatctgcccatccgtcaacggaaaggtaaaaccatcgcggcaccacatacgcatctgtctctcatcggaaaaccatttcatcaattctcttccgtcttccctcttacagggccgaagtctcagtttcatcattgttctgtctctccctttctccccagaattccgttacgatcccggatacactgtttaaatttacagaatagtagccatcccattccctgggaaacagcgcctgatagtccggttttaaaaatctgtcatcgagcagagcgatcacgccttcatccgccaccgtccggatcacgcggccggccgcctgcatcaccttgttcatgccgggatactgatacgcgtagtcaaatcccttctgctccttctcatcgaaatatcccttcaggatctcctgctccgtgcacaccatggggagtcccgtccctacaatgatcgctccgatcagcctcccttcctttagatcaatcccctctgagaatacgcctcccatgacacacaggcctacaaaggaatcttccctgttctctttaaactcctccagaaaaatctcccgctcctgttccgtcatgtgagccgactgggcgagccatgcaaattcctgctgtgcctccataccggaaagcagctgttccacctccctcatatactggtacgacggcagaaacaccatatagttccccgcatgggcaaagacaatccttctgatatactccacgatcttcttaaattcccgctcatttctcctggtgtagcggctgctgacatcgtttgccaccagcagcagccgcttctcccggtcaaaaggggactccgcgtacacagcgtattcctcctgactgccgcttaacagttccttgtaatactggaccggcaacagggtcgcagagaaaaacacggtactgttgcctttatccaggcattcttttaaattctttgccggattcatattaaacagccggagcataaagcgtccatccgataagaattctgtataaatccggtaattttcatctacccggtcatagatattcaacagatcccgcagtgcaaagtaaaaatcaagcaccagatcgcggtcctcaaattccggaaagctgtccatgaatttctccatctccccgaacagcgacataatggcggtcataaacagcttgatatccgtcagaatcgtataaccctcgcattcccgcttcatctccagcagctgcttattgcaccggtccaggagcccggccagcttctggtcctttggtttcacaatctttttaataagaaggaagtcctccttatacaccacggcgctgtacatctccctggctctaggcacgagattatgcgcctcatccacaaggaacaggtactcccccgctattccctcggaaaaataccgtttcagcctgatattaggatcgaatacataattgtagtcgcagatgataccgtccacccagttgctgatgtcgagacagaattcaaacggacacacctggtgtctcctggcatactctaaaacagtctccctggtaatccccgcctcctggtggatcacatcgaagacggcatctcccacccggtcgaaatggcctttggcgtaggggcaggcatccggattacactccggcttctccagaaaacagagcttctccttcgccgtaatcgtgacagtgctgaaataaaggccgccctttctcaggatctcatacgtctcctccgccacagcgcgcgtgatggtcttcgccgttaaataaaacagcttgtctccatggccttctccaatggcctttagcgccggatagacggttgacagcgtcttaccgattccggtgggcgcctgaatgaacagattcttccggcgtgcaatgctccggtagacggatacggccagttccttctgtcccttccgatagggatagggaaattccagatccctgatggactcgtcccgccgaagaccgtggtggtacaagtagtcggcccatttcacatactcatgaatcaatcccccaaaccaggcttccagctcctcaaagcttttttccacctgaaagcgcttaatctcttccgtttcaatattgcagtaggtcagctgcatcacggctccgcccagctgatggtcgcagcagtaaaaatagccataacacatggcctgagccatgtgcacctcgatgggctcattcagataataaagatccatatagacgcctttgatctcatcgatggtcacgcctgaaggcttctcgataatgccgtcggcacgcccctccaccagaatctcaaactggttttcctccaccagatgcttaagcacaacctccgcatggtaatccgcccccatgcgccgctgaatcttccggtgtatccggctgccctcctgcatggccgtcttctctgcacctgcggtgcgcctgttgtccaggtcaccggaacgcatcacgaattccaccagattgcggaccgatattttaatgattttcttttccccgtcagccattccggttcctcctttccaggactgattatctttatctaaagcaaaaagggaactgtgtcctatggatcacaattcccttttctgtcgcctgatgagtgtcctgctgcttaagccgcatgaatcctgctcggtgctttttccattaagtatgtctcaaattcttcattctcaccgttgaactccacggtaaggggcctggttaaatcaaggctcaacacacctaatatagactttgcgtcaatggtcactctattgtaatatacgtctatatcgaaatcacattttgtagcagcagcaacaaactctttcgcttcggcaacgcctggtaacataatcttatactgtttcataatcatgactccttctcaaaaaaaaacagttaaaaagttgttgaaatatttatatcacttctgacgcaatttgtcaaattacgtttcatgaagcgaaatgtcaccatttcttgtgtattttgcattgtttgaaggaggtatgagagttgccgctatgcacatttgcaatcaccaaatactattgtcgggaatggttctcatttataactttgttcatcatctatttttataaaatacgtcttatattttcatctaaaacgaccagaagggccgttctttaccgcacatctgtctgcattgcgaggacatccatatacagcaggggattcacaggaacaaatcacacgtcgagttcagccggatgacatcttaaaaagcccacggatggtgatccggcagacattcatcacagagcagctcgccatcgaccgtcgctccgtttgacaaccctctgatcggatcaggtttctcccggtcagtggtccatccatgacacctcgcgcactggccgcagttcatcgtcagcggatccagataaagcgtgctggttgactgccattccgctttatgctgttcatccagcacaatctcctgctccggcagcttcccccacgcaagcttccagaacttctcctttcccttgtgatcgctgatctcttcttcatccacttcaaccagataactgattctgtaaagtattgcttttttcatattggcacctcatcataaagcggttttcgtctcgaacgtatattctttttacgattataacacatccggtattcaaaagaaagagctgccggtacaacttctgcggcggcttattttttgtcgcagcaatgcagttccatcatacaaagaaaagccggaactcctcaataaccaaggattttccggctttttctgatccgttgactcttttttcgagcaggggaagaggggctcgaacccccatttacggttttggagaccgttgctctaccattgaactattcccctatggcttgtttcgttcatgtttcatctgaacactatgagagtatagcatacctctttttaaattgcaagagttttttataaaaaatacaaaaattcgaaagtttatccagaaaccggggaattacctgccggtaatcccccgtgttaagatagaatctcaacgcctatctgtccaattgaaacctggagacatagtccttcagcagctgggcctggctcgacaattcttcactggccgccgcactctcctccgcggtcgccgaattggtctgcactacagaagcaatctgggtgatgtttctggtaatctcggtaatggaacgggactgttcctccgatgccttcgatatccggtcaacggtatcggtcatcttcacagattcctgagccaccacttccagtgcctgggccgctgtgtcaacaattccggctccatgcttcacagaccggacagacttttcaatcagttctgccgtattctttgacgcctcagcgctttttcccgccagactgcgtatttcctccgctaccacggcaaagccccttcctgcgtcaccggcccttgccgcctccacagccgcgttcagcgccagcaaattcgtctgaaacgcgatatcctcaatcacccgtatgatctccccgatctcgccggaattcattctgatatcatccatggcttctttcagcttctgcatctggcggttctgttccagaatctcgctgcccagttcctttgacttatcactggccgtcttcgcattgccggcgttatggtccacctgattagaaacctcctggataactgcggccagattctcaatggcccccgcctgttctgcggctccctgagaaagagactgggctccaaaggaaagctgtgccgccccttccgatacctgatccgcactctcgtatatccgccccagcgtatcattcagagatctcacgatctcctccagggcatccttaatcttcccgaattccccgtcgtaaacgccgtctaccgtcaatcttaaattaccatcggagagctccgccagaacctccgtcgcatgagagatcatctcccggagagactgaatggtccctttcacgctgtcagccagcagaccaatctcatcatcgctgtcaatctccagattcacactgaaatcgcctttggaaaagccttccacattcactgcaatatcggaaaggggagacagaagttttctcaccagcctgatcacgatgataataaccgtgatcagaataagaagcgaaatcaccaccatcactgcaatcagctgattcctgggtgcattgatctcctccaccggaatgcttccgaccgtagcccagcctgtcgcctcgctcttcgcaaagatagaataatacttctttccctcataactgtaggtcatggaaccggtatattgattccgaatgccctccagatattcccggcctaagttctctacttcttccacctttttgttgatcagactggcatcaaagctgtataccagagactcatccccggtaaccagttccagcgtaccgccttctccgatcctgatgtcctggagcagttgtgaaaaatgatcctggaacacatcaaatccaacgtatcccgtaatattgctgccatccagaaagagcaccggggcaacgatggagatgaccattttcccggtaaccgggtcagaaaacggatccgtgacgaccggccccatcgtctcccggactcgttcgtcccagtcgatatctgccaggttggcagcccatgcctctccggtctgcatcagatacgtgtcattgcctataccagccagccatacggcctgaacgccatcggaaaccatggtgtcataggcccgtttcagcagcgtgaccgccgcctctttccccggcgcaccggcaatctgctctgcggtcggcgcctcttccagcagctggcagagttctttattgtagcttaaaattcccacggcacttttcttgccgttaaagaactcatctacggtgtccaccgcgttcttcgtctgtccctctgtcacctgatagctcaggtttgtaaccgccagcgcggcgatatagcaggtaacaaaaatcaggacagacagcgccggaaacagaatctcaatcagccgccggttgatctttccggatacggttgcccgtttttctccccgccccgtctgttccggcatgtgatgctttgctttttcaacattttcgatcattttgcccctccttactcaccattataatactgaaaggcataacgggcaaacgatttattaaatattccggccatataccggaggccgttctgtcctccccatttcccttatctgtacagttcctcccgacgctcatcaaagtgctgataaatctgatctctcataacggttatggcccttcagcccttttttatatttccagcaccgaatcgcctcttccagggaacggccctcattgtccgcaaagaaatcccgaatatacgtgttatactcaaactgccggtcaatcgctgtctttccctttttcttctcctccagaatccggccgtaagcatcgatggcctccctgtaggtttttccggtgttgcttttcagccatttttgaaaggccacgttaaaggaaaatcccgtgccgatggcctcccggaaaaaggctctgtgcttttcactgcacacaaaatccggttctatcttcatatcctcgctgatcacccccacctccggccggttctttgtctttgcagaaaccggaagaacgtttcccgtatcgaggaaacaggcgatccgctccgtaatctcgagctttccgccggagacaggcagcccgttttcccggcaaaatgccgtcagctcttctttcagataatagtagcttcggaaggtctccccgtccagcgatctgtccagtctgggtctctcgctcattgatcttctcctccctttttctcatgggcaaattccagcttttccacctggtatgttccgccttccagggtcattaccgccatggtgatgggctggtgaaaccgcctcggcccacagcttcccggattcagccagagcgttccgtcgataatccgctcgtcgtatcggtgggaatggccgtacagaaccacatcggcgtctgatacggcttcaggggaagcttcctttttattgtggatcatgtaaaatgacacgccctccagagaaaagctcaattcctccggcatgccctctgcccactccttatcgttattcccacgtaccacatggagcggcgccagctcttccagttcctttataatggtttctctgtttatgtcgccgccgtgaagaatcacatcacacgtccttaaaacttccttcacctctgaccgcaagagtccatgggtgtcagacagaattccaactctcataccagcgttcctttctttccgcaatatggttatggcgggtcccatgcaatggcggattcccatgcaatggccgttttccctgcaataacaggcttcactgcggggaggggccttacagcagtgaaatcgcctcgcggatattctccaccccgaccagacggattccctccatctttctcatcttatccagcgaggtcttcggaagtatacacgtctcgaatcccagctttttggcctcgttcacccgctgttctgccatgggaaccgcgcgcacctcaccggccaggccgacttcaccgaagataatcgttctcggattgacaggcctgtcctttagactggagatcaccgccataacgatagccagatccagcgccggttcattcatccgcaggccgcctgcgatattcacataggcgtcataccgggaaagctcataatggcaccgtttctccagcaccgccatcagcacgttcacccggttataatccgtacccgcagccgtcctccttggcataccgaacagcgtaggcgtgatgagcgcctgcacctctaaaagcaccggcctcgtcccctctaaggaacaggccaccacggctcctgacgcatcctccggacggccgctcagcatgtattctgacgggttcttcacttcttccagtccgctttccctcatctcaaaaacgccgatctcgttggtcgagccgaaccggttctttaccccgcggataatccggtaggaggcacttctgtccccctcgaaatagagcaccgtgtccaccatatgttccagcactctcgggccggccaccacgccttccttcgtcacatggcccacgatgaaaatggcaattcccactccctttgcgatctggagcaggagattcgtagattcccgcacctgccccacactgccgggcgccgaagtcacctcctcgcggaacatggtctgaatggagtcgataatcaccacatccggcttctccccggagatggcgccctcgatcgtatcgagatttgtctcacagagaaattttaactctcctgccacagtcccaatccggttggccctcagcttaatctgttttaacgattcctcacccgaaatatagagcaccttctgccccgatgcagccagattcctgcacacctgcaaaagcagtgtggactttccgattccggggtctcctcccaccaggacgagagacccccgcaccacaccgccgcccagcacccggtccagttcttcatatccggtctgcatacggtcctgttcatccagcgatatctccgataaataggaaggcctgatctttgacaagccgccctcccccacgccgccgagtccgttcccggaggcgcttccaaggcccctccgcgccgcaggttcctttttcgccgtcagttcttccacaaaggtgttccactgccggcatccgggacactgtcccagccatttcggcgattcgtatccgcattctttgcagaaaaatgatgtcgctttcgcttttgccatgctgctcctttcctacgaaaaaagaggctggtaaaccgccagcctctttctgccattctgattttatcttcttacgactttcacagacacaggttcttcctcgttcagttccacactgacagacagcttaccgctcatgttggtcatcatgcttcccactgcagcgtcgtccacgaatacttcgtattcggtatcatcctccagctgaatagtcagctgcgcgtccttgtctccttcaacggaaaactccacgccgttgttcgaaacggtaaaatgctccacagcagttcccggcacagactcatagacgaacatgccgttgcgctccagtttcgtaatctcataaaatgtcttcactttatataaatcgccatcgtgctcaaaatcctgtaattttgactttgtgcttaatttgtaattaccaaaactgattgttccatcctgctctgtgcggattaattcttcaattaccggcatctgtacgccctcctagtattcttgtttacttatcctttttgcgaagcgctctgtaacgatttcgcttgtcatcattatacacgaaatcaaatcaaatggctagcacaacattgtataaattcctgtaaattctgcacccgctatttacgccaggggctcgtatgcgaagctagacgcagggtccactgcgccgtcacttcgcaggcaggcccctgacgcaaatatcaggcgcataattcacagaaacttacacaacgttgtactagttctttatgagctccggaacagaaaattttaactctgcttctccctggctcaccagaacttcgtccccttctttcaccgctccatccagaatttcctctgccagcctgtcctcaagacagctctgaatggtacgtcttaacggccttgcaccgtatttttcatcatatcccttgttaatcaggaactcttttgcagcctcatccacggagagtgtgatgttcatctgttccttcgtccgcttcatgatttctttcagcataatggtcacaatatccttcatatgccccttgttaagcgggtggaagacgataatctcatcgatacggttgataaattccggcttgaatatatgcttcacttcctccatcacacggtctttcatcaccttgtaatccgctttctcatcggcaactgctccaaagcctaagcgcttcggggaaatgatgctctccgcacccgcgttcgacgtcatgataataaccgtgttcttaaaatcaatttttcgtccctgtgcgtctgtgatatggccgtcatcgaggacctgcagaaggatgttaaatacatccggatgcgccttttcaatctcatcgaagagaatgacggaatacggatttctcctcaccttttcactgagctggccgccctcgtcgtagcccacatagcctggcggagagccaatcatcttggagacgctgtgcttctccatgtactccgacatatcgacgcggatcagtgcgttctccgtaccaaacatggcctcggccagcgcctttgacagctccgtctttccgacacccgtaggccccaggaacaggaaggagccgattggccgcttcgggtcctttaacccaacgcgaccgcggcggatcgccttggctacagcggtaaccgcttcctcctgaccgatcacgcgctcatggagaatggactctaaattcttgagtctctggctctctccctcctccagctttctcaccggaatcttagtccagctggagacaacatcggcaatctcgccctcgtcgaccacctgttttctggtgtctttatccttctgccacttctcacggatcttatcaattttctctttcttcttttcctgtttcttcttgatggccccggccttctcatacgcttcatcgcggattgcagcttccttctgatcctccagcttctcgatctctttctccagatccttgatctcaggcggctccacaaatgcggtcagacgaaccttggaagcagcctcgtcgatgacatcgatggccttatccggcataaaccggtcgttgatgtatctggcggaaagcttcaccgcggctgtcagggcttcatccgtgattgtcacatggtggtgcgcctcatacctgcctctcaagccctttaagatggctacagcctcctcctccgacggttcctccacggtgaccggctggaaacggcgttccagggcggaatccttttctatatacttgcggtattcttcgatggtcgttgcgccgataagctgcagttctcctctggccagggacggttttaaaatgttggaggcgtcaatggctccctccgcgcctcccgcgcctatgatcgtatgaatctcatcgatgaacagaagcacctctccatcctccatcacctcagcaatcacctttttgattcgttcctcaaactcaccacggtatttggacccggccaccataccagacaaatccagggtcagaacgcgcttctctgcaatggtttccggtacatttccctcaataatcatctgcgccaggccttccacgacggcggtctttccaactcccggctcaccgatcagacacgggttattcttcgtccttctgctcaggatctgaatcagacgcttgatctccgtctcacgtccaatgacaggatccagcttgccctctctggcaagcgccgttaaatcgcggctgtaactgtccagtgtcggtgtgcttccctttgtcctggagccctttagaagttcctccttgttggcaggcgcatcctcacccatggcggccaaaacgtcgatataaagcttctggatactgatgccgatggtattgagcagcctcgatgccacgcagtcattatcccgtatgatggaaatcagcagatgctcggttccgatcagtcttgccttaaaacgaaccgcctctttatagctgttctccagcactcttctggcgctgggggtatagccgttctcctccatgcggaccgtctggtccggagagatcagctggcttacaaggccaatcaccttttctttcttaacgccgttctccgaaaggactcttgcggccacaccgctgccttcctctaaaagtccaatcagcagatgctcggttccaacatagctgtggcccagctcctccgctgcctggacagccagattaatggactctctggccttggctgtaaatctgtctatcatatcagtatgtcctccttgttattatctcccgcctattttgccaaatcaggcagctctctgcggataaattccgcccttgcaatatccagttcttccttgcttaagggcctgtcggatatcttctgtaaatttgccggctgcagtcctagcataagacggtaaacggagcacggttctttcattgcaagcagtccgtccgccgttcctgccatgacctgggacaaaaagatcattccgtctctggccgtaagcctcctggcatattttaaaacaccgtaagatttgtatacctcgtcttcccgttccaggcggcgccgctggagcgacatcttcctgaccgtcatctcctggttcgtcagctggatggccgccttcgtaaccacatcggcgatctccttttcgctctgtcccagcgtcttctggttcgatatctcatagagggagccaaaattctcctcaccttcgccgtatacgccgcggaccgctgtcccgaaccggctcatgtcagcgatcagagccggaaactttcggcctgatgacagcatgggcagatgtaccaccacagacgccctcagcccggttcccacattcgtcggaaaagatgtcaggtagccgtatcggtcgtcaaacgcatagggaaaccgttcattgatataatcatccagggcatctgcccgctcccacagttcttccagatgaagtccggaagaaagcagctgaatccgtatatgatcatcgccgttcagcaggatactggtatcctcgtcctcagacagaatgatgccagccggcgcctttttttccactgcggcacggtttaaaattctccgctcccgcagggccgcacggtccagttcctccagttcttccagcatggcatattcgtacttctttccttccacctctgataaatccttcagtccgaattccaggcggcggaccatctcctcactctcctgagtcccgagcatggccggaaatttatattcttcccagtttcgcaccagacgaatgcggctgctgatgacacccggccggttctcgtctgtcttttcaaaccatctaagcattcgcctcatgtcctttctttaattctctgattttatcacggcagacggcagcggtctcatagtcctcaaactgcagcgcctcttttaattttgcgtccagctccatgatttcctcttcccgttcgcagacggcttcacccgccgccccgtcctgttggctctttatatccggagctttataagaaatcttctggtacttcggctgctttcccgtatgagtggtacttccctgcagctgctttaagctctcctccatcaggggaccaaacacactgtagcagtcagcacagccgaactggctgtttttaataaactcgtcgtagctggtcttacaggttggacagaccacctgatgcagcttatccggcacccggctggtatcctcgatgccgagaagtcctgacagcagcttgcccaacggaaaatctccgtcaaaaatagcggaatacggtccgaaatccatctctttggcacactgggcacagaaatggtgttcctttttcacgccattgattacctctgtatactggatattcgcttcgcgaattccacatctctcacataacataagtatcctccattcttccggctgttcgttacagtctgctccctgcctgaagctgccaacaatagctattcctccttctggcctctggaaaacagcatgtatatctcatctacaagctggtgcacctcgtcacaggtaacattcttgcagatgccacgggccagcacgacgcttaagtctctcctcatctcatccagaacgcgcatcttatccacatccagggacacgaccgcccccttgcggcggtccagcttaacaaaaccttcctgttttaagacagagtacgctttatttaccgtgtgcatattaattcctatattatcagccatctggcgcacggagggcagaggatccccttctttaatcgtctccgtggcaattccaataatgatctgattccgaagctggatataaattgcctcatcactgttaaaatcgatttgcaatatcatattctcaccatctttcgttatatctgttatacacataatagcacacaagaattcttttttcaatatgtaatatatttacatcggacattccctaaaaagaaccataaaaacagcaacaggaccgcttcctgtttcagaagcagtcctgtccatcattcgttttctcttttaatcatcaagatccataaattcaaaatcatcatcgtcttccatctccggatatctcactgcacgatccggtctggacggttgtggtctggacggttgtggtctgccctcctggcctctcattgcctgagctgcattccgtggatttggccgtggtgcagccattgtctgctctcttacggttctctgcggtgcagctgcgtccctctctgcctcttttgcaagacgggcggacagtttcttctccatatcatcgagactgtcttccatctcaaaatcatcctcttccggttcttcctgtatctgaagaggtgcttctccctccccctcaaactcatcacgggtatagcggcgcacacggcccgcctggctgtccggctccgtaaagaagccttcgggctcctcagttcttccacgccgttcctcccggaaccctctgtccgaaccatttccaccccgttttaaaaggatcagaatcacgatcagaaggataaatgccagcacgcccacaccaatcaggatataccgctgcaggttataatcacggacgaggctgttgtaatcctctttcatcttgttataggaatccatggatacgccggaagcatagtaccgctggatcgtcttttctgtcagatcataccgatagaagttcttttctccattccagttcatcgcatagaacaggcagtactgcggatcgccttcggacttcgggatccagcccgttacacggactccgtcgatatcaatctgacgttcttcaaagccctccggaaccgttacacccgcatcgagcggcacgattacgatcgccttggagcttgtctccactgagacgaactgtgaccaggaatccgcctccgcattatagatgtagaagccgccgtttccgcccgcatcctggagatacaggagcgttaaatctttttccagaccttttccggccatcacttcggttcccttataatcatacgtgcctgcttcaaagccctccggcaatgccgactcgtcgaaggaagccgccaccttatattccgtgccgttcaccgtaacagcggcgtcaccgaattccgcggacacatctgccccgatgcttccgcccggtgccgtctctccgccttccgccttcgtcacagcaatggtatagttcttaacggtctctccgtcctctgccgttacattaaccactacctgattttctccggcctttaagcccttgtcgccctgcagcctgacactggcgcccgcgttggccgccaccgcgttcactactaagtctacggtgtttccctccacggacgccgtatagttttccacctccggtgaaaactccggtgaaagctcacctggcgatatctttaaggacttgagcgcggcatcctttgaagaggtagccggggaagttactttcacagtagagctgccctgctgatccaccgttacaatctgggaatccgcatcataaatctcctgggatgtcacagaaatctgtgtatttcctgccttcagtgccttaaattttaaggtaaagctgaatgatttctgatcggcggcatctgtggtatcctgaagctttaacgctcctgccccaccgtttgcaccgttaccgctgataaattccagtgcggccgaatcataagccaccatgacgtcagccttgccaagcgcagaatcactggtgatcttcatggtaactgttacttcattgcccaccataaccgaggggtctgaaaatgcaattctcgtattggcagcccaggagaccatctgtccccatggtcccatcactgccagcatgcagaccagcataaggccggccatcagtcgtttcagttttattttcatagaaatctccttacttacgtttagttagaaccatccggggcgattgttatattgcttccgcccggtgttcccgcgctgccgccggaagacggttcagacacgcctggtccgctgcttacgccaggtccgacctctccgccgcccggtcccgctgaggaaccgccgctgccgccggtgcttcctccgacagaggaggaatacgtcgggccgttgtcctgacggaccacgtgaaccacatactctctgacactgccgttctgagccgttacggcgatccgcacatcgttttcaccgttctgcagctggattgttccggagccgctgactgctgccctgctgtcaattgcaccggcattgaccgtaatactggaaacggaaggatcaacaattaaattatactccagggtatctctgttgtaggttggcgtcatcacaaatccatccacacttaaataggacagcttgttatttggattgccgtctgtggtcggctggctgcacgcgttatccggcatattgttataaaccggaatcttaaactccagagcagtctgcttcatctcgtcgttataagccttcgcatagactgcgccctcagaagccgcgccctgtatattagtcatatactggtgcttatagagattattcccctgtacgttaaatttcttcagataaaatgtatcctgtccaacttttacgtaattattaccataataaagagctccgcccaaaattgatttttcaggggaattccatggtctctcgtagctgcctgactgagaagcccaccatagtcctctctgtacggcagacatactgcccgactgatatgcctctatattaaagaaattataatagccttcatatcccggttcggttccggtaatacttccgccagttccgctcgaactctgttcctggataatcatggcagccagcacatagggattgactcccgactgagttccggcgttcatgataatatcaacatagttggtgcttccgctcggtgtcacggtcccgcttccgcttccgcctgccgaagggccggtcagactgacgcccgggccgtactccataagcacccggggcgtgttcggcgtaatggaggcgtgaggcgattcctgactgactcccggcgtattgcccttgctgggagcagcgctctcgatcgtatcagaacctcctgcccccgaggaacccccgcctgtacttggaagactaacccccgggcctccaccggaaactcccggaccataggaggaagaatcccctcctcccgggctgctgcctcccggagacgaacttcctcctccggctgcggttcctgataaaaaggttccttttaccatcgtctgaagcccctccacggtgtggctgttgctgtcgtacgtatgcgtcaggaactggaagacattggtctcatccagaaaatttctcggatccatataatattttacaatatcctcggaggccgccacccaggagcttccgtcgaagcctgaccaggtgctgctgtcccagttaaacgcgccatccgcgatggacttccaggaagacatgctgttggtgtgaaccaggtttcgccccacctggctctcctccttcacagccgtgttccaatccaggttcgtatgctgagccctgaacacccacttcgggtactgtgcatgaagttcccgcagcctcactttataactttccggaaatccctccgagtttaaatgcgcctcaaaatcggcatcactcgtgtaggaaaccggaaatttcaaataactctttgaaacgtatccggtcgtctcagtcccgcctgagccctttacccggatctgataccacaacgccccgtctgaggccgtcttctcatctataaccgttaccgccgccccgctggtcagcttcgtaacgatagaataggtcgtaccaggaccgcttctcacgttcagcgaagaagcattaaccgtcgccgacctctccatgtatgccatactctctatgtacggtgatacgtatcccacgagggaatcaatcaccaggacactggccagtattgctgccatcttacgagcttttttatatctcctcatctgtctctcccaatatgtcctcagtatttttccatttatactaatttatgtaaatttcgcattcaattaattataatgacaaatactgccatgtgtcaacctcaacacgaaaagttcacacaattggcagtatttgtaagaaaatctttaaactcttgggataacacaatcgacaagatccccagtctcttccatatgtttcatcaaccgactatgcagccgtgccatcacgggctgctcccagggagacctgcatatcagcggactcatttcatatggatctgcaattctgtcaaacaacaggaatcttggtatttgttccggcatatagcccttctcaatcacatatttgtattccggtgttctgatacagcgccagccgcttctttttggatccagccccttctccttataagcttctaaaaaaatgtcacggctgatataggcagaagagtatacagcctcattttccggctttttaccgcacataatccagtctgccagacatcttccctccgccgatggaggtatcgcaatgtccaggagtcccagcagggtaggaactatatccacagtttccaccgaaatatcattacggcccgcaggcagtttttccggatatctcatcaggaaagggatgttaatggattcctcataccaggtatgttttcccacatacccatgtgctcccagatgttccccgtggtcagcagtcaaaagaacgatggtctgatcgtaaagctccatctccttcagccatgaaacgattcttccgaactgctcatccagtcccgtaatcgccgcataatagcagcggactgcctcagccagttcctcgcggctcccgaatcccggttctcccgtctgattgtcaaagcgttccccttcgacattgggtggtaaatccggttctaagttacggtaacggttataatactctttcggaaccctctcaaagggaggatgcggcggattccaggaaaggaacagggcaaaaggctgctccttcacacttcccataaattccagcgccttatccgtctcatgaaccggtgaccaggcatccgcatagattttttcactgctgtcttcccagtaatgcatctgcaaatggtcgttccatgcgttataggcatgccaatactcgaacccatgccgcatctttcccggaggcgtatatgcatcccagccttccgctccagacaccggatgactgacggagttaagttcaggactgtccaaatgccattttccaatgtagccggtccggtatccatactcctttaaaacctggctgatgcataattcatccggtgacagacacatatcatatccggtcatgcagtttccaaagactcctgtatgaacggcacggcgcccggtaagcagttcacttcggtaaggtgaacacaacgggcagccgctgacagcctgatccgtactaaatgcctcctcagcaaattgatccatattgggagttacaatctgtggatcatgaattccccttgctgtatttctccattgatctgcgaatacgacaagcagattaggccttttcatgacgcattctccttttcgtttctttcatacccaactctgatcacacgcagttccagaggttccagactgtacgcattctcctccataccttcttcatacatgcataggttagcattcctgcgaaggcatgccgtctgcacatccagccccgtatttaacagtgcaagaaggccttcccccgtctctctgtctgaataatagaacggtgcaatattgggactgtcttccacaagtacgggaaaggtcccctttgacagccattccacgatacgcatcatctgccagcttctgctccggtatgcaaactgccacgtccctatataaccgggaatcacgcagactcttccccccagtctgttctcgtacaatacaattccctgtcccaggaccttccggtctttatcgacatatacggtcagaacttcgcagtcgggatcatactgaaacagaggaattctgatttttttgtattccagtctcatccagtcagtcggcagcagattcccggagaatgatccatgaaattcttctccgcacagaagttctgcagacggcgacctcagttcagctcccacatcttcacacccgatatatcttcccagcccgcgtctgcataaatacccggccgctgctccatccagaatcagacctttttccaacagcctcataagttcctcacggctgcagcagagcgcattgacaccggacagcagatttacttccctctcccggaaacatacaggaataccaagcagcggaaaaagtgtgtcaaactccctttttaaaaccagctcttccagccgtcctcctggtgtctccagcagattttcctgccctggataccataacacaccaagcccatcctgctcttttcccctgcgcagcccgtccatcttaagaagttccggcttcttgtctctgatcagctcaaccatgggcatctcctgcacataaggcgtccccataaaatcaaaaacattcatggatattttgtccgcccccgccagcacatgaagcttcatctgcagtccggtcatgttcagactctttgtaaatctcgtatgaggccagttttccacttcgctgataatttccacctcagatgaaagctgtgccatgctaagcgccattccctgatggactgcaatcagatcctgatgcagacagtcggagtatgctcctccaagaggcctcgaaagaggtctgtttgctcctgcaaatgtacgcagaagcgattccatatctcttccctgcagcgcatgggctgcctccccactgttcatcaatccaatccttaccgcaggatcgacgctgtgtaccgcctgctcaattctggctgccgccttgctttggccttcaaaattcacttccagccaggcttttctcaccgctcttccttcctctgtgttgcgtgttaccgcctccaaaagctgactactgtcaatctctctccccagtttttccgatacagcccgcgcatggagtgagcagaagcatccaaaggcatccgaatgattcagacttcgaaaatcgtcatccaccatcagaacagcaggatgggtgcgcgcataaacggtacacacgtctgcgatatatttctgccacccttcatccagaatacagtatacagaatctgccggttgaaggctttctcctgtaaatttactatatggaaggatatctttcttttccagtctgcagtctacatgccccacactggtagccagattgatgctgtatgtaatcttctcttccttcagcctctctgccattttaccgtagatttctgccatcctgcgatgcttttccaaaggaaatggagacatcagaatctgatggcactgttcctttaaataaacctcttcaattccagcttcatggcacacccaaacaatatcttccagttgacgctcccattgatcctcatgaatcactgcgcgtaatatatagttcattttggcctcctgctaatttttcattccgctggtcgcgattccctcaataaaatatctctgcgagaacaggaacatcacgataatcggaatcagcaccatcgtagccgcggccatctggagcccgtaatccacggaattattcacctggaacatcttaattccgacagacagcatctgtttggctggtgtggttataaatatatacggccccatataatcgttccatgcccagataaaagtaaaaagaatcatcgtaataactgccggtttggcaagcggaaggacaatctgtgaataaattttcaagtgaccgcagccatcgataattgccgcttcactcagtgtctccggtattcccagaaaaaactggcgtaccataaagacaaaaaatacatcaaagatagacggaagaacgatactccacatggagtccgtgatcccaaacgctttaaagatcacgtacttcggtataataaccgcatccggcggaatcatcatggatgaaagcagtacaacaaagaggatatcccttcctttaaaacgcagtctggcaaacgcatatgccgtcagggtaactatgccaacctttagcaccagtatggttccaaccataacaaacgtattaaaataccagcgtacaaagctgtactgggctgaaaaaacttctttataattgcttgtaataaagtgttccggtatcagcttcaccggataaacaaatatttcgttcaatggtttgaaagaagcggacagcataaaaataaacgggaaaatatttgctgcccccaaaatcaggagaaccgccgtcatcaccatctttccaaccctttttttattttgcttcatagcgataccctctcctaatatatttcgctgcggtttttaccgacccactggataacagtaacacccataaccagaacaaacataaccatggcctgagcactggcatatcccatccgcgcagatgaaaaagccgtatccacaatgttaagaggcagtaccgtagtggaattccccggacctccggcagtgagtacctgaatgatcgtaaaattcttaagcgaagtgataatagaggtaatcgtcagcaaaaatgtagtgtttcttatgagcggcagcgttacgtaaaagaactgctggaacctgccggctccgtcaatctgtgccgcctccttcagttctgtcgggacctcctgcaaagcagctaaatacgtcacaaactgcagccccacttctctccacacagcgatcatcaccaccgaataaagagccgttttcgatcccatcagccacattggcgcctgattgacccccaatgcactcagggtctgattcacaattccatcgaccgggtccaaaagaatagaccatacaatggcgattgctaccatgttggatacgtatggcatgaaaatcatcgcccgtattccattgcggaaatgaatcttctgatttaccaggactgccagcagaaggccggcagccatgacaaacggtacaaaacagatcgaataaacgatgctgttgcaaaatgcgttccagaattccggatcccggctcatctcaaagtagttgcccagtccaataaaatgtgtcttgtcaatcatactgatgtatctcatgtcagtaaggctgagcaccgcggacagcagaacaggcagaaaatgaaacaaggtaaatccaatcaagtatggcgtaataaacagccatgcaatgcgcgcctcttttttacgtaaggaagaagtcacgtattatcatccctttccactctattcttttacttgctggcggtttcaatagccgcgtccgcttttgtcttgatatgtgccacggtatcatccagcgactgctcaccgattccataaagtccacactcatcgacaataatattcttgatctccgtactcgctgttcctaccggtttttcatcaaaaatatttacatccggatcaaaccacatggcctggatgtcttctactgtaattccatccggttccaatgccggcaaaatctggtctctgatataatcctgaatttcatcgtcagtcagatcaattctggccggaatacgtccatatcccagtgtatactgtttttccgcaaacagtttcaccacgtcaaatgccttctccttattctttgatgtggcaggaatccatacattacttactacaacactgacagatggatcttctccctccggatgaggcatgggcagtactcctgctttccagtctctcggatatttttctttatcaataatccagttcgttgtccagccgccgcagacactcatacctaccctgcctgtggtaaaataatctaccggcatctgtttgctcttttgtaccagataggaaggctgaattttttcagtatttcccagatcgtaataccatttcacactctctttaaacagcggatcatcataattggaggaaccatcctctttataatggctgaaccccttctgcatggcatacatataattataatgaacccagtccgggttgtacgcaccatagatcccggccttttcatctgtcagcttctttccgatttcaatgaatttctcccatgtccaatcgtctgcctccggataagacacacctgcctgatcaaacacgtctttattgtagattgtaatcgctttatccacataagctggaagcccatagattttcccgtcaaatgccgccggataatcaccgaaaatcttttccacatcatatcctgctgcttccgccagggggcccagttcctcgatcactccggcctcataaaactgcttcatattagaataggcatcctctacgatatcaaactcgtctcctgccatcaggctgatcagaagcttattcgcttctcccgcccccggatcgggaagagcaataatctctatatccacattgcaggcttcttccgccatggccgccatctcttcaaattccgcacgtccagcctcactggctttcaccgcccattttaagtgaactttttcccccggctgctcactggcctgctgttctttttccgtttccttgttctcagacgcttttgttcccccttcctttgttgcggaagtctgaccggatgcactctgtgccgtatctgcccccttgcagccgcccatcatggaaacagccatggcaaacgccaatacaatactcaatcttttcttcatggtagttacccctctctttctttatggctcaagtatagcattgggtcaggactgcagccataaaaaagaactacgatttccggtagatttttacgattttcccgtcggtattcggatgattacttccgtcccctccccttctctgctgaatatctccagaccatactgatttccataataaaggccgattcgctgatggacattctgaaggccgatccctcttccgctgttccttctgagttttgcgttctgttcatcatattcaattacattctgttccttcagactttcccggatgctgtccagttcgtcctttgaaataccgatcccattatcctccacgtcgtataccaacatgccatggctgatataaactccgatgcgaatcgtacagtcctcctgttctttcgtaaaaccatgaagaatgatgttctcaacaatcggctgaagaatcagctttaaagtacgcaactgcagcagatcctcatcatccagatcgatttttaagtcaaatctgtcgttatagcggttattttgaagatgtacatagagttttacatgctccagctccttttccacagtcagcatgctgtgtcccttattcaccataatattaaacatttttcccagagaataggccatatcgctgattttatatgcaccggcagctctcgcctgccacacaatggattccagtgtattataaagaaaatgaggattaatctgtgccacaagtgcgtccagctcagcggcttttttcatacgttttatctgatactcttctctgatatatcgctcagtattttccagcatggtattgtaatgatgaatcagccgcgcaatgtcgtagggccccttctcttccacccgaacagaaaagtcaccgttttccactctttccatggatgcaatcatggtttccagaggctttatggcctctctcgacagcaaaaccgataccgacacagagataatcagaatgacggcaatcacaaagataaacctcttatagatcccgatcacttcaccaatcatattattcagtggaattactgctatcgctgtccaattaccgtcattgagacgttgtgacattaccacttccctgttttcaataaaatagtttccagtgccttccatcgctttctttgtatatgccaggtttacaacttcctccggatggagaagcatggattcatcactgtgagagattaaccgtccttctctgtcgacaatatacagatatccttcttccaaaagcttagactttttgtattgttcgtatatctgttcctcgctgagactgtaaatcagagttccctgatatccgccgccatccagtaaaagatttttgagcacaggaatcatgctgtcattccgaagatttcccgtttcaggcgcaaagcagttcttctggagaggataccagtcatagccgtattccagacgcttcttatctttcatcagcgactcagcaaatgcttccgcttcttctgccatatccataggatactgaagattgtagaccactccattcttattgataattcctgccagaactccgctcactctggaatatgaatttcttcgggttaaataacggttcatcagatagatatcaaccagtttttcatgctggttttcataatcctccggtttttgttccagatgctcttttaaatctgaatcgctctgcatgacctccgtactgatctttacctcggtcgtaataaaatcatctacgcttctgcatacataggtcagcatgtcataagagctgttaatcagattcttcatggatacctcaccactgtaacggatcagcataatggaactgtacagcaaagcgaccgtcagtagaatgacatttactacgacaagattacgtttcagcgtccatttcctaatcatagagcttctcctctttctgcctggcaacagtctccctgtaacctgcaggactgagtcccgtataacgtttaaaaagcttggcaaaatatgaactgtccgtatatccgatagactctgcgatacggtacatcttcatctgcccttctcccaccagacgttttgccttttccatacggcatcgcacgatctcatcattaatatttttgccggtctcattcttataaacacctgacaaataattcaccgtccgcccggttttttccgcgatatagttcaatgacatattaaaactggaataatcctctctgataatctgttcaatatcccgtaccagccttgactttacctccgttcccgtgactgatttagccatctggcttatttttgcagtcataagcgcctgttttccgctcagggtatatatatccgccagttcttctgcaaattcagccctggaacacgtctccaacacaggaattccccgcttatccgcatagcggagaagctccagatacatctggatacataaaaaatccagatgacggtaatcgtagatgtactttctcttaaaataactgaaaaagcgttccagttccctctcccagtctgcttccccatttaggaaaactccattgatcaccggctccgccggaaactgaaccaccgtacagtcctcatcaaaaataagatcctgatagctgaatatctgttctgattccacaaaaatcatctgatgcagtgcaatatctgcttccttcattccctctgccgtctctgtaatgtcagtcatggaactgattccgaagcaaagaccgatcccccactccgcccacacttctctcatcaattcccgaatttttctctctagctgtgcctcccccagagtgccggatacaatcacagttatcagttgtcttttattcacaaagacaaaaccatcgctgcttcgaaaatacttctgcacacagcttcttatctttattctgtccttatcattttcctcagcattatctctgcgccagccgatttccaccacatacgcatttcgcggcagtgagataccgtactcagacgccttctcctcaatcgccccggtctcccggtatgccccctcggccagatcacagaaaaaactttccagcagcgcttctctgtttttgttccagtgttccttaaaataatggtactgttcttccttgctccgttcctgatccagaagagccctcagattactgaaaatcttcgaaaagtcttcctcgcgtgacggttttaatatgtaatcaaagaccttatattccaatgcctttctgtaatattcaatatcactgtatccactaataatcacggaccgtatctccggatacttctgatggacacggtcgatcagctgaattccgctcatttcatccatccgaatatctgtcagcagcacatccggaatgtcagcctcgacgagcgtccaggcttcttctccactcgatgctgctcccgttacttcaaatccccattgttcccatggcagagtatccctcatccccttaagggcttcccattcatcatccacaataatcaatctgtacattattattccttctccattttatagaaaaggcgggatacgcacccccgccttctcatcactgcaatgactcgtacgcagtgcgtgcaggtcatcatttcctgtcaatctctctgtcctgtgtctgaaccggtaatttttaaaaggactgtgttcttaatcagaacgattaaaaacacaatccttttctattttacattataccggataagccttgcttcccttatccgccactgcagaatccacaccggtctgctgggctgctctgtactcgaagaattccttcgctacagccgggaacagcgcgtaggataacacatcctcatcctgctgcttccactgcgcgcattccttctcaaactgaggaagctgcggagcaattaagtctgccggacggcaggtgatcggtgtctcgtcaccgatgatcttcttctggacttccgcattgaacggtttaaccgtctgtccgaactcgcccataaggatcttcttggactcttttgttaccatcttgtagcgctcgccgctgattacatttaatacggcctgagtacctacgatctgagaggacggagtaacaagcggcggctcgccgaagtcttttcttactctcgggacttcctccagaacctgtctgtatttgtcttcctgtcctgcttcctttaactggcttaccaggttggaaagcatgccgccaggtacctgatactgtaaggtcttgatattgacacccagaaccttcgggtttaaacggccgctcttaagcgcttcctcacggatcggctggaagtggtcggcgatttctgccagtaagttctgatcataaccggtgtcgtacggtgttccgcggaaggtctcaaccataacctcggtagccggctggctggttcccagtgccagaggtgacattgcggtatcaatgatatcgcagcctgcttctaccgcctttaagtaggtcatggaagcgacaccggaggtgtagtgggtgtgaagatcgatcggaagcgcagtggattcctttaatgcgcgtaccagctcgtctgccttataaggtgtcagaagaccggccatatccttgatacagatggaatcagcgcccatgtcctcaattctcttggcaatatctttccagtaatccagcgtataagcatcgcccagtgtgtagcagagtgcaacctgtgcatggcccttctctttgttgcaggcttttacagcagtctgtaagttgcggatatcattcaaacagtcgaaaatacggataatatcgataccgtttgataaggacttctgaacgaagtactctaccacatcgtctgcatagtgattgtagcccaaaatgttctgtccacggaacagcatctgcagtttcgtgttcttgaagccgtctctcagcttacgaagtctgatccacggatcttcctttaagaaacgaaggcacgcgtcaaaggtagcgccgccccagcactctaccgcgtaatagccgactttatccatcttatcgacaatcggaagcatctgctcggttgtcattctcgtagcaagcaaagactggtgagcgtcacgaaggacggtctctacaatcttaaccggctttttctctatttctgccattattttacctccttgttatgggcacctggcgggcggtgtccggccgccgggtgcgatacatgaaaaatctttatttcactccgaagatagccatgaaggtaccggccgctaccgcggtaccgataacgcctgccacgttcgggcccatcgcatgcatcagcaggaagttggtaggatctgcctcagcaccgaccttctgggatacacgtgccgccatgggaactgcggatacaccggcagaaccgatcagcggatttacttttccgtgagtcagcacacacatcagctttccgaacagcacaccggccgccgtaccaacgataaatgctgcaagaccaaggaatacgatctttaatgtgttccagtttaagaatgcttctgcactcgtggttgcgcctacagacgttcccagcaggataactacgatgtacattaacgcgttgctcgctgtctctgccagctgcttcacaacgccgctctctctgaataagtttcctaacatcagcataccaacgagtggtgctgtagtcgggaggatcatacaaacaactaccgttacgatgatcgggaataagattctctcaagcttggaaacaggacgcagctgttccatcttgatcttacgctccttctcggtagtaagcagcttcataaccggtggctgaatgatcggaacgagggccatgtaggaataagccgccacagcgatcggtcccatcaatgcagtctgtcccagcttgctcgcaaggaagatggaagtagggccgtcagcaccaccgatgatggagatagcagccgccgcttttccattgaatcctaacagaattgccaggaagtaggcgctgtaaataccaaactgtgcagccgcaccgagtaagaagctcttcggattggcaattaaaggagcgaaatccgtcatcgcgccgacgcccatgaagataagcgggggcaggatgctccattcgtccagtttaaagaagtactgcagaagtccgccgccggaaccatctgcaccaatttccttcataatatccggatagatattaacaagcagcattccgaatgaaataggaatcagcagcaacggttcaaatccatgtctgatcgcaagatacaagaatacgaatgcaaccagaatcatgagcagattgccgcctgtcagattaaagaatgctgtttgatgaagaagattgttcaatgtgctaaatatatccatgttaatccctccatatggaatccgcctctatctggcggaagctctgccttagtttaatgtagccagtgtctgacctgcttctacggaatcgccggttgctacattaatgcttgcaattgttccatcctgaggagctacgatttcattttccatcttcatggcttcaagaataacgattacatcgcccttcttaacagcctgtccaggatttgccttaacgcctaagatcttgcctggcatcggagccgctacctttacggatccggctgctccggccggtgctgctgccttcggtgctgcaggagctgccttcggtgccgccgcaggagctgcctttggtgctgctgccggtgccgcgcttccggttccttcttctacggttacgtcataaacattaccattaactgtaattgtataattcttcatgatgataatcctcctgattattatgcttttttccattttcccgccggtgcacgtctgatggagcgtacgacaagaccgcttgggctcgttcctgtagatgctgcaatcgcagctgtaatgactgctaccagttccagatcatcggccaggttttcttcctctgcctgtacaactgccggttccggttccgcagccggcaatggcgccggttcttctttctttcctctgttcttcatcttctcttcaaaacggttgatgtatttgaagcagctgatgaggaaactgataaagatcaagacaagaaatacggttcccatacccatgagcatattcatggcggcctgttccatattttcgcctaatgtgtactccggaacgaaggaaacgctggtaatcgccccttccctgtcagtcgtaatgccgaagtccatctctctcttctcaaaaaccgcatggactgttgcgctgtagccgctgtcaatctcctctacctctgccgtgtcctcaacggatatcatggcgccaagatcatgcttgacgttcttccaggagtccacgccctcggcaagagcttcgctctgctttgcagtctggtttctcacttcatccagctgatcatccggaatgttcacgtaagagtttaaatatccggaagccatctggcttaactgagcctgaatgttgacatcgacctctgaggaagcgctgtcagccttgctgcaagcagataatgaaaagagacaggctgccatgcaaagtcctaatgctactcgtttcatattcagtttcatatacctgtcacctcattctagaccgtgccatgttttttatccggacgatcctctctcttcgtgaataacatctcaaatgcagcaatcacgcgggctctagtctcgcttgcatcgatgatatcatcaacatagcctctctttgcagcagccagtgcactggactgcagcgcctgatagctttccgccttctcattgatgaaggaaacgctgtcatccgccttgccgatctcatccgcatacataatcttcgctgcttcctttgcatccatcataccgatggaagcatccggccatgcataaaccatatcagcaccgattgacttgctgttcatcgttaaataagcggttccgaatgcctgtccgataacaaccgttaccttcggaacggtcgcattggcaaatgcatacgtcagtccggccgccgctttggcgatctttctctctgtgcacttgctggccttatatccttttacattgacaagggtaagcaccgggatattaaacgcatcgcagaactccacgaattcagccgctttggtgcagccctgagaggttaaaaccgcatcgtactcagcagtcttcaagccgctctcatcgtaggattccgtgcggttggcaacacagcccaccgtcgttccgttcaaacggatgaatccggttaccatggaaggtgcgtaatccttttttacttccataaagaaattatcatcagaaatctgagtcagcgcgatcgccgtgtctcccacatagtttgcaaggtcggagcacacacggtttaaatcgtcgttacactcgtcataagacatgtcatcttcgttgttggccgggaggatggtaaccagggttctgataccgtttaagatctccgcctcatcgcctgtgaaatctgccagtccggtttccttactctggaaatcagcggacgacgtatcgcatttgccggtatagttgccagccagtgcgttcggggaattcacaaacacctttccgttcctgttctccacaaatgtgaaatcagccatagctgcagataccgccataccgccgccgcaggttccgaataccgcgctgatctggggaatcacaccggaagccatggtctggcttaaataaagctggccgaatccatccagggcatcggtagcttcctgaagtcttaagcctgcgcagtcgatcagaccaatgacgggagcgcccgtcttcatggccgccgcgtaaagattaacgattttttttgcatgcatttcgccgatggaaccgcccagtacggaagcgtcctggctgtacacatacacaaggcatccttcgatggtaccgtaaccggtaacaacaccgtcagcaggggtttcccttgatgtcatgttgaagtctgtgtttctggccgtaatataggcgccgacttcaacaaaactgttctcatcaagcaaggcattgattctgttgcttgctgatgtctgtgctgaattactcattttgcaatcctccattttgtaatatttgtacggactctgttaagcaattaacaaagatccgtagaataacaccaatttctgccgattataattgtataattaattatgacaaatttcaaggtttttttggaaaaaaaagaactgcattctatggatttttcataatccacgtcctgcagtcccaagaacttgtcagcattatttcacaatctttctttacttccggcgaaatacacaagttttgattgtttaatttgtaactattgcctacgctactcccggatatccgtgatgccaaacgttccatcctctgttttcttataacggatatggggattctcctctcccatcgtcacaccgtccgcattcgcctccagagtcgctgtgtccactccggcaatcgccaccattaagtcgtctccgaagatcaggtccggattctgctttaaaaactcgtcccggtcttcaaatgtcatcttctctccgtctgcggtctccagattcagcggaaatgccgagagatctgccaacgtttccatatccctgtccgccactgcttcctgaatcctctccgcaaaggcctcaatatcctgaactccggcccccgattcagccgcgtcttccgcatccgcacccggaccgtctgccgcgcgctcctcgttctcctcagccgccggagccgtctcgtcctctttttctgtctccgtgtgaagcggcgcagcctcttctctcacagcctctgtggcatttgccgctgtcgtctccgcagctcccgctccgggtgacatacttttcttaaaacagccgcccaacgccagcaccgtgataacagccagcagaacggccataagctttcctcttcccgccataagtgcacacttcctttctgcgcttcgggcaaagtatataccacgcagaacaggaagtcaatagagtttccaaaactgtaaatgttagtcagctttctgtaagattctctccggctccttcacagtttggagctcgctgcggccctatttatactccttatgaagcgtaaagccgcggccccgcacttcgctgacctggttgataatcataaatgcattggagtccagtcccatgacgagttcattcagcttcgacagctccctgcccgagatgaccgtaagcactgcataggaagcctttctcaaatggcccccttcaatcagaagcagcgttgtcccgcggtccatcctgttctggatggcctcactgatgatttcacactgttcactgataatcttaacctgcatctggttctggccgatcatcagtaccttatccagcaccatggtgtaaagaagtaccagcagaattccgtacaggatcttctccttacccgcgaataccatctgtgtcagcaggatcaggcagtcaaacaccgacatcgtcatggagaccggaagccggaattttttattgagaatcagcggcgggatatccatgcctccggtcgatgctcccgcccggattaccataccgattccggcaccgataaagagaccggcaaagacagtcgccagcatcgtgtccccggtgatgggagcggtgccgaacagcccttcaaaaacgccgagaataaacggatagtaaaacgtgctgatgatcgtcgtaaaggcaaacgctttgccgagaaccgccgcgcccgccacaaacatcaccacattaaagacacccacaaacgccgcaatgggaattccaagtttatactgggccaccagcgcaagtcccgtcgtccccccggtaataaggccgtttggaaggataaagagggatacagccagtgcatacagcgtgtttcctgccagcacggttataatttttttcatattcatacagatctgtcatcctttcatcggtaaataacacgcctcccagtatagcataatccccggtttcttaaaacccccgccgttaagatttcgattcattttctctttcctggttacagttcctgacagcctgttacaatagaaacttccgtttcagttccgcccgcttccgctcatttaaaccgatccgctcatacagataggcttccacggaaccgcaggccgcctccatggcagaaaacgcatggcggatataatcctccgataccgtcaaaagcaccttcacacactccgcaagcctcgcatccttcgtcttctcccgcaccagagccgcggtcttctccgcattttccatcacaaattcattcgttctgacaaaatcccggataatcgtatcccggtctacggaaagggcggataacagcagggctgtccccacacccacccggtcttttccggctgtacagtgccagagtaccgcacggtcatccgcctccagaaggatgtcgaaaaagcggccgtaatatgacgatgcatgttcatccacaacgagattttcataaagcttatccacatagagctccggatctccgcccagagaagaggcgtgttccagcattccgaggatggcatcctgcttcggctttccctcctcttcatcctcaaaggtaattcccaccgtctcctcattcagaatcggattaaaaatattggtgacgccgtccatgtccggatccggtttctggcttctctccacggctgtccggaaatccaccaccgtccccagacgccactctcccaccagcctttccaagtccgccggcgtggcctcatagagcgccccgctccgaatcagccgtgccggtaaaatcttctttccctccatagtccggattccgccgagatccctggtattgggaagtccctccagtggaatccttcctgtgcagtgatttgctgttctgtttacattctgttccatgatgtacgcctctttctttcgttcattcttcctcagtatttatcggatccaagtgttcccagtataccacaaatgcgcgtttcctgaaagcccctgcttacagtcaaaagctgtgatgtcaaacggcgttgggggccatttctgtacactgcagagagcatgattgctcacagagcgggcagacattcattgacaaacgcaaatggcgcccgaaagagctgtatcacatgatcgagacaccaccggaaggtgattttttccacatcttcggtcagataaaccggaaacgtcttcacagtctctccctgcaggcggtaggtcaccgttcccacagtctgcccttttttcagcggtgcttccagggtatccggaagttcttcggatacggtcacctcctcatcctctgccataagaagcttcaggctcttctcttcctccttcagattcaaaccggcgtgaaccaccaccgggtcgcccggattaccggaacacgggactccattttccaccggtatttcaggaaatgtcttctcctgatagacttcccggtactgataatgctccatcccatatccgaacagcttcctggcatctgaccatttatacgtcttgtgcggcggccagccgcagcccagaagcgcaatggtaaactctcttcctccatcctccagcgcccccacataggagtaacccgctccccccgtaaaacctgtcttgccggaaaaagcgccgctcatcatcgtcagaagcgcattgtggttctggcagttataagaccgcttcccctcctgatccgtaaaataatagctctgcgtacccgtgattttcagaaactcttcctttttcggagacgtcccgatgcagtaattcatgatgcgcgccagatccgcggccgtagtggaatgctccttcatctggccgttctcctccctgctggcgtccagcccgttgggggtgataaaatacgtgtcactgcatcccaaatcccgggctttttgattcatcagggccgcgaagccctccacgcttccgcccacatgctccgcgatcattacggccgcgtcgttgtgagattccagcatcaggctgtagagcaaatcctccagccggaaggtctgccccttatacacgcccagatggaccttcggctgagccgccgcattctgggatgcggtcacggtgtcagagagatttccatattccagggctatgatacaggtcataatcttcgtcgtacttgccatgggacgggccacgccctcatttttcccatacaggattctgcctgttttcgcgtccatcaaaacagccgactgtgcatacagccccagttcatccttctgattttgttgttcctgcccatccgtctccgcctgcgccgcagtccgcccgcatattcccgtgcacagcaaaagacacagaaaaaatagtatgacctgcttcatcctcataccaccctgtatgattttattttatcctattccttcctttttttatttattccggttaagagtcccgaccttacgtttggacaaaagtttccgctttacttgcgaacgtatattcgatataataaagacagaatggagggaatcttatgacgcagagtccgcttgtctttcacattgatgttaattccgcatttttaagctgggaatctgtctgccggctggcagaagatccgaaggccctggatctacgcaccatcccatccgcggtaggcggggacgccgcttcccgccatggcattgtgctggccaagtccactccggcaaagaagtacgggatcaccaccggagaaccgctggtccaggcgctacgcaagtgcccggagctgtgtgtcgttccctccaggttcgatgtctatatccactattccggcctcctgatgaacctcttatccgattacaccccggatattgaaaaattcagtatcgatgaggcatttttagacatgagctctaccatccatttattcggggacccgtggaccactgccaatcagattcgtgaacgggtcttccgggaactgggatttactgtgaatatcggtatcgcaccgaacaagcttctggccaagatggcctctgattttaagaagcccgacatgtgccatacgctctttcttgacgaaatcccgaaaaagatgtggcccctccccgtccgggaactgttttttgtaggccgttccgcccagaaaaaactggaagggattggaatccacaccatcggccagctggccgcctgcgatgtggagctgttaaaaccgcttctgggagagaagtatgccatacagattcacggctacgcctgcggaatcgatccctcccccgtggcagaacgtgaacccacaggcaagggatatggcaacagcaccactctgtcccgggatgtggatgacttcgatacggcatgcaccgttctcctgtcgctctgcgagaccgtaggggcgcggctccgtgccgaccacgtgatatgcgactgtgtctgtgtagagatcaaagactgggagtttcatgtgcagtcccaccaggcgaccttaaacagccccacggattccaccacggtgctctacgagaatgcctgccgtctgctaaaagagttctgggatctcactccgctccgtttgatcggagtgcgcgccacaaagatatctgacgacgaattcacccagatcagcctgtttgaatcggagcagtccaggaagatgaaggagatggaaaaggccgtggaccagatccgcagcaaattcggcaccgacatcatcaagcgggccagcttcttaaaaaaggatactatcgtcgatcacgccgccagtaagcagaagcatctgtccagtcggtcaaaagaacggaaaagcggttcagagtcaaaaaaggagcggaatgattaagcattcccgctcctttttgatcttttccgctcagatcatatcaattggtttaaatccctcaccaaatacctcattggaatccgtaatgatgataaacgcgcccttgtcgatctcatgaacctcccgccggataggaattacctggctgttgttgcatgcgcacataaccaccttcttttcatccagagaataggagccctgcccttccagaaacgtgcagccgcgcccggtggcctcctcgatggcctccgccaccgccgcttcacacgaggtaacgatcagcatcagctttccggcgccaagaccgtacatgatcttgtcaatcaccatggtagtcacgatggacgagatcatgcccaggatcaccgcgtccagattacggaacacgaagccgcccgcgatgatgacgatggcatccaccaccagggagatctgaccgatcgtcagatgagggaacagctttctgatcgccataacgaggaaatccgtgccgcccgtggaaccgcctcttaaatagacgatcgtaagcccaagccccgaaaaaataccggtacagatcgaggcatagaacggattgccgtcatagacgggaatgattggcatcacatagtccaacacgagggcgaagatcaccatactcttcatggagcgaagcagaaaccgcctgcccagcagcttatagctgaccagcaggatcggtatgttgagcaggatgctcacgatacccatgggaagcccgaataaatagcgaagaataagggcgataccggagacgccgaccggggcgaactccgcattcaccgcaaaattatagatgccgatattaaaaaggaacgcgcccgctatatcacagagcaggtcaatcccaagatcttttgctgtatactgctgtctgattccagtcatttgattctttcctccattttattttctccggcagcggtcctcccggtcccgcctgcggagattttgacttccgcattcgtaatacggactgcccttagaggaagtaatcgtcaatctcgaattccttttttcccacacggatccacttgatcagcacactgatctccccgtcttcctccgcacagactccgcagccttcaacgcttgtctttccataggattccttaaaaataacttctttatccataattccctgatccgccatatgttccgcaaggtcgagaagcacatcctccacgtcttcgtccacatgattcttctcaaattcctgttccagtgcctcgtaaagctcttcattcatcataatcgtcagtcctttcttcgtttcctgtcagcatttggtccgatgcccgcaaattgtcggaattctataagacaattatacatatttaaaatttcttgtcaatcgaagccttccatgataaaatttatgccatgaaaacgacgatgacatacttaatacaacagcacgacacgcaaaagacggcagaacagttcctgctgtcaaacggatattccgcggcactaatccgccggctgcgccgcacggaacattccattttaaagaacggcagccccatttatacgacgcaccgcctgaacgaaggcgacacgctttccgtcacactgccggaagaccacggctcagaaaacatcctccccatacctatggatctggacatctgctacgaggaccgtgaccttcttattatcaacaaggccgccggtgttcccatccatccgtcacaggggaatcacgataacacactggccaacggaattgcctggtacttaggtgaaaagggcgagactgccgcgtaccgtgccattaaccggctcgaccgcgacacaacaggcctgctgattctggcccggcacgcactcagcgcctgtattctgtctgaaatggtgcgcacacatgccatacgtagatgttacctggccgcggccacaggtctagttcccccggaaggcgtgatcgatgctcccatcgcccgggccggaacctccaccatcgaacgctgtgtggactttgaacggggtgattctgccagaacccattaccgcacgctgtgctataatccagacacgaactgttccttagtggagcttcgcctggagaccggacgaacccatcagatccgggtccacatgaagcatatcggccatccgctgcccggcgattttctctacaatccggactaccgcctgatcggaagacaggcactccattcctggcagcttgacttcatccagcccattaaaaaggagcctcttcacttcgaggcccctcttccggacgatatgcgtcctctcttcgggatggacttacctttggctctttacagccagcgcagtcccctgggataatgattctttaagattccgccggccagcttggaaaatcccaggggccagccgtccacggtcatcaggccccagcctttctgcccgtttaaccggcagttttctgactcctctggccggagccagtcgtcgatccgcagtgtttcccctttcagataacggcctgcctcctgcccttccgccttcatgggaaaccggcgtactgcctcttccttcttcatggagagcgccagcgcatgggacggctcaaagcggtttttcttcattgttcccatgtgaaggccggggcgcactatctttaatcccgccagatcgatcatctgaggcggaagtaagtacagctggtctccgaacagaatatactcttccctgtccaggtaacgctccggatcggtaaacagatcccggcaaaagccttcatactccttatgcacggccttgtcctttaaatacgccggggcctttcgtttccatgtcccgcaatcctcccccgtctttcgaaggaccgccagatagtggccttccccctctgatagatggggccatattctgtaagttccccggagtgtctctgcagctgatattccccattccggcttccccggcgaaaggccttcccgtactcccatatcctctatctcaaattccggatgttccgagagaaacatttcgatcgtctgctcgtcctcctccggcgaaaaggtacaggtagaatagaccatgcgtccgcctgccttcagcatccgagccgcggaatctaaaatctggcgctgtcttgccgcgcacatgaccacgtgatccggactccactggcggcaggcctcctcatccttccgaaacattccctcgccggagcagggcgcatccaccaccatcccgtcaaaaaactccggaaagcgttctgccagccgttccggcgtctcattggcgactaccgcgttccgtattcccatgcgttccacattctgtgagagaatcttcgccctggccggatggatctcattgctcagcaaaaatccctctcccatcaggcggcctgctatctgggtggtctttccccccggcgccgcgcagagatccagcacacagtctcccggcttcggatccagaagttccaccactgccatggcgctgggctcctgaatgtaatacagccccgcctcgtggtatggatgtttccccggtctgtccgaagaatcgtagtagtatccctccctcgcccacggaatcttcgttaagtgaaacgggaccttcgccaggaactctttctcatccgtctttcccggattcagccgcagtccctgcacccgttccttctcatagctttccagaaacgcctcgtattccgttcccagaaggttcttcatcttctctttaaatgcctcaggcagctctgtcatcacaattcctcatttttctcaaaaatttcttccatcagattaccagatccggcctttttcgtcaatatttcgatctgatttttcctgtttaggtgaagtgcggttgagatacaccggaaaattttacctttatttttccaattttttcgacaatttacacactttttttataattattttcgaactatatgataaaaataaataggagacgtaaaacgacccttcaacaaatgaacctgtgaggtacgacatgatcttaaacattaccgcttattttattattcccgtttacacgtttctttttgcctggggaaccgattggttcacgctgaatttctccgtgctgggcagcctggccaaccggaagaacgcatttctcctgtggggaatcattgtgggcacctatttttactatgtgttaagaaaaattattcatcatctgccgcgcaaccggaaggaaaccgttacaagcgtcagcgcgctgattctgctggccttcgcggtcaccacgccatatctccccgaaaacagacctttccgggcatttcttcacgtaatattcgccttcagcgcctccgtgctgctgctgggctgcctttatctgattgtgtggaagctctactgcatgaatcgggacggataccgttcctacttcatctgtttaaacgtcatcaccgtgctgtcggccatgctcttactcctggccggaatcgtcagcagcgcactggagatattctttaccgtatcctgtaccctgatgctgatccggctgtaccgccgcgtatcatcagccggggacacttactacagcctgaagcattaaatcagtatctgtcccgctcacagtcaaaaaataaggtgctgtaaaaagaacgtcagccgcggaaatccgcgtccattcattttacagcaccctgtcatgttctatgtattgaattataactgtaccttatactgatcagaaccttcaccatttacaacgtagtaagcagcgccctcttccggcttcacatagatctctatcgtctcgatggcagcgcccttgttcatggactcataagccttcttcgcagcctccagaacatccctggcaacgatctgtctgccggcatactcgattactacggaagattttacttccttcttcgctgcaggcttcttagcaaccgctttcttcggcgcagcttccttcttctcaggaacggccttcggttccgcttccttcttagccggagcagccttctttggtgcagccgctttcttttctgccgccgtttttgctgccggagccttcttagcctctgacggagttgccttaaccggtgttttctctgctgtctttgtttcagccgctttcgtctctgccgccttcgttgctgccttagtttcactcttagtattcatcataattctcctcctcaaacagattgatctgtttttactgttgacgtgtataagttcagcctgccttctgatgtttatattttagctgagtgaattataaaacgaaaataccgttttgtcaacaaaatgactcgcattaaccctgcttttttacttatttatgcaggattttaaaggaaaattacataaattttgcattttataagtatttcaaaatctgtgaataggctgctctcaattcctcataaccagtccggcagttggcgggactggtcgacggaagccggacagaggcgatcccggtctgggaaaaacagtatctgccatacagttcatccgctttcgttcctgtcgtaaagactgcctttatatctgccctggaaaaaatcacattcatgtcattggaaaccggatttttaatggaactgtcatctgctccgcagatatcacacccggccaggacatcccacacagcgatatgatggcgcagcgccaggcttttcttttcctcaatcgtttcaggagccggctcccccaacagatccgccagcacaggccagaaacggttgcggggatgaccgtagtaaaacccctgttccctggatttgggagacggcatggttcccagcatgagaactctggagttctcatcaaataccggacagaaggtatgaacaaccgtctcttccctgtttttcttctgcatcatggccggataatcgaggcggccccggaaagcttctcggcaatatcgtacatattggtgacatttcccactgccagcttcccgcttaggccgtaataatttaaacatgtgccgcaggtaagaatctccactccctgcgcctccagacttcttaaatcttccacagactgcgatccttctgccgacagctttgcgccgccgttgtagagcagaatcgtatcaggaagcacgtccagctgggtctgggcatagagaaatcccttcatcagctgccttcccagttcatcatccccggttcccatgcagtcggaggaaatcaccaccacctgccccttccgtctggcatccgggatacaggcttctgcttccgttactgcttccgcatcggcaggctgtctgccgtcccccggcagcatttccccgttccgctccgtgacgtcgtagcttacccggaattcttcctctgaaaccttttctgataccggcttcagtccaaaataaccgcccagtttcattaagttctgtaccgcaatctcattgtccaccagaacttcaaccgttccctccgtcatctcctttaataccgcttttgcctttattacaggctgggggcacggaaggccctttgcatcaataattttcttcatcctcttctcctttccggcatcaccgtttattcccgcaggcaggccgccatacgcacacagtccgcctcttaaaaagaagaggctatcatccttagacaatagccccgccttcctattcgctttattccgtctcgtcttcgcctaccagttcatcgtattctgcatcatccagcaattcgtcaaacgcatccgctacgatctcatattcgtcatcatcttcaatattctccagattcggctgtccatcctctgactcggaataacggtataagtaaacctctccctcttccgcctcagcaccttccatcggaagcagagcaatgtaatcgcgttcgccggccgtaaagatggtaagaaccacacactcgatttctgaaccatcgtccagagtcagtgtaacggtcatctcctcctgctcttccatgttctcctggtctaaattcggatcctgtgccatgtcgatacctctctttttgtaatgttctttttctattattttgacgactgcctcgtctctttccactctatcagactatgcagtaaaaatcaagggatttctgtctgatacggaataaacttctaacagctgctgccgttcagactgttaatattcgattccctcccgcgcagaaatcccctgatcgtaaggatgcttcacctttcggatctccgacacgtaatccgccagtgaaatcagttcctcagacggctcccgtcctgtcataacaacctccagtccagaggggcgtcctgtgataaacgctctgacagtctcttcctgtaccaggccgcaattcatgaccgccatgatctcatcgagaaccagcatatggtaaccgccttttgctgccttcttcagtgtcctgtctagcagcgctgtataatacacagccgcttccttcttctgttcctccgtcatacggaaggtaaatccgaagcttttttcacacggtgtaaccgtaatccccggtatcagccccagtgccgccacctcaccagaatggtcagtcttcaaaaatcgggtaatcagaacctttctcccgcatccggccgcgcggacagccagtcccacggctgccgtcgtctttccctttccgtctccgcaatagatgtgtacacatgaatccatgttgtgctcctttcgttacagtttactcccgtcccaggtactccttgacaaaccgggacacctcctgcttcttactgtaccgctcgcttacgtaattgacatggagccgctccttcgccctcgtcatagcgacgtaaaacatgcgccgctcctcttccatatccgcgtccagaaccgccttgtggtgcggtgtgacgccttcattggcatcgagaatatacacaatccggtactccagccctttcgagctgtgcattgtcatcagagaaacgccctccgtccgcttctccctggaacgtgcctgaagcttcagttccctggcgtactcctccatatgggcaaaccacgcttccaccgtcttgaatcccgcagcgctctccgccagctggtccaggacctcaaacagttcctccggtttcatacggcggtactccgcatactctctgatgtaatcgtcataccctaccgccttgcgtatataattcaccgcagcggcaggcgccagctgccttaagaatttcaaatcgtactccagctgctcgatccgttccaccatccagcctttatcctggtaaaacgatttaaccgcctcccagttcacgaccggaagttccagtgcgtcccggctgatgtaccggtttggacggttgatcaccgagagaatacaggaacggctcaaatctccggcggcagcatttaaataggcgatcagatttttcgcaatccagtgatcgtacagattcggcacggcatccttcatgcagaagggaatattgtactccatcagcttctcgatcagcagacgcggccccaagttggtccgatagaggactgcaatatcagaccaggcgtatcccgccgccgcgtaatcggcaatttcatggacaatctccagggtctcctcctggggatccttccagactctcgtaaccacaggctttcccctgccctgctttgtgatgatctcctttggaaagcgcgtcttattgtgggcaatcagcctgcccgccgtatccacgatgtcctttgtgctgcggaaattgatattgagcaggacacgctcagcattggggtagtccttctcaaagcccagcataatctccggcttcgcgccgcggaaccggtagatggactgatcatcatctcccacaataaacagattattctcaggtgccgccagcatccgcacaatctcatactgaacccggttaatatcctgaaactcatccaccagtatgtactgatatttcctctgccatgcgcttaagatatccttccgttcctgaaacagctggtagcacataaccagcatatcgtcaaaatcgattaaatttgctctcctgagccgctcctcatagcctgagtaaagcttcttgaatacctcttccgaacaattcttcgcatagtagtgatttaaacggatcatctctccttttacggagctgatctcagataaaacagcgcttacaaactccgcctcatcttccacctcgacccggtttgtctccatcagttcccggatatactgcatccgctgctcatcacgcacaatattgcgcgcgtcatatctgtatgcaaattttagaattcggaaaaaaatggcatgaaatgtgccgaaactgacagatgacggggtcccgccgcacagactctcatatcgctctttcatctccgtggccgccgccttcgtaaaggtaatgaccaggataccggacggattcacgctgcattcctccgtcaaatatttaatccggtgggttatggtaaatgtcttacccgaacccggaccggccagcaccagcatgggccccttatcgtgagtcactgcggccttctgcgcgccttcaaacagtacttctgaactcatccggatttcccttctctttaaacacgctctggagcgtgtccgaaccatccgttcaggcacgctccaaaaagccattctcttatcttttcttatctgttacccgtttccattcgtttctgcttttacgaacggcttaacagctcgatcccgttccgaatcctcgcaatggattcctccctgccgagcacttccataatctctgtagcgcctgccggcgtcatctgctttccggaaactgcggtgcggatgggccacatgacaaagcctgttttacagcccttttccgctacatacttcgacagcgcttcgtataatgcgtcgttgctgaagtcattctgtgcttccagaatcggcagaacctctgtgagaaccgtcagggaggtctccttattcgtcttcatcttcttatgaacgtacatctccgaatcgtactccggcagcgtctcaaagaagtcgatgtgatctgcgatatccgggaatacttcgattctcgttttcaccatggcggcgatctttcttaaatccagatcttttctgatcacttccctgatataaggctctgccatctcgaagaaccggtcaaactccatggccttcatatattcgctgttcatccattttaacttcgtcatgtcgaacacggccggggacttgctgatgttatggtaatcaaattcctttatcagctcctccagagagaaaatctcacggttgtccaccggagaccagcccagcagcgccacatagttgacaaccgcctcggaaataaagccctgctcgatcagatcctcgtaagaggcatggccgctccgcttgctcagcttcttatgctcttcgttcgtaatcagcggacagtgcacataaaccggaacttcccagccaaacgcttcgtagagacggttatacttcggtgaggaagacagatattcattgccgcggaccacatgggtgattcccatcaaatgatcgtctaccacattggcaaaattatacgtcggataaccgtccgatttgatcagcaccatatcatccagctcggagttgtccaccgtaatgtcaccataaatctcatcatggaatgtagtggttccctcggtcggattgttctggcggatgacgtaaggcataccggcggctaaattggcttccacctcttccctggataaggagaggcagtgcttgtcataggtcatgatctcctggccttccaccgtctgctttaaggaatcgaggcgttcctgtgtacagaaacagtaatacgcttcgcccctctccaccagcagcttcgcatattccaggtaaataccggaagcctgacgctcgctctgaacgtaagggcccacgccgccatccttgtccggtccttcgtcgtgaaccagcccggtctcctcaagcgttctatagataatctcgacagcaccttccacataccgctcctggtccgtatcctcgatacggagaaggaactctccgtcttcatgctttgcaattaaatatgcgtacaacgcggttcttaaattgccgacatgcatgcgccccgttgggctcggtgcgtatctcgttcttactttgctcattttgcacactcctaaattattattttacgcgtaccctattatataacgaagtactggaaaaaacaatcatttcatcgaaatttggcaggaaaccacgcccccttctccgcttacggaatcggcgggaataccgcgataaatcccagaataaccgcggctgctaggataatgattgccgccgtacgacggtcctttaagatcagcgggttgcctccgccgccttcgctgtcatcttcaaaatccccggtgttttctccagtgtcgtctccggccgcttcttcctcgccttccagaacttccacaccgccgtttttcttcccgtcctcccattccttcaggcattgctgcgcggcaggaaaatcagaggaacgcacatagattttctccccgaatatagagtatcccatataaatcctcatatatccgccgctctcctcatcctgggaatacgatggaatcccctgattcgccaggattccctgcagcagctccgcttccaggtggtcgtttacagtcgtcagtatttccacatcgacgccctctgttattaactcctcttctcccgcgcttcgctcctctttaggaataagcagagtcttgcagtccgtacacacctcgtttccatccacaaactccgcaccgcattcaggacacttcattgtcatcgcacatacctccctttccgggccgctttcgataaacaggcagccattctctccatctattataccataaaatccctgtgtataaaaactgtttacatttgtctttgcatcgtgtaaaatactttatatcctactaaacagataagaatgataggaaggggaaaagaccatgaaaatttctacaaagggacggtatgcccttcgtatgatgctggaattcgccctgcatcccggtgaatgtacgaaaatcaaccaggtagccgaacgccagcagatatcagacaaatatttggaacagattgtgacaatcttaagccgcgccggctatgtcaagagcatgagaggtgcgcagggcggctattatctgacgaaagaaccttccgattataccgtcggtatgatcctgcgtcttaccgaaggcagtcttgctccggtagcgtgcatggaggatgaattaaaccagtgtatccgttccggccactgtgctactctgacggtgtggaaacagctggatcaggcgattaacggggttgtggacaacatcacactggccgatctggtggaagaacagaagaaactggatggtgactttcatgattcatgaattctcacggagtgagctcctgctgggtaaggactccatggcaacgctggcaggttcctgcgtcgccgtcttcggcgtcggcggagtgggctcccactgtattgaagccctggccagaggcggcatcggccgcctcgttctgattgacaacgacacggtctccataaccaatatcaaccgtcagagcattgcctatcacagtactgtgggcatgtacaagactcaggtcatgaaaacgagaatccaggacatcaatccacaggcggaggtctttccgtttgagaccttcgttctccccgataaccttgaagctctgtttgaacagattccatacaaagtcgactacatcgcagacgccatcgacacggtcacggccaagctggccctggtccagtacgccatagagcatgacattccgatcatctcctccatgggaacaggcaacaagcttcatccggagctgttcgagatcacggatttatcgaaaacctcggtctgtccgctctgcaaagtcatgcgccgggagcttaagaaacggggaattacctctctgaaagtcctgtattccaaggaggagccgcaaaagccgctggaagacagcggggaggtcacctcgaagcgcgccgtaccgggcagtgtctccttcgttcccccggttgccggtctcctgatcgcaggggaagtgatacgcgggctgacgggcaggaattagctgtaagacaggcagaagccatcagacagaaaaaggaagcatttaagcgcccggtcaccataactccggccacacgctcaaatgcttccctttctttttatattccgtctctaaaacttggctatatacccctgaataaagataaacagtacgatcacaggcaggacaaatgttacatagcccctcacccatctcgggaacctgattccctttccttcattggcttccttcatgaagttctcaaatccccagccgtaccttgtggtacagaaggccagatagatcagacttcccagcggaagcaggttattgctgataataaaatcctctaaatccaggacattgctcccttcgccaaatggcatgaaaccgctccataaattaaatcccagaacacacggcagggaaagcaggatgatggcagcggcattgcacataaccgctttcttgatggtgcagcccgtcaaatccgtggcgaatgacacaatattctggaatacggcgataaccgtggagaccgccgcaaacgacataaacaggaagaacagcgtcccaaccagtctccctcccgccatattgttgaatacgttgggcagtgtcacaaagatcagcttcggtccctgacccggttcaatgctgaacgcaaaacatgccgggaaaataataaggcctgccataaaggctacgaacgtgtcaaggatcgtaacagagagcgcctcgcccatcagactgcgttctttcccgatatagcttccgaaaatagccagtgcgccgattcccaggctcagcgtaaagaacgcctgtcccatggccgcgaagattacctctcccagaccggcttccttaatctttccaaaatcaggcttcagatagaattccagtccaggtccgctgttgtccatcaaaacggagtgaatcgccagaattaccatcagaatcaaaaggcagaccatcatcaccttggtgatcttttccacaccgccctgcagtccttttgcacagactgcaaaacagccaattacaacaagaatcataaatacggccatcagaaccggattcgtcagcattccctcgaattccgcgccgacaccggccgcatccaggccagtaaaatcacccttggccatctttaggaaatataagatcatccagccggcaacggtagtgtagaacatcatcaggatgtaattacctgccattcccagatatttggcgtaatgccactttgttccttttggttccagcacatcataggacagcgccacacttctctggcttgcccttcccactgcaaattccatgactacgatcggaagacccagtattactaaaaataccgcgtaaattaatacgaatgccgcgccgccgtactgacctacgatgtatggaaaacgccatacattgccgagtccgattgcgcatcccgctgaaattagaataaaacccagccgggatgaaaatttctctctccccatactctttctctcctggttgattagattcgaaccgccgaaccggtcaaaatctgcttccttctgactggaacggcaaagattctgtaccattatagcacagaatctctgttgtggctacttcatattatactgtatccattaccgtccctaacgcctgatggaagccgccatccgatggtatgtgtgtctcacgccgcggattacttttccatattccaggatattttccggaagcgccataccgccgtatccggcatctcccaggtgatgcatatccgttccggtcatcttgcacatcagcgcaatctcccggattgtggccgtgtccgagccttcctgggacgtccccacagcggtcagggttagcgctcccagctcatgtgcaaaggagacaagccctctgatatattccatggtaattcccggaaccgttcccggagccggcatcaggatcacatcggcgcccgcttcgcgaaactgctttacatcctcccgcgtaatgatcttttccccggcctctgacagaattcctgccgcatgcatctttccggccaccaggacaacggcatccccaaattccttccggtacagcgccagcgtctctgcgatggcccggttggtgacaccgacccccggatttcccgtcaggacgatgaaatcgactcccatggcaactgcctttttcccattttccagcgttcccagacggcctttcgtgatcccccacatggcatctgcttccaccgcactctcgacgccctgttcctttggttctaaattgatgcccaccggccgcccggtcagcgccttcaccttccgtatgatgtccgctccatcgacaggaggaagcccgtggattacagggtggtccacgtcaaagatatttaacagaatcacatcggcgcccatagccgcggccagctctgcattgctcacatctcccagcattggctgtgtcgtcccgatcgtctcacataccagtacacggccctcgctggaggcaatggattccaccagttctttcccattcatcttctcaaaatccgatgcattgcaatttaaaaaacgcttcaccgcatattctcctctccatatgaaaatgattttataaaagtaccgcaaaaccactcatgatcccgtgattttgcggcactctgtctcttattaatcggattctttcaaatatggcttatgcaatggtctccgcatactttctgatattagatgcattggcgatcttcttcacctgaccatccttgatgacgaccagagtcggcgcctgcataatgcccagctgttctgccagctctgcgttttcctctgcatccaccacctcgtaatccacatcctttaagaactgcttcgccatcttgcagttcggacacgtcttggtcgtgaaaaggtaggatcccgccggaatctccgcattatgaacggcttccttcacggtctccgctcccttgtttcccttctttaatacggaaccggtaatgtcgtaggtggtacggttcttatattcctgagtctttccttcgttccagttctgtaccggtctgtagtagccggtgatacggctgtaaatctcagcacgtttcccgcagatcgggcagacgctgtgctctccgatcaggtagccgtgctctgcacagatcgaatacgtcggagacagcgtatagtatggaagcttgtagttctctgcaatggtgcgtaccagtctcgccgcggccgcccagtcaggaagcttttcacccagaaaagcgtggaacacggttcccgacgtatataaggtctgcagttcgtcctgaatatccagcgcatcgaatatatcagccgtataatccactggcagatgagaactgttggtgtagtatggcgtgtcaccctcggctcctgccgtcctgatatccggatacttcttcctgtcatgcttggccagacggtaggtcgtggactccgccggtgtggcctccaaattgtataagtcgccgtatttttcctgataatcggaaaggcgctctctcatatggttcaatacattcttcgtgaattcctgcgtcttcgtgcttgtcatatcttcgcccagccagacggcatttaatccaacctcattcatgcctattaagccgatggtggagaaatgattctcaaaggttcccaaataccgcttggtataaggatatagtccctggttcagcagcttggtgatgacctcccgcttcgtctttaaggatctggcggaaacatccatcatatgatccagacggctgtagaaatcggcttcgtcctttgccagataagcgattctcggcatattgatggttacaacgccgacagatccggtactctcgcctgatccgaagaatccgcccgtcttcctgcgcagctcacgaagatcgaggcgcagacggcagcacatgcttctgacatcgctgggttccatatcactgttgatataattggagaagtatggcgttccatacttggaagtcatctcaaacaacagcctgttattctcagtatcggaccagtcaaaatccttggtgatggaataggtcggaatcggatactggaagccgcggccattggcatctccctcgatcatcgtctcgatgaaggccttgttgatcatgtccatctctgctttacagtctttgtacttgaagtccgcttcctttccgcctataatggccggaagctctgccatatcacccggtacggtccagtccagggtaatattggagaacggagcctgtgttccccagcggcttggcgtattaacaccataaatgaaggactcgatgcacttctttacctccgggtaggttaagttatctatctttacaaaaggagcaaggtaggtatcgaaagaggagaatgcctgggctcctgcccattcattctgcataatgcctaaaaagttaaccatctggttgcagagcacggataaatgctttgcaggggatgaagtgatctttcccggaatgccgcccaggccttccatgagaagctgctttaaggaccagcctgcacagtagcctgtcagcatggacagatcgtggatatggatgtctgcgttcctgtgggcatccgcaatctcctgatcgtatatctcggacagccagtagttggccgtaactgcgcctgagttgcttaagatcagaccgcctacggaatatgtaacagtcgagttctccttgacacgccagtcttccaccttcacgtaactgtttaccacatccttgtagtccaggatggtattcttcatattacggattttttctctctgttttctgtataaaatataggcctttgccacatccgtgtaaccggtctgctccagaacatgctcaacgctgtcctgtatctgctcaaccgttatctggccgtctctcatcttttcctgaaagtctgccgtgacacggagggacaacagctccagaatctcattattataatccttcttcgtagccttaaatgccttctttatcgcttccgttatcttattcagactgaattcagcgacctccccatctcttttcaatactgctatcatctatacctgactcctttccttttacaaccgtgacaccgccttaaccggtgcattgtttattatagcagaagagaaacgaaaacacaatatctggtttcgcaaaaaacattaaaaccagatattgtgtcttattatgttttcttataagcttcaagtcacttatcgcaaaactgcggactgtctgccagtataacacaactgccacagtttctcaaccatcatttcgtccgatgtgcttcacagccgtacatttacgcttttaaatcaggtttgtatacatctccgcagccacataggcgctgacaaaaatgccgtcgtcccggtactcttcctttagaagctggccgtatttccggatcagctgaatctttccggcttcctgataggggtatacccgctccaggaatactttccggctccttaatatactctccagcagattgaggagctcatccagtccctccccggtctttgccgatatcttcacctggtaatcggaagataaatcgcgggggatcctcatctcacctgctgcatcgatcttattaaagaccgtgatcacttccttatcgtgaacccccaaatccttcagcgtctcatagaccacatacatctgcatgtccatctggggattggagcagtccaccacgtgaaggatgatgtccgagtattttgcctcctccagtgtgctcttaaacgcctcaatcagattatggggcagcttccggataaatccgaccgtgtcggtcagaagaatctgctccccgccgggaagttctaagtttctggtcgtcgggtccagcgtggcaaacagtttgtcctccgccagaattccggcatccgtaagcgtattgagcagcgtggactttcccgcgttggtgtagcccacaatggctgccaccggcgtatgattccttgtgcgctgctgcctggccacatccctgtggcgcttcacatcctccagctccgcttttagctggccgatccggtcgtgaatcagacggcggtccacctccagcttcttctcgccgggacctctcgttccgattccgccgcccagacgggagagcgaatttctcagtcccaccagtctggcagcccggtactttaactgggccagttccacctggatcttgccttccctggtggtcgccctggaggcaaaaatgtcaagaatcaccatggtacggtccataaccttcgtgtccagggcatcctccagattgcgaagctgtgcgggggacagctcgtcgtcgcagacaataccggtggcattcagctcccagacacgctccttcacctcttcgatctttcccttgcccagatacgtgcccggatgaatccgctcccggttctggatcatcttatccaccgtgacggctcccgcggtctctaccagctcttccagctcatccaaggaggaggctgccaggcttccctcttccgtactcacggccaccagtatgacccgctcttcgatttcctttaactccactaaatcagccattgatctcctaatccattacctcatctttatttcaacccaaccttttgggctcatataccactcaaaataacacagcggcttatctgctttttagaaactccaattcccgcgcagcctcttcgtccgagctgtttcctgccacatactgctccatcagctcccgagccttgtcaaagtctcccttgtactcgtacgcaaccgcctgattataaatcaggtccggcactgaggcggcgtccggctttaataacccctgggcgaaacaggtaatagccgtctcataatccttttccccaaatttgcagaggcccatccggttatacagttcggcgctttcgatgccttccgcctttgcactctcatagagcgccatagcctcggcggcagctccctggttctctaacgccgctccggccgcgagaagcgcctccgccctgcccggagcatttttctccgtatccagctccgaagcacgcttataatcttccagcgcaccgtttaaatcaccggtctgtgccctggatacacagcgcatattcaaatattccggccgttcctgatccacctgaatcagaatcccgtaggtatccgaggccgcctggtaatccgcggcccggtattcggcttccgcccggtatttcagtacgtcgatatcaaacgctcccaccagtgcgttggaggcgttaatcgcctcgtcgaacgaagcaatcgcactttcataatccccggcattcaatgcttctattcctgcatcgcggtacgtatatttattttcacttttcccgcatccgacggtcagccccatgcacaggccggccgtcaggatcagcacctttattttcttcttattataacccgttttcactctggaataactgttcatattcaattctccatccggggagcttactgcttaccggtacttccgtggcctccgcggtcttcatggtcaagcctgtccgtctcttcaaagagcagctccggctggtgcttcatgatgcggaactggcagattctgtcgttgacacggatcaccgtatcacgaagggcataagccggaaaaaaccactggtcattgtccccgcagtatgtttcgtcgatcacacccatgctgttcgtctggatcacaccgtaattcttaaacgtactgcttctcggcaccacatgggcctcgtagcccgccggcagttccatggcgattccaagaggaattaaccgaaactctccggcctttaatgtaatctcttctgccgcccgcaagtcgatccagtcggatttgcctccgacgtagcataaacgttcaattttatctgtaaagtatttaattctgatcttttctgtcactgtatgtcctcctggttatcagcactttttggctgtagttcgtttctattattgtctgcagagccggcttctgtaaacccggcttcactctcctgtcgggtcacggctgcttcctccgctcccgctctcatctccgcgatgggaatctcatccagaagcacctcatcctccgggagcagttccccgcttccctttaactcctcctccacctccatgcggatctcagccgcagtttcaggatcgggagtcggaaggttctgagtcgaaccgattccaaaccggcgcaggaactcttccgtcgttgcaaacagcgccggacggcccggagcatcgaggcggcctacctcgtataccagattgtattccaccagcctgttcactgcgtgatcggactttacgccgcggatcttctcgatctccatctttgtaaccggctgcttgtaggcgatgatcgacagcgtctccagaaccacgtccgtcagcacctgttttttcggagtagctgccacacggatgagattctcataatactccggcctggtgcacatctggtagctgttctccagttcaatgatctgcattcccttccggccggcctcatactgcttctgaagccgtttcacggcggagcgggccgtctcctcatcctgcccgatcgcggctgccagctgtctcatctcgacggaattgcccatggtaaataagaccgcttcgatcacggcctcatactcccgctcttcattcgtaatctctctcagttcctccatcggcagcgactcctgcgcctcccacttcttcttcatcttctctatacccttcgatatcttcctctaactccgataagtccagatcctcttcctcaccttccggctccagcgtctcgatcagcatatcgtcaaataaatgctcctgggtcagatgaatcttaccgatcttcatcagttccagaagcgccagaaatgtcactacgacctccgtcttatccgcctgcttctcaagcattccccggaaagaaaatctgcggtgaattctggcgtactgaagcaccgaggtaatcttgtcctccagactcacaggttctttcgtgatattgccgaaccggctccttaccgggtcgatccggtcttccgtccgtttcatgacagacttgaaaatctcctgtagctttgccagcgtcagaccgtccagcaggccatctaagtccaccggaggctcgtacttcgccacctccggcggaactgtgggccccttaaagagcagacggtccgcgccgacctccttctccttcagttcaaacgccatatacttgtaatacttatattccagaagacgcgccaccagttcggctctcgggtcctcctcctcgccatcctcattcacttctctcggcaggagcatacgggacttgatatcgatcagcgtcgccgccatcaccaggaattcactgacaacgttcaaatcctccgtctccatgtgacttacgtaatcgagatactgctccgtaatcgtcacaataggaatgtcataaatattcactttattcttttcaatcagatggagcagtaagtccagaggaccctcaaaattctccagcttatatgatattcccatagattcctcccggctccagaaagtaagcgctaccgattagtatatcaaatccgccggcttctgtaaatatttggcggcaaaactattttttctttaaatccacaaccaccagctgaggtttattgttcagtctgatattgatggaatgggtccccagcccacggctcacaatcatggtttttccattctcctcaaacgtacccgcacaccacggcagaaagaactgaaactgaggggtcatgactccgcccagatacggaagccgtatggtgcccccatgaaaatggccggacagtgttaaatcagcgccccatttcctgcaggcgtcgaaaaagaggggggaatggcagagcagaatctgaaatttctcccgctttgccggtcctgccagcctttcaatctcctccggacgcagatggccgggatgaaacttcttataataccgtaccgccagatcgattcctgtgacagcgatatcatcccgaaaatcttctgtcctgtcagagagtaatacgactcccatatcctttaactttctcacatagatgtcgtactgcagcccgaaattcttccgttcccggttcatcctcgtctcatggtttccattgccgtaatagacgggatatctttttgtcaattctccgaccagagccagggacacccgtaaatccgtgctttccctgctgaccatcatatctcccccgatcagaaccacatcaggcttcaccccgtcaatcgcttcaatcaggcgttcattatgatcgccaaactcatggtcatgtaaatcagagagaaataccatccggcagtctctcgttatcttttcagtcagaatctccgtcctctctacagacagctgctcccgctcatactgtgagcgaagcagacagcccgcccctgcagcggcggacagtacaccggcggcaagccacatatttttcttcctcatctttcaccagtcttcctcttgatttaattcctcttttattatcacaattcatgacgtttccattgtattaccttgcgattttgtatcatcatacactgaaaaagtatgccgcgtcaaggtaaagcatgcgtaagcttacacgttttatgagatgggaatttccgtgaaatgaaaggtccttttctcatgtcatgcgcttcctcatcaatattcataaagaaggcatgccgtgaactcaccacgcatgccttcttctctattcccgcatatctcaccctgcaactcctactgcacccatacgccggacgcatccagcgtgtatccatccggagtcaccgtattcttcatcatcacaccatcggcccctaagtaaaaccactggccgtcggtttccacccagcagctggaagccatcgccccgccggacttgaaataataccacgcatcgttggagtaatggcgccagcctgtagccatgacaccgtcggagtcgaaccagtaatccgcgccgtctatggtcatccattcgttggcggcccggtttccgtcactctttacaaagtaccacttttctccctcctgctgccattttgcagtctgggatcccccgcttttcagcgcaaacccgtagtccagcagagccgacgtatctgtatactgtgttgacttgctcttcataatcacagcgatcagccttacgccatcccgttctgcacatgtcaccagggtattcccagccagggaggtatatccggtctttccgccgatgacgccctgatagtacctggaatcattgggataaagcatcttgtgccccagggatatcgtgcgggccgccgccttctgtgtcgccggaatctggtagcttaaggtcgaagcgaccttgcataccgtggcattctgaaatgccgcccgcgcgatcagtgccatatcatgaggcgtcgtatagtggttggaatcattaagcccgtttggattaacgaaatttgtgttcgtacagcccagttcttttgctctggcattcatcatatctgcaaacgcgctgatactgcccgccgtatgttccgccagaccattggccacctcgtttgcagactttagcaggagaccgtaaagacactggcgtaccgtcagcttgtccccttccaccagtcccagtgtcacagcgccggattccaggttcgtgaccgccgttttggaaaatgtgaccgtgtcgtcaaggctgcacttctctgctaccagaagagccgtcatcagctttgtgatgctggccggataatacttcgtctccgcattctttgagtagagcagattccccgtggctgcatccatgagcactgctccctgagcctgtatctccggctgctttaccgtattcaccacactgccgccggttccgcttccctgggaagcccctggcccagcggaagttccaggccctgccgaagttcccgaacctgccgcagctcccggtcccgcagaggttccctgactgttctggctgttaccgccgcccggccctgctgtctccggtcccgaagtctgagtattcgctccctctcctataggcggaacgataggtatatctccaaaagccggaactgaagccagaaggcttaagctgattgcaatgctccatattctgttaaagcgttttatcatgtctgtttctccccgtgtcatcctgtaatctgtcgtatttccataaacagtatagcacagaattgcctggacacggcttaaaattttcttacaatgagagcgtaagaggttctttctcggccccgctcccaaagccgagaaagaacctcttatgcccggcctgtcattttttgctttccgccctgcgggaatttttccacatggcccacagaacgcttgccacacaaatagaggagaaacagccgcttacaagcccaaacagcagcggcagggagaattcaaaaatggactgaattccgaaatgccacgatgcaatcaccagaatcagcacgctgatacacgtcgtaagcgatgtgtgcagcgaccgtccaaggctctgggatacgctggtatccaccagttcatcgatactgctgcacttgtgaagattcatattctctctgatgcggtcatagattacgatcgtatcgttgatggaatagccgatgatggtcagcaccacggccacaaatgcatcgttcagcggaattgcgaagactaaaaacgcgcacagcacgatcagcacatcgtgaatcagcgcaattaccgcagatactcccgcagaaaggcccgaaaggatggaaaaccggatccagacatacaccgttatcagcactgcggccagaaccatggcaatcacagcgttatggagtgttttctgtcccatatacggctgaaccgcatacgtctccgacagggcagccgtaaagccatcctgatagctgtttaagatctgtgtcacatattcctggctctccgggctgattccctcctgccctgcaaaagtcaggaccatgaactgctttccaaggccgtcctcttttgtcagacggacatttacatttctcccggtctcaccggatatcttagctgcaacggcgtcagaatttacgtcagccgctccctcgatttcgtattttaaggtcgttccgcctgtaaactgagtatccaggctcacgccgttcttcacaaatcccactgcgcctgcaagaagcatgcagatggagatggcgaaccatatgtatttccgtttcataatcggataaatcttctgattcttcttcaccttataccactttaaatcgtggaactttccttcccggattatggaaagaagcaccgttctggagaaccagacgcctacaaccagattgatgatcagccccaccagaagcgtgtatccgaagctcagcatcgtgccggaaccgaagaacatcagaatcaccgctacaatggcactcgttaagtttccatccagtacggaggaaaatgccctcttgtatccccgtttgaccgcttcggtcagtgaagcaccgctgcccagttcctcgccaatccgttcgctgatgataatgttggcatccaccgccattcctatggtcagtatgatgccggcaataccgggcagcgtcagcgtatactgcggaatcgagatcgccagcagctgtatggaggtttgaagaaccagaccgaagcaggccaccagtccaggcagacgatacatggcaatcatgaaaatgcagatgcaaatgaacgccagcacaccggaaaatatcataatgttcaacgcattggagcccagactggggctgatggtgctgaagtttttcgtctccatggcatacggcagggctcccgcgttgatcttgtccgataaattctttgcggctgcatacgtctccatgccgttaatcacggcatttcctcccgtaatcttatcctgtaccaccggattggagatcagctcctcatccatgtagattcccatacggcggcccaccagtttaccggtggcgtcagcgaatttatccgcgccttctttcgtaaactgcagttccacctcgtattttttcattcctgtctggtccgaatactcgacaggccggcttgtggaaacgtctcttccctccagcatgacagtgccgttctcatcccggaaggttaaattggccatgtctcccagctctgcgatggcagcctcaggtttaaaatccttttcatcagatttccacggaaaacggacgatcacataccccttttcattatccgttgtgacctcgcggtccgtgatattcttatcatccagtctcgtctcgatgatgttcctggccgcttcaatctcattgggcgcagggttccggtctaagcctacaggctcaaatacggcctcgactccgccccggatatcgataccaaatctcatgtcccccgcgcccttaatgtcttttccaaggccgaagcatgcggtataaaccgcaaggatgacgattaccgtcaggattccaagtgttttctttcccggtttcatagtgctctccttttcgtctcatcgtagtcttcttatcgtcattcattatagactgttatgagagaaaatggtgctaagaaaccattaagattttccccggttcctccaccaccgctcttcctccagttcattccggatctcctggataaacagaatcagaataataacggatatggaacccataattcccatcagaattttcactgacacatcacctctttacaatttcataatattttttagaagtaaccccgtagatcaccccgtaaaagacagcaaacaccagtaccgcagcagccgtagatgcggcaaacaggccgacattgcgaagattcagcagggccagaagccttgcaatcatcggaaatgcgaagcagatatggacggcggccgtaaccagcggcagaaagaacatggtgagcacctgggaacggacagccgccttgatctcacgggcagaaaggcccacattctgcatgatttcataccgtttcctgtcctcgtatccctcagaaatctgtttgtaatagatgataagaacggtcgccatgataaacagcgtccccagaaacagtccgacgaaaaacagtcccccgtacaatgagaaaaaggagccccgttccatcgccgcagattccaggcggtatgccgcacccagcccgcttaactgctcctccagaatctggtacagccgttcggacccttccctgccatccccggcgtcaaaagccacatagtaaattgggctggatttcgcatcgccgtacgcctcggcctgctgtttctcaatcgccttcagctgggaaaaatcaggaaggacaatatgaagacttccaacagaacccatggcatccattccgtcctccaccgcctgccctttctttccaacgacttcatactgtttcccaaaaatggaaaatgtctcccggtcatagtgcattccatccgaaagcaccatcacctgattctcatccagccccacattctgttctgtgatccggttatagtcatccagagtcataaaaaagaggtagtccagactgctgtagtccgccaggttttcctctctcacctcatagccgtcccccgtctccactgcggcaaagctgacatatcggtagctgatcagctcttttgcggtctctcctgcctcctttaaggcgttctccacaatccggttggtcttcgcagccgtttcatccgaataatcgcgtaccgtcaccacaaaatcccgtttaaaccggttcctcatcacgtcatccaggcctgcataaagggaaattgtggacgagatcatgactaaaaccgcggtggacagaaggcagattactgacaggcctgccgcattctgcttcatccggtatatcattcctgaaacagaaataaaatggcgagtctgataatagtagcccttattctttttcagcagttttaaaagtgtaatgctgcctgccataaataagaggcaggtaccggcaatgacgaacatcactgcgatgaaaaaagcgataatcagcattgctgaccgttccgtcgaaatggcaatccagtagcccgccgccagtgaaaccatgccgcaaaccgcaaacagccacggcgccttcggttccctctctccggtctgctttcctgcaagcatctccaccggcctcgcctttgcaacctgccatatattatagaagagaatgaacagaaatatgacgccaaagagctttgcgcacgagaacgccgcgcctggtacaaagctgaagtcccagctgatatccagcttcatcagacggtacaacagcagcgcaaagacccggtacagcaaaaaaccgagtgcaacaccggcaaccaggctgacggccgctgtaatcagcgtctcaagagccataatccgcgccagatgtttctttcccatccccagaacctgaaacagcccgaattcctgctttctccgtttcaccagaaagctgttggtatagatcagaaacaggaatgaaaacacagccatgaccacgcagcccagcagcagaataaagaccatggatccgccgccctgcatatgggcaaagccgggattcaccgtcagggatgagatgatatagtacatcatcacggagccgatgcaggtcaggagccagggaatcgtgacagccgaattcttctttaaattctgaacggccagcctcgtataaaacagcttactcatcacggccacctcccgcctctaatacggccagagtatcggatatgcgctggtacatcttctcttctgtcatttcccctcggtaaagctgatggaacacctctccatccttaatgaacagtacccgttttgcatggctggccgccttgacactgtgggttaccatgaggatggtctgtccctcccggttgatcccctcgaacagatccagaagctggtcggatgaccgtgaatccagcgcgccggtaggctcatccgccagaatgattgccgggtccatcaccagagcccttgccaccgccgctctctgcttctggcctcccgagacctcgtacggatacttcttcataagttcccgaattcccagcttacccacgacagcatccgctttctttttcatttccccgtagctcttctttgccagaaccatgggcagataaatgttatcttccagggaaaatgtatccagcagattaaaatcctgaaatacgaaccccagatgatcccggcgaaacgcagccagttctccttccggaatcgttttcatatcccttccgtttaaaaggacagtgcctccggagggcctgtcaagagcggctaaaatatttaagagggtggtttttcccgatcctgactctcccatgatcgcaacgtattcctccggttccaccgtaaagctgaccccatttaatgcgtttatctgatttcctccgaaccgggtggtataaaccttttttaattgatttacttcaagcaatggcataatgctgcctcctttccttctgtatgtttcagtataacagacgggaaagaccggctgccatcgaagagccttacattttttcacagtatccttacaaaaatgtaagggaagcttaaagactccggccacattccggtggtatactgaaatcagatacagatggttctctactgaaaggaggtcttgccatgtacagcagttttgaacagcgcgcacgccagcggggcatcgataccattcacgaatttgaaaccacgcatgggcgccccggcaagtcccgcacgcccatctccggatataacccgaaaaaagctatgaaacaggcggaaaaagcgtatttagaatccattggaattcctaaaaaatccctgtttcagcggctgaaagagtattttcacgcgtaggctttaccacgttatacaggatccgttctttcacatgccagtttcccgcggtccggccacaccagatgcattcctccatgccggaccgcatctcttattttcctgactcatttctgagacatgcttcatcgttctttattccggcgtaaatttcgtcatatccagccgcagcttcaccttcgttcccactccgggctgcgattcgatcaccatctcatgggccagacgcgtcattacctttttacacagatagagcccgattcccgatgatccctgattcacgcggccattacagcccgtatagcctttctcgaacacccttgggatatcctcaggcgcaattcccctgcctgtatcttccacgatcagcgtccgcagctctcctccattctcagtctcacgttcctcttccagacggatggtgattctgccgcgctccgtatactttaacgcattggagagaagctgttctatgacaaataacagccatttttcgtcggttcgcaccaagcagacagcgggtctgtaatctagcgcggtctttttcctgataaacacaggggcgtacttatgaatcgccttttttacaatggagtccagctgatattcccggataaccagatcggcggaagggctgtccgcccgcaaatactggagaaccatttcgacatactgttcaatcttaaaaagttctgtggaaagccggccatgatccggcccctccccggtctgaaggatgagattcatggccgcaatcggtgtcttgacctgatggacccacatggtgtaatagtccttcatctccgtccgtttctcctcttcctcctgaagcagccgttctctctcctcataagaggagacgagaagcttccggtacagaagctccgcctggtccgaggcgggtgcagcaaactccggggatcccgtcttccaggccagcatccgctctaagtcccggcatttcctgcagtaactgtaaaaactccggacagccagccccagccccggcacggcactcaatatgcaggcgtaaagcaccgcctccacagggagacgatacagccagaatacagacgcgcacagaattccgccgcagacgcacgctgcgattaccgccctgcatcgttttaaataggtgcgtaccagaggcagtttttctcttcctttcatttgaccatataccctgtgcctttcttcgtgacgatgaaatccgtaaggcccgctccatccagctttctccgaagccggttcacattgacggtcagcgtattgtcatccacatagctgtccgtctcccacagccgcgtcatcacctcttccctggtaacggtccgcccggcctgctccatgaggagtttaagaatcctgaattcattcctggtcagttccaccttctcctcctgataggtcagagtggcgtcgttaacgtttaagaccgctcctccatgactgattaaatggtgatcccctgcaaaatcatacgttcgccggagcatggcctggaccttggccgtcatcacattcaaatcaaacggcttcgcaataaaatcatcgccgcccatggaaaccgccataatgatattcatgttgtcggacgccgaggacaggaatattaccggcacattggaaagcttccggatctccccgcaccagtaacagccgttatagtaaggcagcaggatatccatcagaaccaggtgcggctcaaaggctgcaaattcttccagcacatgtttcaaatcgtttacacagaccgcctcatatccccattcctgcagatgcctctgtacggttctgccgatcacctcatcatcctctacaatcagtatcttatacattggcttcccccttttctctttcgccacctattctaccagtcatttcttaattttttctttaaatatttcaaaagctttgctaaggaactcctctgtctgaaagcgtatggatttttaatggaaatgtaaagaagtctgaatccggaggtgatatactgaatataagaagaaagggggatttaaccatgattaccatatttaaccgcaaagaactgtactccggtttttccatggtggaatgttcccgcattggacggattctgaaatcgaacaacatcccttataccataaaggattgcgatttgaatccgatcaggccggggttctgccgtctgaccgcccctatgctgcagacgaagcccataatagaatattcattatatgtgaataaacaggattatgaggaagcccggtttctgcttatgtgtgaagaaggcagcgtctgacactttacatataaaagccgggaaaccaaagtatgatcctttgatttcccggctttctctgcatccttattccagctgctcgcggtactccttctgcatctcttccagccggtccagcgccgcgtttaaaatataggcgtggtcaaaagccagcgcctccgtatcggttacatcgattgcaggcagcagttctgcatgggtatccttcttccacataagtcccatgtgggtataaccttccgtaatccggtatccgatgaaaatatggcgttcctcattctccacagtcagggcgtatgtcgcgccgtctgccagatcggacagtttctttttctttacctgaaaccatacggcttcctttgcatcgtctcctgcgaccagattcaattcgtccttcggcaccaccgccatataggatacggaaataatccgtgtccggggatcacgttttacattcccccacgtatagagctgttccaggcagatcccggtgatcccggtctcttcctccagttccctggccgcagcttcctccagcgattcatccatattcacgaatccgccgggaatggcccactggccgatgcatggatggttccgcctgcggatcagcagaagttccggctcctcttcctccgcctccggatcgactgcaaaaatcagcatatccacagtcaccgatggacgctcataatttccgggcctgtactgtgctaaaaactctttctcggtcagcccatcttcattcttcagttccataggaattcctcctccccggtccctgcggcccggctttaaaaaataacagaattaagcgctcccaaaacgcccacactggccagtcccattatgactccggcaagcagtacacctcccattaccgcgaggatactggatttgaagtcgatatcgagaagacttgccgccagcgtaccggtccatgcgcctgtacccggaagcgggattcccacgaacagtaacagcgcgacaaacaggcctctgcccgccttcgcctgcagcttctcgccgccatgtttccctttttccagacaccacgtaaaaaatccgccgatcacgggcttgtccgctccccattccaatacctttctggcaaataaatagatgatcggaaccgggagcatgtttccgatgatggcgatgatatacgactctaaaagaggcaggcccatcacctgggaataaggaatggcgccgcgaagctcaatgagcggtaccatggagattaaaaaaaccaatatataactttgtaacatcctgatattcctttcctataaaaagtctgccattatactatacacaaagttcgggatcgttacaacctttttagaaaaagataataaatttatgcagaaaattaatacgggaaactgctgtttctgcagtttcccgtgcctgatcagtaccccagtttcggcagaatattttttggataatccaaaaacagcatatccgccttgtcatccagatagttgcggttcggatggataatcaccagccaccgcccggtaaaatattttacatagtttccaaagacctcggaatccagcgttgtccccaggagaagaaggacttccgccttcgagatctcgttggaggtcttcgtcatccggcggctgtccaccatctccccaaacagggacacctgggggcggacaggaataccgcatttgtcacagagaagaatcttttttgcatcccgcacctgctccatggtatagtcctttccacagtgcggacatttattctcatagatcgtcccgtgaagatttatcacatttttacagccggctctctgggcctttgcatagatattactggtaatgagacactgcagcttccccgcccgttccattgcagccagtgccggaccggatgccgtgtcctccggcggattatccagcatctctttcttataaaactcaaagaaaaactcgggacgcgtattatagaaggcgctggaaaagatctcttccgcagaatatccatacttcgtctcgatatcataggctttatccggattctttacacctataaaaccgccttcctccatcataccggagccgcagatggccaccgtgtatctgctctcatcaagaatttccctcagttttgaaatctttccttccataataaaacctcccttcaaagcttttgattccgctttattctatggtactattatactatgaaataacagtattttccatgatatattccatttatttactcttttttctgtttgatctttattcgtatattaaattcttctttttatttataattgcgcagcgcattctgcagaaaagcaaaaataccggtctccaaagggggattcgcccttatatcaggaaatcggtattttcatattgatgcttccatatcctgcaccggctgcctggcgctttacattggttttctcttcgtatttgggcccatgccctccctgcgggaattatgggtctgattctggttttccggctttaccttctcggtaatactgttgaatatttcgtttgatttcttctgtgccagtttttcctgcttgtctttgtccatattgatcacctcacggatagtatgatccggacttgagttttgtactcatggatcaggcaacgggagcttaatctttcataataaaaatcttaacatttcgtgaatccccttgtactctccaaacgggtgtgatataatccacggaagttggtaatatatatcagtaatatcagaatctgacaactcacacctaacaacagaaggggttaatcttttatgaaaaatctgcttcataagtacaggcacgcatggattttatgctatgctttcatctatattccatggttcgtatatttggagaagacggtgacaagcaactatcacatcatgcacgtcaggctcgatgattttattccgtttaatgaatacttcattattccttacatgctctggttcgcctatgtggcgggcgcagtcctttatcttttttttacagacgtgaaaggctactacaggctttgcaccatgctgttcaccggaatgaccatcagcctgctggtatgcaccatcttcccgaacggaacggatttccgtccggtggtgaacccggataagaatatctgctccgccatcgttgcgtggctctattccaccgacacgtgcacgaatgtctttccaagcattcatgtatacaactctgtctgcgttcatatcgcagtcagccacagtgaagttcttaagaagtttaagtccgttcagatcggttcctttattttaatggtttccatctgtctggctacagtcttcttaaagcagcattctgctttcgatggactgggagccgtggtgatggcatacgtcatgttccagtttatctacacagacggttacgtcaccagccgaaagaaagtcacacagaaagcaatcagctgacaccagacaaaccggcactcaggcgtcagccgcacgggtacctgaactgcaaaagatgaaaaagagcctccagtcgattgaatcggctggaggctctttttcagttttactcttcctgttcgtgctgcgtcatacatcatttcgcatatcagttaaatccgaagaatttctgtgtaatcttgtatcctgcaatggaaaactttcggccgctctttcccggaaggttcgttccctgtcccagaaatccccatctcagccggagatacagagccagattcagtttgcgcagatactgccacaattcctttttcttctccatattttcctctgtcccggacttgatggccagtatggaagaaaccgtcatcataatctcgagataacgcaccatataatggcgaagcttacgcttctttaattttgtgacatcgcagtagccaagcatcagcttcgtcacgcgtatctgctggtcgattcgtccgatcataacctcctcgtttacggactggtcttctcttccgatgaaatagcggtagaaattgacatttaagtaatacatggtctttacgtgaggaagcggctggtatacgaaaatattatccacatagaacgtgtgcttgggaagctctaaaccgcattcccgcagaagctcggtacggtaaatgacggaatgcatcagaatatactggcccagcatgaagacctttacatcatcccaggtaaacagttcgttctgcggaagcgccgtccggtaattcatgacctttttccgctttgctccctgtttctcatagacaaagttgctgatcagcatgtccagcgtctcctcgccgcatacgaaccggcgaagtgtggcgagaatctcctgataggccgcctcatccacccagtcgtcactgtccactactttataataaatgccggcggcattgcgaagccctgcatttactgcctcgccgtgtccgccgttttcctggtggatggcccggcagatgcccggatactttctttcatattcatctgcgatctctgccgtacggtcctttgtggagccgtcgtcaacaatcagtatctccacctcgtcgcctcccggcagaagcgattcgatacagtgcctcatataggcctctgaattatagcacggaattgcaatggataataacttcacacttcttcctcctttatattcgtcttacgttctattctgatcaaacaaaaaaccgagagaactgctgccagaaccagggcggtgccaaacacaaaacggtccgtcttctctgtcagaatctccagacctgtatttacagcaatgatggatgtcatattcgccgccgcatgaaagagccagggagcggccagcgtctggaagcgctcgtaaagccatgccagtaccagtccaaggagaaacgcgtagactccctgaagcagattgccatggtaaagtccaaacagtacggccgatatcagagcggccggccagaatggcatccggtctctcaggggagcaaacatcagcccccggaatatcatctcctctgccgcagggatcaagaccccaggaccgagaatctgaatcagtaacggaggtgagtaaaaggtatccctgaccgcttcaaaaccggacgacagctccggcagcggagttaaactaatgatattattgacagatatgcatgttccaattcccaaaagaattatgacgggaaggcagccccgaaatcgaaacggtatgggcggaatcactccccgcctggcctgatcggaccggtatggccagtaacagagtaccggaaacgtaaccacagcccccagcagagtgcacgtcactgcctgtaacggcaggatcagtgcgataactcccgttaccagactgtaaaacacaagcggaagaatcaggtacagaatcaccatgaacttcgaacctctctttacctatattaatatgaacattatatcatctctttgcaatatatccagcccccaatttctaaattattccttagtatttcctgatttttctcgtgcaaaggcgtggaaaccaggataaacctataaacttacaaaattataaaaagtagttttcgtcaataacttcagccgggatttcggtgttttcgttccgtcagggagccggggccggagcgcttcccccagtttcggcgatttttgcaggacgtcggcagctcttaggtcggaagggtgcaaaaacaaggggaaaaatctgacctcaaaggcagatttttagaggacctgaatcgagaagtccttcaggagttctcgatgaatgtcatcggtacccttgtttttgtatccttccggccttagagatgccccggccgaaaccatgagccgaaactgggggaagcgctccggccccggctccctggcggaacgaaaacgccgaaatctctctcagtctcatgaggaaccacaattcttaataattttgtaagtttacaagtttattctgcgtggaaataagaactgattgctttttctctttccagataatataatatccttatacttttttgattaaattacatcgaactgagaggtaactgatatggcaaagaaacgtattgttatggcattgggtcacaatgccctgggaacaaatcttccggaacagaaaaaagcggtgaccgaaacagcgaaagtaatcgcagattttatccaggccggatggcaggttgctttaacccacagcaacgccccgcaggtcggcatgattcacacggctatgaacgaattcggaaaacagcatgacggttacacctctgctcccatgtccgtctgctcagccatgagccagggctatatcggatatgatttacagaatggaatccgcgccgaactggtaaaacgcggtatctataaaccggtagccacaatcctaacccagatgatggtagatccctacgatgactccttctacactcccatgaagccggttggccgttttatgacagccggggaggcaaaggaagaggaagaaaaaggaaattacgtggaagaaatcccgggaaagggcttccgcagagtcatcgcctccccgaagcctgtctcaatcgtggagattgacgtaattaaggcagtcatggatgcggatcagatcgtcatcgcctgcggcggcggcggaattccggttatggaacagggctataatttaaagggcgccagtgcagtcattgaaaaagacagggcggccggacttctggccaaggagatcgacgccgatgtcctcatgatcttaaccagtgtggacaacgtcaccattgattacggcacaccacaggagaggccgatttcccatatgagcatcgaagaggcggagagctatatcaacgaaggtcagtttgaatttgcctccatgcttccgaagatcgaagcttccgtagactttgtcacacacggcaaaggccgctgcgctatcattacttctctttccaaagcgaaagcgagtctggcaggcaaagccggcacgacaatcgaataaccgcagacccgctgcatgaagaatcttcttcacgcagcgggttttctgtccgaaccacaggaaaaaggcagtaaagctgccgtgtcactctatgtgatatacaggtttagaatggggattaaaaactatgaaggttgattatcatatgcatacgctgtgttccgacggaatctacgaagtggaaaccgtcgttgacatggcggtaaacaacggaattcttgccatggcggtcacagaccatgatacgctggcgggtataggacgggccaggcagcgctgccagggccgtgtccgttacatgacaggaacggagcttacatgtgcggagcggccctggggttctctacccgtgccgcagtccattcatctgctcggatacgggtttgatgaaaatgacgagactctgtgtgcactgctctccagccggaaggaacggactgaaaccgtctaccgggatctggcagaggcggtaaccgcttcaggctgcccgctccgtatccccgacgtccccaaaagctgcggaaacgtacttcagcttcgtgatgtcatggctcacgtcaggaaaacatttccctcggtaagcgaggagaccatacggctgattgattccttctcaaaaaacctgacggaggccaacatcaccgtggaggacggcattgccgccatccaccacgctggcggaaaggcagtttgggctcacccctatcacagctaccacctttttcagaagcaaacgcttcaggcagatgaggtatctgtcatgctgaacgaactggtacgcatggggcttgacggtctggagaccgagtatcccgcgttctccctcccggagaaaagttttctaaacggactcgcggctgactatcaattatttaccacggctggcagcgattttcacggttccgcaagcagaaaccggatggggatggagacagctcaaaactcctttttcttatagatccgaacgctgataaagtacgagaggaccatcatgatcacggttctcagagcaccagcagcgatggcgatggccgctgtcccctcactcaccgtgaagccgctgccatacgctgacgcaaaagccacgaacaggaagactgccgctgcgattaatacgctgggaatcagcctggccttctctactcccagccagtatgtaagcgggattgagaacgaattataaaaaaacgagattacaataccggtcagccagttcatcagcagctctaggagaaattccggtcccattgccatccccttgacggcggcagcggcagccaccacggccactgcgatcagtccgaaaaaggtggaaatgcagactgcgtaaaaatacttttccaacaccattttccagcgcggaaccggtaaggtcagcacatacgtctcccactttgtctgcctgtcataagaaaacagattcagcacattgatgcctgctaccatgataaacatgggaatcaggaacattcccgtcttcctgccgcccagaaagacgagggaccatactaccagaataaacagcatggattttatactctgccgcaaaatatagtaatccttgatcagcagtcctttcattttctatccctcctcacagaatacagcatgatttcctcgatgttcgtccggtctgtcacaagctccggatatcttctcttcacatattctctcccccggatcagcgcttccaccccatagggattcttcctgactcccacgacatggacatcggtcaggccggccagttcctcttccccgcatcggagaattcccatatcctccagaagctgatccttttcctccgaaaacagaatgcttccgttatgaatcatggtaacgtaatccgccaccttgtcaaggtcgctcgtaatgtgggaagcgatcagcacggaatgttccccgtcttcaataaacccaaagaagagatcgagaatctcatcccgtgcaaccggatccaagccgctggtcgcttcatccagaatcaaaagcttcggatgatggctcagagccgccgcaatcgccagcttcatggccattcctcttgaatattccttcacttttttcttctctggaagagcaaatctggacagatacgaggagaacagctcctcatcccagtttttataaactcttttcataattccggagatctgaacggcacttaggaaatcgtgaaactggctctcgccgaagaccacgccgatctcctctttgacctcctgttcccgttccctgatatccattcccagaatctccacgtcgcctgcgtcacgcttaacaatatccagcatggccttaatcgtcgtcgtttttccggatccgttctccccgatcagtcccatgatgcttcccatgggaatatccaggctgatgttattcaaagaaaaatccggatactgcttgcttaaattcttaattctgactgcatattccatcatgattccctcactctccgtcataaagcatctttaaaacctcacacagctcctcataggaaatgccgcttctcctggcgatctccgcggctttcgtcaaatgctcttccgccatccttaaattcccctcccggattacctccgtatttcttgccgccacgaagctgccttttccggttatcgtctcgataaacccttcctgctccagatcgttatacgccctttttgtcgtaatgacactgattcgcaaatcctttgccagggttctcatactcggcagggcatcccccgccatcagctgcccgctgataatcatattctgtatctgtgatgtaatctgttcatatatcggtttcccgctggaattgctgatgatgatattcactgcaccgcctccataatttgcgtctgtaactgtatctaccgtaattagtgtgtatactttatatatacactataccatcttttctcatatctgtcaacatccatttcccacagtacaagtcaaaagccctgcagaaataaaactgcaaaaaacgaatagagacagaccatccttcaatatattaaaccaaacggactcaggtgatgctatggatatgaataagaaaaaacaactcttccgtcttgtaaaggtgctgcttttatttgccctggcctttatggccggtcgtttcggcgccatgatgacggatggaaagcaggcggttgaaactgcggctgacgggaactggggattaagcttccagcaggaagggcagccccctgtggccaatgccaccgccgattacctaaagaaattcaacgcatattatgcggaaaacacaccggaaaaagtgctctatttgacatttgacgcaggctatgagaacggcaacaccgcggcaattctggacgcgttaaaaaagcacaatgccccggccaccttctttgtggttggaaactacatagaaaccgcaccggatcttgtaaaacgcatggtagcggagggccatatcgtaggcaatcacacgtaccaccaccccgatatgtcaaaaatctcgtcaaaagaggcatttgagaaagaactgggagatttggagaaattatttaccgagacgacagggcagaccatgaaaaaatactaccggccgcctcagggaaaatatagcgagacgaatctgcagatggcaaaagacatgggatacagcacatttttctggagcctggcctatgtagactggtaccaggataaacagccctccaaggaggaggcttttaaaaagcttctgggacgtatccaccccggcgccgtcgtgctcctgcacagcacctccagcaccaatgcccagatccttgatgagcttctgacgaaatgggaggaaatgggatacacatttaaatccctggatcagctggtaacaaagtaggagggggggatttgtggaggggtacgcggacgttagtggggcagttgaggaaaagggagcgcgggcggcagggagggcagggcgaatgatatggtggtcggtgggacttagggcggacagccgtctccgcaggggtcccggactattcgaccgaactcttgatgagttcgctctcagagtccgcaaaaccgcgtcctgtaaacgcggttttgcccctgctccgacaactgtccgccctaagtcccaccgaccaccatatcattcgccctgccctccctgccgcccgcactcccttttccggccaggttacgaaacgtccgctgcttaacggctccacaaagagtggcagaaaaaagtagtgacagtccggtgtatcgtaaagattaaagattaaaaattaaaaaggggttgcttttcctcagctcggccagccccagcctcatagcctgtaaagaggagacgggagtccggggaggcggaggctgggacggtttcgttttctgaggttcgcaggaagttaagtggaaaggcgggaaaaaggggtggtgaaatcaggcctcaaagcctgatttcaagcggacacggaggcgaagtccttcaggagtttgcgcggtccgccccttttttctgtctttccgctttacttcctgccaccgaagaaacgggaaaccgtctcagcctccgcctccccggactcccgtctcctctttacaggctatgaggcgtacccctcacccattttcccccgcaatccacttccgataccactcagccgaatccttcagcacgcgcctctgtgtagcataatccacataaaccagcccaaaccggtccttatacccttccgcccattcgaaattatccagtaaagaccagtaaaaataaccgcggatatctgtgccgtcttctctggctttcagaaggctttctatatatctgtccataaaatcaattcttgacgcatcgtgcaccctcccgtcacggctgaccatatcgtgacaggccatcccattttcggtgatataaatcggctttccataacgttcatacaggaactttggcccccagtataaactctccggtgtcaccggccatcccatggcggtagtctcatatcccgcgggccgttccaggaccatcggccttccgtctgctccggctttgacccggtagccattatagatattctgaccgtagaagtcgagaggctgatgcatcagttccagatcaccaggacggatatccggcagatattcctcataccgtttcaccccgtcttccggatacctgcccagcatgaccggatcgctccaccagctgacgttccagctccagccgccggcatcctccgggcaggcaaagtaacgcgctctcgccgcttcgatgtcctcctgactccggctggcaggagcgcttacggttgaggttggcgcataaccgatcatgatcggtctctttgcggccgcgcgcatggcctgtaccgctttgccgtgggccatcattacatggtgcgccatgagaaaaccatcatgcagcggattcttcagccccggagcgtgctcaccggtgacgtgacccatcccgataaaacactgcggctcattaaacgtaataaagtatcttacccggtccgaaaagcgctccgtcacaaggcgcgcatactccgcaaaccagttcacggagtccggattcatccagccgcccctctgatacagcgcatagggataatcccagtggaacagcgtaatgtaaggctcaatgccattcgttatcagttcgtcgatcagacgattgtaaaatgcaatcccttcctcattgacggtcccctggccctgcggcagaattctggcccagctgatggagaaccggtacgccgaaataccgatctgtttcataataccgatatcttcccggtagcgatggtagtgatcacaggccatatctccagtatggcctccgaatatctttccgggctgtcggcaatagatatcccatatattcaggccctttccgtcttcctccgcagcgccttcaatctgatacgcagacgtagccgctccccatatcatcttttcctccacagactcacactcctctccggcataccacggcaaccggctccggtgctcccagctgcctgctccgcttatccggctggctcgttccaatgctgaattcatagaccgtagcattttccacgtactggccttcggaattaacacactcatacgtatggcttcccaactccagctcaacctgttttacttcccccggctccagctcgatgcgcttaaaaccacacaggctccagtgatccacacgatcaggcgaatctgccggattcacatagacttcaatcacttcccgtgcacagtagtctcccatattccgaacggttacagatgcttttttcccttctactgctccgtcagacaattccacccttccataggttaatccaaaaccaaacggataaaggggctcttctttgatgtaccggtacgttctgcctgccatggaatagtcctcaaactccgggagagcagacaggtccttataaaatgtcaccggcagctttccaccgggagtgctcctgccaaagatcagccgcgcaaatgccgtgccgccttccgctcccgggtaccatgcctgaatcaccgctcctgctttttcctgtgccagtgataaatctacggcacttcccgtcatattgcatacaatcaccggtttgtccagagccagtatttcttccatcagcctgcgctgggaagccggaagttcaagtccttctttatctccggaggaatagctgtttccggtatcgccctcctctccctccagtgtttcatccagtcccacgcagagtatgaccacatcgctgtgtcttgctgcgattctcgcctctgacagccggtctccgggaagtcccagatgctccacccggtctttgtagagatggcagccctgggcatacagcacagtggttccttcccctgcctcatgctgaattccttccagaatcgtcgtataatgggatgaggtgccatgataattaccaatgagagcgatccggctgttcgcattagggccaatcaccgcgatctttttgacagagtccgggttaagaggcagaatcccgtcgtttttcaataataccatgcttttctccgccgcttccacagcccgcctgcggtgttcttcacattccaccgcctcgtacgggatcgcatcatactccgttgtctcccccagtccgagtaaataacgggtcgtaaacagccttacaacggcttgttttatctcttcctccgaaatcatccctttttcatacgccttcagcacgtataaataggtatttccgcaatttaaatcacagcccttagagacagccagcgccgccgactcctccgcattatcggtcaccatatggctctggtgaaaatcacggattgcccagcagtccgatacaaaatggccctcaaagccccattttccgcgaagaatctcttccatcagcagtgtgctggcacagcatggctctccctcgtagcagttgtaagcacccatgacggactctactccgccttccttcacgcaggcctcaaaggccggcagatacgtttcccacaaatcgcgtttcgttgaggtggcattaaactcatggcgcactgcctccggtccggaatgcacggcaaaatgtttggcgcaggcggctattttcaaatgctctccctctccctgaaggccctttacaaaggcaactcccaggcgggaagtcagatacgggtcctccccgtaggtctcgtggcccctgccccatctcggatcccggaagatgttcacatttggcgtccagtaggtcagccctttgtagatatccccgtcgccttccttctgaaattcattgtatttcgccctgccttcggttgatacggtatctgccacacttccaatcaacgcctcgtcaaacatggcggcaagcccgatggcctgcggaaacacggtggcggtaccgcctctggctacgccgtgcagcccttcattccaccagttgtaagccggtatctgcagcctcggtatcgccggcgcatcgtaacgcatctgggaggccatttcctccacagtcatctgctccaccagttccattgctttctgccttgctgtttgtctgtccataagttcctccaaataatctttatttcatgtctttatctgtaatttttcttttcaagcttccgaacctgcggtataattgcatcataatttcaacgttagaatcccacttgccatgtcgaaaggaggacgcagtatgagccgcttaaactatacgctgccggatgagtaccacgggagagagatggaaggatgcgtggaaaaagtagattactacttaaattccaatatccgtatctggcataatatccagaacgaaggctatgccctgcaccagcacaacgccatagagatcctcgttccgatcgagaacagctacaccgttctcgccaacaaccatacctatcagctggagccgggcaacatcctctttatccccgggctcacccttcacgagattatgaagccggactggggcgagcgtttcatctttatgtttaatatggatcctctgaccagcttccacgattacagttccttggagcccgtgctgctcgatccctgttttctgacgaaacggacgactcccggtatctatgagcatatttactcccggcttatggaaatcagcacgctctatttttcctccagcatcaccttccgtgaatactccatatacgctaatttgatcgatatcctgaccaccatcggccgggaatactatgacgccctttttgcaggaacggaaaatactgcggaaaagagctacgattactatcagaagttcaacagtctgctgtcctacatcaacgatcacttcgcggagccgctgactctggagaaaatggctgattacacgggattttccaaataccattttaccagactgtttaagcagcataccaattcaaccttttatgattatctgagccgcaagcggatccaggcggcccagacgctcttaacaaccgatgcctcgatcacgtccatcgcattccagacgggattcaacaactcgacctcatttacgcggtgttttaaaaagtacaccaattacagccccagtgaataccgcaccaaattcatcgaagatgtgccggggaatgtcacggttttttaatgccggtactatccctttacaccgcccagtgccacacctgcaatgatatactttgacagcagcagatacacgatgataagcggaagcacggtgagtgccaggcctaaatagactgagccgtattccgtcttgtagatatcgccccgcagaagacttaccataatgggcatcgtatatttctccttgttggtgagaagaaccagcggtgtgaataagttgttccagctggatacaaagctgaatatggcctgcgtggcaatcgccggtttcatgatcggcagagcgatcttattgaaaataaagaactctcctgctccatcgatacgggccgcctgtacgatctccagggacaacgccggcatcatgtactgtctcataaagaataccatagccggtgaggcgagcgctggcaggatcagcatcgacagctgattcgtcatatggatccggtacaccatctggtaaaaaccgatcatcgtcacctgggccggaatcatcatgactgccatgataaaactgaaaaacggtctgcgcagacgccagtcatataccaccagcccgtaggccgtcattgtggaaaagtacaccgcgatgcctgtagaacatgccgagataatcagcgagttcataaagcccaccatcggattaaagcttttgcctaacaggatggataagttgcgcatcatatatccggagggaatcatggagatggcatgctgctgaatctgtgtcgtcgaacgcgtggcattgacgatcatgatccagaaaggaaggatactcagtatggcgaggcagatgcagacaacgtaaatgacaatttttaacgcggtcgacgtacgtttcttatatttcatcagcttttcctcccttcttttaacgcttttctgtattccttctcctgtctgcgcttctgcttattcagaagcgcttcatccttatcccgcatcaggaaaaacaggacggctgaagccgcgcagatgatgataaacattatcatactggctgcggcggcgcggttatacatataactgccgctgaatgcctgattatagataaagacgctggtggtaagcgtggcattgtccggtccgcccatcagaaacagcttcgggatatcgaacatctgcaggccgccaattaaactggtaaccagtgtaaacagcagaatcgtctttaaattcggaatggtgatatagaaaaatgtctggatccggtttgctccatccacctctgcggattcaaacagctccggattgatccccatgacgccggagaccagaattatcatggtgtatccgtaccacatccagaactggataaattccaccgtcccgcgtgccaccgatttatcaaccagaaagttaatgggctccttcgatattcccagacgcataaaaatatcattgaccggtcccatcgggtagcctaagagagcgttaaacaggattgcaatggttgccgccgtgataatattcggcatataaaacagaactttaaacagtccttccccctttatatggtaccgcttatccgtaaaccacgcagtcagcaggagggccaggccaatctggggaacaaaattaaacagccatatgtgaatggtgttgccgaacgcttttttaaatgaaggattggtaagcaccgttttaaagttctgaaacggatcctccagaaagttaaaatccacggctcccattcccttaaaatccgtaaatccgatcaccccggtaaagataatgggatacagggaaaagatcagaaatcccagtacaaacggagcacagaatatgtagccccatttcgcatatctcaatcgtttgcgtttcatcgttattacctccctgtaaaatcagggaggacagaaactgccgtcctccccatgatggtgttcgatatcggatgctgtatttctgatacagcgcctcgccgcttactccacaataatatccagattatcggccacctgctgtttaaagtctgtgattgcctgttctctgctcttattgccggcagtgtattcacgaacctggccgcgccagtaattgttaatggtctcatcgtactgggttaagtttgtaccgttggcaaacttgttggccggaacgaagacgtcaaacatgttctgaccgcccaggaaatctacggaaccgtcagatttgctcataaccgtaccggaagccaccgcatcttttgttccggcgtcgttcattgttccatttgcccacatgtactgaaggctgtcttctgagtcatccagagtgatccagtcaataatatctgcaaccgcatcttttaccttcgtgtccttgttcgccagtacccaggtgccgccccagaagaaaccgattggggaatcacagacagcccagtcaccaaaggtgccttcgccgactgctgtaccgccgcagttgggcgccatggtatagttgatcagccaggccggtccgaagaagccgagaatcggctttgcaccttctcccttcatatcggcaaaccaggcatcctgccagtcctgcgtgtcattgtgatagccgttatcctttaacttcttggataaatcaaggaatgcttctctctttggatcgatgtttaatttcccatctacaatccagcctttatctgagctgttttccactgcatgccagatatctccgtcaccggatacgataccgtagcctttgcccttcaaatcttctgccgcgttaaagaactgtgtccagtcgttggttcctgcgccaagctttgctccgacttccttcggatcatcggttccccaggtgtccctggcgatggagcggcgatagataaacgctccgccggttgcctggtagcctaatgcgactaccttgccgtcggtattcgttccgatatcgactgcatactgtgcaatctcagaggatttgatctttccgtcggcgtcaagccccagatcctcatacggtgctgcataacggctggcatcaccctgcgtatatttcagcacgaatgcggcttccgcacagtagatatccggtgcatcgctgcctccggctgccagcgcctgatccagtgccggctgatacgcaccatcggtagttgcgataattgtcgttttaatctcataatcaaaatcaggatgcagttctttgtacttctcaatcatctttggcacttcatcggtaaaggaccagacattgattactttggaatcagaggaagctccggctttatccgcagttttttctgtctccgcagcagcaggcttttctgccgctccaccagcggaagcaggtgctttcccgcagcccgtaagggaagccgcgatcatacagccacataacaacccagcgatcatttttttcattataaatcctcctttgatcttgattcgcaggcccattctctcaagacctgcaacgtttttggtagctttattttaccatatgtaaatgaggattttctctacacatcttgcttttcatattacataaattgcgatgtgtttttgtgtttttcaataaatctacaatattttaattaattattttatgcatttatacctttatgttatggataatccggaatcattttgtgctttttcttattttaattcatattttcatattttttcatgtatccacaacagcaatatatgaatgggcaatccgccgcatcaaccaaacgcagtatcaatgattcaaaaaacggaaaaaagaatgcagccggaccgataagcaatcatctgtcctgccgcactctttttgttttttaaacagtctggcctgtttttccctccattgcatgaatcagttctacgaccatttcatgagacggaaccgggataccgtttttgtggccagtacgcacaatggaaccgctgatagcatccacctctgtctttcttccgtcacgaagatccgcataaatggatgggtatccgttcctggctccttccagaagactatgaagaccttccagaaccttctccggcttgaaaacaaatccttctgaccgcgccgtttctacggcttcccttgccagtcgttcaaccaggctccaggcatgggggttgtccagtaaatacccctggggtacctgtaaaattccagacacaacacttacagaggtattcacaaacaacttgtcccagataaaacgtctgatatcctcagatatactggtctctataccacacgccgacatttcttccgccaatatatataccaacgtatttctggcatgggcagatccgatcgaggtaacccctgatccaccatggagaaccgacgtgtttcctgttaaaacgctgttatggcgtgtcgttccaatcacgatccgtgattcttccacaaattctctcagcagttcctcgtgaccagaaccattctgcagtgtcagaagcagcgtatccgggccaaacagcccacggttttgttccagtacttctctggagaccagtgattttgtaaacaacattactacatcaggtatctccctcaggtcttcacccgatacggccgctcgcggaaataaatgtaattctgtcccgtcattttcacgaattatgactccgtttttctttatctcctcaactttctctgcgcgatgcccataaatacatacatcatttttcctgctgagcagaccgccaaacaaaagccccatggcgccagcccctaataccgctattctcataaaccgtcttcctgctgctttcccatagattttgacttgcgtatgcagacggtcactgcattctgcaccgcgctgcgcatcccccgttcttccagttccatcactgcatcaatcgtcgttccccccggactgcataccatatctttcaattctcccggatgcattcccgtctccaaaaccattctggcactgcccgctactgcctgtgcgcagaacgtataagcctgctcccgcatcatccccccagctaccgcagcatctgccattgcctcaataaaaagatagacataggcgggagacgagcctgaaactgctgttacaacatcaaacaggctctccgtaacctcctctgcacgtccaaagcttctgaatacagtgagtacgtcttccatctgtatccgggacaccagatcattgggacagacagccgccatcccctcgcctgccatggctggtgtatttggcataacccggattacaggaatatcccgtttaaaatacctcatcagaacagagagggataatccagccgcaattgatacgacgacgctttcgctgcggaccgcttctctgatctctgcaattaccgctggacacacattcggctttaccgccagaatcaaaatatctgcgaaagaagctgtgttacaattctcatcggttatttcaatcccatactccgcttttaaagcttccagacctgaaggatttttatccgataccaggatatctccgggttttgtaattcctgccttcagcattcctccaatgattgccctgcacatattgccgccgccaataaatccgaatttccgttccattttatccctcctcctttctgatgcagtttactattaataggtcatgtttggtgctgttactgcaaagtaattatcgtagttctcatacagcgtaacgctggctccctctcctgcaagattcgttaaaattgtctgaagggtaccgatatcaacctttccgtctgtcttcccgtccagataatccatgcagtactgaacaccgcctcttaaggacatattggtaacggaaagcggccagccggtaaagtggcctgtcatgtttttctcagccgctttttccacaatctgcttattcagataatcgtaatcacctgcatactcttccggaatctcgatacccaaaggattggcatagaatgtcggggatggatcctttatgattaaatagtaaccttcctgacggtctgccagtgttttaataatcggctctgtctgggaaaggttggttccatagaacgcagtcatctccccgtattcatccagttttttcggtacatcttccagaacaaactgctgcgtacccgtagtacctgcatctgaggtaggatccggtgtggtcacatccacaaatgtgattcccagttcttcgcactttgcctttaaattgtcatgataagcaagttttgtcgcaatagccagatggcgggggaaggaatagtgcaaaacagttttcacaccaagctcacttaagatttccgcatcctgaacacctgcagttgcaaagtctgtattaaatacaacatctgccgcctgcgcaattacatcattatcatccattggaagacctgcccagataaagatatcatcacgtacttcacgaatcttatcaatcgctgccgcagttccgcttaccgattgtgtaaagataatcgccttcatatccgggtcggaggccagagacagcgcggtggatatggtggtctccatctctgttgcaaagttatccgggaacgtcacatgaacaaccgtatccgggtattctgctgccaattcttccgcaacccgatactcctcttccgcctgtgatactgttgtagtcataatgccgatcttataaccggcgttttctgcagcttccgctgtcttttccatagtttcatctgctgacgtcttcgccgtctccgccgtggttgtcgtctccggggtcccgctgcccacagtacttccacatgccgccagtcccagaaccattgtaagtgtcaatgcggttgcaatcacttttttaaacataatcttcctcctttatattgaatccttctttattattttatttattttcttcttttgagcgcttatctgcagcctgtttcaaaccatacagcaccagcgagattgtgataaccgcataacctacaaacacgcggaaatattctccgatctgcgcatcgccaaataacctgtttcctgccagaggtgaagtaaaaaacaggatatgaaacagtgctgctcccagaaatacatgacctatactggcctttttaatcgatgcaccgcctaccagcagcgcggcaatcgcatactgcccgacctgctcatgactgctgaaagtattcatgtttcccatgttctgtaaatagatcacctgaccgagggccgctataatggtagaaaacgttatggaaaacaggcggcagcgccccacattgattcctgaaacaatagcaacatccatgttctgtcccgtggttcggatatcctgtccaatctttgttctggagataaatgcagtaagcagacagagcagtgcaatgattattcctacaaccatgggtatctgtgttgccgcacaggccaaatgaagaggcggtatcagccataccagagcagccgaagctgtcagtgccaccgctgccgcgactgcactgcgacagtcctttactgcttctgaaagagttcttccatatctttttttctttctcaccaccaggatcacaagcactaatatggccgcaagcgccgcatataccacagaccagtccagcgttatacgccagatgtgatccaaatagttcttaacatcatcatgaaacgcaatggtatttttaagtcctacgccgttggacagcatcagctccgcatcctgaaacggaattacacggcccagaagtatcaaaaaagtcagatcaaacaaaccgattgagaaatatcccagaataattcctgttatcatttcctgcccgacagccctgttcataagttttccaaccgccaagccgaacaaacctcccagaacgctggcaatcaacgctgcaagcagcatgcccggcgctccgccaatgttccagtgagtgatcattaccagtgagatctcccccgccatcgctccaacaacaatactgaagttcagtcccataccacaaagaacaggcagaatcagggataaaatcaaaaccgcgttcctcgaaatacgggccactgtctctttcacaatatagctgagaggctgaccggaacaaagaatacttccgacacataaaatgacgaataacagagtcacggcattcccgctcaatacatttcgtattctagctttcatcagattttcctcccatcgatcttagtcaatgcgtaaaggataaccccgttacagataataaccctcgcgatttcagacaggctgcttccgtcgtcaatgagctgcgcagaaaccactggcgcaattgtaagaattgcctggtaaagtacgacgccaatgattacatgccatatattggcctttttcagcgaagcgcctccaaccagaatagctgcaattgcaggaaatgccatgtttcgaggtgctgtatacagctgatacattccaatcccctgcgcgtagacgactattccaatggctccgcagattgtggataatatggttcccattaccctcatcctgtcgttatcaattcctattgacctgccaaacatgggattcataccgctcaccttcatcatgactccggttttactcttctgaaatacccagaatgccagacagcccagaccgaataccaggaatagccccgtaggaatcgtaacatttccaatcttaaacgccagcagattatttaataccttatcgtaaaatccatccagtgtaattgtacttcgcactccattccccatagcccacttaattctcggatccgaaaagaacggaaacagcatccagcccatgcacatcagtgagacaatggaaaagttgatatacgttcccaccatcatctccgagccccgcagccggtttaaaagcagtccatataaatatcccacaacagttgcaaacacagatcccagcatgcaggctgcgaaaatccccttcattccctgaattccccattccacggaaagtacaccggccagctgaccgcagagaattccaagcggaagtgcaaagtttaagccaacaccgcattctaccataggcagcatagccaaaacaaaaaagctgtttaatccgatacggaccagtacgtcggaaacaatggttccactgtccagatgcagtgtaaaggtcagaagaacaagaccagctaagaataccataatgataaacctggaaaaaccaatcgcctggtacagacgcttaatctgctgcatgattccccacctccttctgttcctctgtaacgccggcagcactgctcataagaaggccgaatttatattcttcatcattaggttttaagataccggccagttttccctcagtgacaattgcaatacggtcgcagacagaacgtagttcggcaagttctgaggaagtcataattattgtcatgtgacgctccctgtttagctgtaccagataattaagtatcagtttctttgctccgatatcaatccccctcgtaggttctgaaatgaaaagcacctctggattcatggccagtgccttggcaattgaaactttctgctggtttcccccacttagtcgcttgcatggctggctgctgttagtacatcgtatatcaatctcttcgatcatcttttttgcatattcggccgctgcttttttattataaaaccgcatgaaacccagacgccgcaaatattcctgattcacccgcagagctgctattacagtgttcatctctatcgaagcatccagatttaagccgacgcctctcctgtcttccgacacaaacataatttttttcttcagggttgacagcgtatctgccagagtaagagtttctccacgataaagcacgtctcctgtcgcagggtacagacccatgatgccattggcgattcccacctttccatgaccggccaggccgccgattcccaggatctccccttccctcacctctaaatcgattccctttaccagttctcccggcatatcgacgtgaaaattcttcatggtcagaatgaccgggctatgtaattcagactccggtttcggttcctttgtcaccagttctacctttcgtccaatcatcatctctgacagctgaactgctgtcacaccctccatatcgcactgacttacaagttctccattccgaagcacaactgcggtatccgcatattgaattgcctcatccagccgatggctgataaagataaaagaaatcccctgatctgcgaccgcacgtacacaatccaagaactgtttcgcctctccctctgtcagaactgccgtaggttcatccagaacaaccagctttatatttttcttgttcagttctcttgcgatttccacaaactgcttataaccgactgatacattttctactgcaaccgtttcactcaatccttcgagcccaagagaatccagcgtcttccgtgcctcttttctcatagaaaccttatccaccgtctccagctttctgctaatgatacggctgaacaaattgactttcgtaatctcccggttcaagcgaatgttctccgcgatctcatacccgtcaatcagcatgaattcctgatgaaccattccgattcccaggtcagaagcgtcggaaggcttcatgatcttcacctgcttcccctcaaagagaacatctccagtaaaacctccagtagaatggattacatccattccgaagagaatattcataagcgtcgacttgcccgctccgttttcaccaagcaaagctaatatctgccctttcttcaggcggatactgacatccttaagtacccgaactccgtaatattcctttccgatgtggttcatttccagaaggtactcatattccactgcctgtcaccccaattctcaccggattatcagcgctgaacgctaaacatatccttgtaatattctccgcttctcataacaacaagaatcttctcctgattctgtaaaattctgatgtcctccagagggtcgccgtctacgataagaagatcggcctctttccctgcttcaatggaacccgtctcagaatcaatacccagcaattctgcattcgcactggttgccgccttaatacagtccatagcggacattccccagcgatttaaacactccagttctctggcagtctctccatggttaatcagtaccccaccgcagtcggttccgataccgatcttaacgcccatctccaaagctttacggaacatcttctcctggttcaccaaagcctttcttgaattctctatcgtcgaactgccaagaccatatttttctccgtctgccataagctggtatacgatggtcgtaggaacccagaacgttccatgagccttcattaattccaaagtttcttcattaatcatcattccatgttcaatagaagcaacaccgttttcaatgcagtatttggcggactttgcagtatggcagtgagccgctacctttttacctgaattagcagcttcatcgcacagcgcctcgatctcctttttggaaaattcgtctctcggctttcccagaaatgggtcatacaaacctgaggtaacataaatttttattaaatctgcaccagccgctacttctgtacgaattgcccgcctgcattcagcttcaccatctacacagtgaccggaacctcctgcatctggcctggaccactgatactctgtagacatggaagcgtgaccgcccgtctgattaattgcctttcctgaagcaataattctggggccaggaagcagtttctgattaatcacattgcgaaccgcgatcacacagtctccaatatctgcaacgtctcgcacagtcgtaatcccagcccggatcgtctccaacgaattccagtaagaacgcatcgtacgggttggaagattatactgagctacttcattgatcacattattggaagcagtcgtttccagatgtgtatgtgcgtccataagtcccggcatcagcgttcgtccgccgcaatcaacagtcataacaccctccggaagttctacctcagacgaagtccccactttcacaatggaactgccctccaccaacactgttccctccggaataaaaccgcccttgccatcaattactcttgcatgtgtaaatgctttcacaaccctttacctcgtactttcccgcttacttcaccagaattatgcaatcgatatcctattatattacacttattaccatagaatattagtgaaataaacgaatttattgtttgcaatcgatttcagtttatgctatgattatagtcgtaggaatcctactttgtcaagtattaaaaaaaatttatataacacctttacaatttttccatattctggatataatctacaataacggggagttctgtaaactgacggagaaggaattagaatttccagaaagatacaataatgaaaaaaagaaagagtgcatcgactatgacaatctacgatattgcaaaagaagccggcgtatccgccagcagtgtatcccgagttatcaataataaaacaggggtgaatcctgaagtaagaaaaaaagttcagaagcttttgaagaaataccattataccccggatgccgcggctcgcgggcttgtgagccaatcttcccggattatcggaattttgatcgcggatatccgtaatatccatcatacagatggagcttactatatcgagcgcaaactggctgctttgaattactgctgtgtcatcttaaataccggtgatgacgacgaatcgcgtgcccaggcaatctccattctggagcagcgccgtgtagagggtgcggtgctgatcggctcctcctttcagacagaatctgttgcacaggccatcaaacgtcatctgagtaatgtaccgatcgtcatgatcaatgccttcttagatgcaccaaatatttatggagtcctgtcagatgaactccatggagtggaagcctgtgtaaaccttctggcagaaaaggggaggaagcgtctggcattcatccgtgactgctatacaccaagctgtgaattaaaggtagaaggttttcgcagggggatacgcctgctcggccagacagagccctggatctacgattcccacggcactaccgcagatgatggcaaaagaaccaccctggaagttttaaaggatcatccggatgtggagggtatcatttattctgtcgatttgattgctaccggaggcatacgggcgctgtatgacctggatatcgccatcccggatcaggtatccgtcattggtgtcgataactccatttacggtgaaatctgcattcccacacttacgtcattagataacaaaacctttgactccagcattgccgcctgccggatcttaatcgactgtctggaaaaccgtacaacaacacggcagatgattcttccctccgccatcgttgtcagggaatccactccctgattctgcatttcagaaaattaattttagggattgcctttctttataaaatttgatatagtgtgattgcaatcgatttcactgtgtaacccgatgacttattttctgaaagaaggtattcacaatgattttttcgagtttaaattccacaaatgatttttccctctgtccatcagcgatcagacgcgctgttgaatatttaaaaacaactgactttttccagatggaaccaggggactatccgcttgaggggaatctaatgtatgtcaaagtattcgatcagacctctattccgtttgaagatacccgtcctgaaattcatcaccactatgcagacgtacagtactggccggagggggaagatcttgcaggcatcaccccgaatccaggtacttatacggtaacggaggctcacgagagtgacgatctctatttcctggagggaattcagaatgaaagttttatccactgcctgcccggctgcatcgccgtctatttcccatgggatgtgcatcgccccagcgtggcttatgaaggtaaacccattacctaccgcaaagtagtcgtcaaagtacatatggatttaataaaagagtctgtttaatagtccgttgcatattccagaaaaggggatcctggagaagcttttgcctctgcaggtcccctttaagtattttactgacaaacatgtatgagtaaacgctcacaactcgcaccgtcaaatcccgttcttctcaaaccactccctgaattccagtgcgtcctccagcgtatgatgccacccaaaccgctttaaatccacccggttttcgtcatttacggccactccctctgcctccagcagcttcttctgtgtatccggagtccggaaggaagccgctccgcttagatatccggaggcgtttaccacacggtgggccggcaaatccgctccgcccaggcggcggttcagtgcatatcccacctgccttgaattcccgggttttccacataacagggcgatctggccataggtggctgcttttccatatggaatattattcatgacaaatctgacacgttcataaaagtccatggtacctcttccatcatgagtttatcatgagttcagcatcttctcgatggcggcctggggcttcacacccacagaggatgcaaccgccttcccttccttcattaagaccagcgccggtatactcataatatgaaacttctcagccagctccctctgctcttccacattgacctttcccaccttaatatggggattttcctcggcaattttatccacaacaggggaaagctttttacacggtccgcaccaaggcgcccagaaatcgagaagcaccggctttccggaagcaacgacttcctcatgataattattatttgtgattgaaaatacagacattttatttgtactccttttttcattgattgatgatattagaatacacgaaaatgatctgctttacagtgactttgttacacacgtaattctgttcggcggcatacggagatttttccggctgcatccccccgcctaccgcaaactgtccgccgccagctccgtaagcctcttctcgttcagcagttcgattcctccccgattcagcttaaccaggccgtctgcctgaaatgctttcagcatccgggtgataacctccctggccgtccccatgtggcgggcgatctggtcgtgagtgatggaaagcttccggctatcatcaagtccgctttcctccagcagaaacgcagcaaggcggctgtcgatctttttgttcaatacctgatccatcagccacattacatcggaaaagcgctccgccatcagctcattggtataattagccactgccgcgctgttatccatcagatccctgtagacatcgaccgggatatgaagaatctccgtgtcctgctctgcttccacaattacatcgaacaggatgctctttaccatgcagggcgctgaaaatatacataaatcccgttccagcagccggtacagtgtcaactccttgccctcatccgatatggtatagacccgcagctgtccattcagcgtcagaatcagcccggtgcattcatccgatccgtggtgaagcacctgccctttctcaaaccgacgcctctgcacgcttcctgccagtgtcctctgctccacttccgtcagttttttccaaaatggaaggtattctcccaactccatgaacattccctccttctacttccactaaccattatatcacaattgattgaaaagtgacctcgtcgttacagtcgaacaggcggaaaaattcggaatactccatacggcccgcctttaattcttctgccagcagcagaagtgtcacggagtctatcgcgccgccgcagagtccggagcgcatgtggatattttccagacgatccttaaagcccccggtaaaggaccctgacacaaaagcaaaccggtaatcggtcacgccttcatcaaataccttccaccagcggttcggattgatcttctcgttccgttccttattttcctccaaatagcggtacatctcgtccgcctgtttgatcggaagggagtatccttttccatacgccttattgtcgataatcatgccgtcttttccataataaatacagacatccggcttcctggtatctcccagtctgcctcccagaaaatccagttccctggtgaaaagctccgccgtctgaatctcatagtcgcggtctgatgtgccatcgaagcccagatcgatcaaaatcagatactcgtgacttacatgggccagccgctctctgacgctgtcctttacgacagccatatcggattttacggaaatccgccccgcgtcatctgccggaatctccaggcctacgatatcgtccatgatcttatacgtctttccggtacgcttcacatttaagccgatattctcaaaaccacagatatcatctttaatagtctccaccgtctcttccagtcccaccatctccagataggctttcacctgctccggcgaacgataatccttcagcagatactggataatatgggtcctccggttccttaagtaatcccggtccgccgccttcgttgccagcatatcccacatcacccgcttcggtatccgggcaaatttcgagacgccggtggtatgcttaaatacggttctcccttttaacgtaagccggtaggactggggaatggttccctcataccgcctggttccggcatcctctgccgccgtcttcgccgcctgctccacccagcccatctgtttcagccagctgcagatggttcggacgtatttatcactggttccctctgtatcctgaagaagctttgcccggtcctcctccgccgtttcggaaagcccctgcaggatcatatgctgcggaatcgaggtaaaaccggcctcaccgataaagcccagtttggctcctatttcaaattttgtcagatgggcgcccgatgccagcagcgaaagcacccggcagaccggcggatacgacagaaatgccgttgtgagcgcatcctcctcttctttgctcccagcttccgcctccgcataggaacgccccagaccggacagcgaacaggtatcggcatttctgtcatagttcaaaaatccgatgctgaccgcccagcgcagaaatgaatccgccggccagtcgctctggtactcttttctctgcccgggcagtaccgcctgtatgatccccgaacacggtgcattacttctcgtgtatcccttcggtgtcccttttcctttcagatgggcgtacggcacgatgaccggatctgcctccagttcctctataaactccgctttgccatcttcgtctgaaataagccggaccagtttgtcctctattaaccgtctgttgacgggagaccccggcacaaagaccgataccacattttttagattgtccagcttataggcctcctgtacccagccaaatgttctgacagccacccggaacacctccctttcctcttatgtctctcatctttcgtctgtatcacccacaaccgagagttccgccgccttctccgcatggatcagggccgtatcaaacagcggcacatccgtgtccccgctctttaccagaagaccgatctctgtacagccaaggatcaccccctgggcgcctctctcttttaaatgggcgatgattgttaaatatgcctcttttgatgtctctgacaggatccccctgcacagttccccgtagatcacccggttcacggtttcgatctccgacgcctccggaatgagcacctccacgccgtactctgccagttttcccttgtagaaatcctgagtcatggtatatttcgttcccaaaagtcccacacggtccattctctctgtcttcagccgcagagcagccgcctccgcaatatgcaggataggaatatggatcttactctgaatctgaggtacaaccttgtgcatggtattcgtgcagattacaataaaatcagcccccgccttctgcaggctttcggccgcctctcccagtatttttccgcttttctcccattctcccgcggcctggcactcttcgatctcctgaaaatccacgctgtaaagaatgcatctggcggagtggagacctcccagcctttctttcaccgcctcattgataacctgataataagtaaccgtgctttcccaactcataccgccgatcaggccgattgtcttcatctcttctcttcctccattttctggcacgacggacagtaatagaccgccccgcccagataagtttcctttataatccctccgccgcatgcgggacagccggaagccactgtattctttgacatcagcgtctggtagccccctggatttccaaagagatctttttcggtgtcgcgcccgccctgttccgtcatggcttgaagtaccatccttacctgtttccacagaacattttgttcacagtctgaaagggttaaaaccttgcgtttcggatggattcccgcctgaaacagaatatcctgaaggcagccgttgccaagccccggaatccgctgctccgcagccagaaacgccttggcgctcatcgccgatttcacagaagcaagcagttctttaaagtacctttcatcaaattcctctgtcagaggagaaatgctctcgatactctttctgtaatactcgttatcataatcgcccgaatggcaggaaatactgccatacatggccactgtaaatccaatcgcggacccatccgtaaattccaggagaagctggtatttcttcggccggacctcttccttccggataaatcggggatttactccgtcattaaaccccagcctgacgccgccgtcgaattccagttccgaaaagataccaaaaccggccgcgcccgtcaccgtatgaccggccagaagcgactggtactcctccggttcatggttaaaccagcagaatttgtggggtgaggaagggggatataccgctgataccgtctttcctctcactgtctctctcatctgttttgccagatttatggcctccggcagttcaatcatcgcgcatcctccattctgacagccttaagccgttccttcagcagccgctttaaatatttggtatcgtaagccagaatctcctgtttctgatctctggtgttatatgcttttaaaagtatcttcccattttgaaaatcggaaaactcgatatcgtcgtaaagatcatactcccgatccattagctcgtagccattgattccctccggctctgtaaaaggatcctcaaagtcgagaatcatgacatcatttgggcaggcccagaaacagcctgtcaccgccagaaggccggattctctgtcatacactgcatctgtccagataaaactctcctgaaactcttcctgtttatccggccagacgcatgccggcagatagcggaacaccgctcccgtctccacacagaaaatactgcatccgtataaatcctcccggaataccagatacctcttcccattccggtggtgaatcagccggcagaaatctccgtcatcatccagattcgtccagcttaacagaacggttccgtcctctcccacaatatcatggatcaccgcgtggatattcccctttaacgttcctgtataatatcgggaacgcaaagagaaaccatcgtctaaagccgctgtttccggtatccccttttgctcttctctgtgttcttcattgaatatggatgagaaggattcccgatagtgaaggtacgcttccttgtaagccgcgttcatctgcctcacctccttttcttattggctgccttgttgtttaactctatgtatttttatattctatcataaacacaaaattcgcgaaagtcctcatgaaaggtttcgatccgtatctgtaacggttccggcatgtatgtccggcaaacctgaaatgcatgttggtttatggccgctccagattgacagccttcgtgtaatattatacactgtccataatatcattctttcatatcaggcaaataaaaccttagcaaaacggattcggaagggaaggacaatggacaaaaacaatctcgcagttattacatgtatgtgttccggtatgacaatcggccttgccatcggcggtgcggctggcctgtcacacggaagagcaggcataacaatgtgttatggcttattatttggaacgattattggagtaataataggaactgtcattaagaaagtcaaagaaaaaaataacataaccagaaaataaatttgcattatattaagaggagatttttatgaaacaatacgtactgcctgcattattaaaagcacttgtaatgtcggtttgctttactctgctttgtgtcatttatggattcatatccaacaatccttatgagataaccttcatacctgaagtaatctttttcttactgttcttctttgtcaattttatcgaatacttatggaagaaccggaaaaagtagcggctcataaatggatcattatgttttgatgtacactatgaaatcgtacctccttatccttataaacaagcagcccgctaaagccccaggctctcgccctctttcctcactcaaacaacgacatctgaactcccgcctgtttatcctcaaaggtatgcatatactcaaacagccgattgctgctgcagaccattcccgttttccggcattcttctttcaccagggagagcagatgtctggtatccggcgacgggatctcgtaactgtttccataggtacggatatagcgctccttcatccccggaaaatgcttatccagctgcgcatagaaatactgcctgtccccatcccgcagcgtcacgccgatgccaaagagcatcaccccgtacaccgacgcgtcacggcagtatgacagaatgccgcgtatgttctcctctgtatcgtttataaatggaagaatcggagacagccagacaatggttggaattccctcctccttaagaatccgcagtacctccgctctgcgtccggttgtgcagacattcggctcgatgatcctgcaaagctcctcatcatacgtcgtaagcgtcatggataccacacacttcgtcttccggttgatactttttaataaatccaggtcgcgcaggattaaatccgacttcgtctgaatggacaggccaaatccatagtagtcaatcagttccaggctccgcctcgtaagacagagccgcttttccagatgtaaataggggtcgctcatggcgcctgttccaatcatacacttctttcgtttgctcttaagcgccttctccagcagttctgcagcgttggtctttacttcaatatcctcaaacgcatgatccatctgataacaggtgcttctggcatcgcagtaaatgcatccgtgcgtgcagcctctgtaaagattcatgccgttctgtgcagagagaatcgactttacctgtttttcatgcatatagtttcctcccgggatccgcttacatttcaagtcatatcacatcattgcaatacaaatccgactccgattctttttccattcccatttcgaatataatcgaactgtaactacaataccacactaatcacgtcatctgtatgtcatgtttattcatttccccgctgctcgccgactaattatttttgcacagaaaaacggcatcggaacaggacgcagcagaggatatcgtatcgttctgctgtatgtcctgctccgatgccataagggtgaaacgccccgcaggcagagcctgccccacttgatcgggtatcatacctgatccgccgctcgccggaataaacggtcgttattcatccactcctcagccaatatggtttgccacctcaaacgcatcccatatcgcatacataatattggaaaccttccttgcgtctcccagcagatacagttccggcacgtcaaactccagctggcggtacagagagtcctcctcctgataccccactgcaagaatcacgctgtcgcaggcaatctccctctcttcatcaccgcagacaagactcagaattccgttacggtatccggtaacactggcggaggtgacagttttcactccacggtaaggaatcaggcgctccagcatgtctttattggcatgacacaagggaccgttgaccgccatcagccggtccagcgcctccacgatcgtcacgcgcttcccctgttctgccagccagagcgcagtttcacagccgaccagaccgccgcctatcaccacggtggtatccccgcagtctttttcccctgtcagaacctctgctgccggaaatacccgctcgtcgtttcccagagaaaacaccttcggtctggaaccggtggcgaggatcacagcgtcgtaatttcccgccagtaccatctcccggtccacacacgtattgaaatgaaccggaaccttcagagtctgaagctggacctcataccagtgagccagcgcaagatcgtcttccttaaagtcaggaactccgccgggaattaagttgcctcccagcctgccgcctttttcgaacagctccggcttatggcctctcaccgccagcactcttgcggcctcacagcctgccgcaccgccgcccacgaccatcacccgcctgctctttaagataggttcataggcggtcacacgctccctggccgcctgtgggttcaccgcacagttaatcatggaatactcctggacacggcccatacagccttcctgacaggagatgcacgggcggatctgttcacaggttccggccctcagcttatttacatagtcgggatcagccagaagcgggcggccaaggcttacaatatcgcactcgccggcctccacggcctcggaagccatctccggattgtccatacggcctgcacacagcaccgggacatccacggcctctttcaccagcctgcagtacggacggtaaagcccctttttctgatacatcggcggatggttccaccaccatgcatcatacgttcccacgtcggtatccagcgcgtcatagccgtactgcaccagcagcttcgcagtctccagaccttcctcaatatcgcggcccttctcctcaaacgtttctcccggcaaagcgccttcccgccagtcctttatcatgctctttaagctgaaacgcagcaccacaggaaaatcctgtccgcacctggacttgatctcttcaaccacttcacgcgcgaaccgcagcctgttttccagtgtacctccatactcgtcagtcctttgattgaacatggaaatggcaaactgatccagcagataaccctcgtgaaccgcgtgaatttccacaccgtcaaaaccgccccgttttgcatggtacgctccgtccccaaaggattttacaatgctgtggatctcctccttcgtaagcggccggcagatcttatccagccaccggtgtggaatcgcagatggcgcaaccggagggaactctcccagattggtagggatcgtcactcttccaaagccggccgacatcatgagaaatatcttgctcccataggcgtgaacccgctctgtcatctccttcgacgtccggataaaatgaacgggattgtacgtggaattggggcagtttggcatactctgggtctcaacctcacagtctgaaaaggttactcccgtgatgatcaggcctgttccgcccttcgcacgttccgtataataatcgattcccctctgattaaatccgccctcggcatcagccagtcccaatggccccatgggagccagggcaaaacggtttttcaatgtgaccgatcctattttgaccggtgtaaacagattcttgtacttcatggcaccctcctgttatttttataacaatatgataccattccgtacaggacaggcgctatcaacaatcgcttgacggctgtcaatactttttttattcttccggcaaatccgcagaccagtacaacattgcgtaagtttcggtgaattgtgtgcttgatatgcaacgctgtactagctctgcagaaaatcctccagcgcccgaatcaccgaatagcagccgttactctccttataaacgccgtacacttcccatttcagccgctcccgaaaaggaatggccctcatgtggtccatgcggaaatgctctgcagcaaaatcaggcaccacagcaagccctgtcttctgcctgcacagctggtactgaaagtttgcatctgcggttttggcagcaatatgcggcttaaatcccctgacctcgcaggcctccagaaagtcgtggtacatatgaaagtactcgttcatcaggatcagcttttcgccgcggaccatatcaatggtgacctcttccagatcatagaaggggtggccctcgtaaaccagaaggcagactctgcagccggccaggcgcctgttttttacgccgttttccttccacgctccaacgacgaaaccgtattcgatggtggaatccttcagcctctccttcacctcctgattcgagtactcacaccattccacggaaatctcaggattctcatcgataaatctctgaatcaccggaaaagaaagtacattaaatactccgcaggcacagccaatgcggagcagtcgtttttcatttttcagctgctggataccgttgcggatttcctcaaattcccgaatcagaatacccgccctctcatggagcagttctgcgctctccgttggtctcacaccctgtttcgtccgcacaaagagaaccgtatccagctcgctctccagcattttaatattgcggctcaggccctgaggcgtgataaacagcttctgtgccgcctggttgatgccgcgttcctcatagaccgcctcaaagctttttaaatccttgacattcataccattctcccggaagccgccttccctataccccgttgcgggcgcagatatccttcaggcagcatttttcacagaatggcttcgttctggctgtacagacatctctgccgtggaatacgagccggtgacagaaatcactgccctcctccggcggaatcagcttccacaaagccatctccacctttttcgggtcctttaaatcctccaccagccccatacggtttaccaggcggatacagtgggtatctgtgacgatggccggtttgccgaacacatcgcccataatcaggttcgcactctttctccccactccgggaagctttaatagtgcgtcgaaatcgtcgggaactctgccgtcatactgttcctttaagattttcatgcatgcactgatatcccttgccttgctgtgtcccaggccgcagggcttcacgatcttttcgatgtcttccacttcggcccctgccagtgcctccacatccggatactctgcatataaatcctgtacaaccacatttaccctggcatcggtacactgggccgccaggcgcacgctcacaaggagcttccaggcctcatcgtaatccagtgtacaaccgacgtcaggatattcttcttttaggcgcctgatgatttcaagcgcaagcttttcttttgtcatagccgtctcctccaattctgtaatcatattatcactgattggggaagacggcaagtggcagtgcggcgtttacagcatctggctgaactccaccttttcccggttcggtcccagaatggtgaaaaagcggacgccattggcccagaagggcagaaactgaatctcctcgtcaagcatggggtatcccgcttctttgatctcagcaaataccgcttcaatatccgtcacatcgagagccacgtgatccaccgctccgttcctctccgccgcctgatggttctcatacgtctcaatcacaagactgccgcatctcaaaaaaacaactctctccccagccgcttcatttaccgtctcaaatgccgtctcaaaccccagttcatggtaaaatgccgtcgtcttctctatatcattcgtcggaatgccaatatgctggagtcccgttatgtactgtgctgccattttattttcctctcccctgtatcttgattcacagctccaattattcttccacgttacgattccgccacattgataatcaccttcatggtgctctcccggttctcatcgatataccggtatgcctccagatagtccctgaatgcgaaatgcttggagatcagcggcgccagcaccacttttttctcctttaccagacggatcgcatcgagataatcttcattgcggtacatcatactggtattcaagtccagctcatggtcatttaagacagccagatcaatctgagcggttcccgcaaatacagccaccagaatgatggtgcttcccttgcgcgcatattgaatggcctgtcccatcgtaatattattgcccgcacagtcgtagatgatgtcagccttatccggcccgaaattttccaccatggcctcgccgaaattctttgtcttcgtattgatgcagaaatccgcgccgcattccttcgccttttccagcctcaaatcactgacatccgtaatcatgacgctctccgcacccaggcccttcgccgtctgggctaccaggattccgatcggtccggctcccaggaccgcaatcttcgcaccttccacatttccggcacgcttcaccgcgtgaactgccaccgccaacggctcaatcatggcgccctcatcaaagctcatctcctccggaagcggcgtcaccttggccgcgtcgacagcgaagtaatcggacgccacaccggttgtctgaaatcccattaccttcagtttttcgcagagattgtatttgccatgacggcacggataacatgttccgcagaccacctgcggctggatcgtcaccttctgtcccaccttccatccttttacgccgctcccgagcttctcgatctcccccgatacttcgtgtccctgggtgaccggatagctggtaaacggatgctcgccatggtagacatggatgtccgatccgcatacgccgatctttctgatcttaaccagtacctgattctcttccggctccggaaccggcacctcccgaaactcaatttcccccggagcggtcattacctgctgcagcatcatacatgttccctctttctacattttgatttgtggaatagttttaaatacttttatatatctttttatcaaagtatctatattattgcataaactggggaaattgtcaatcctgtaagtcaccttaactctgctatttgtttataaacataatccggctcgcgggacagaaagcagtccaaacccacttcttcttttgcgaggatgcggatattcatagtctaaacgattacttacagacgcataaatcccctgtaccattaccatttagtaaagtcacaggggatttgattttcacttatacaggattcgatactccgtcctttttcaacagcctgtctgtaaaatgaacattgtttcaatccacgctcgataatttcacagagtgcgactacatcttatagatgcgcggcctgacttcatatcagcgggggataccgatttctctccgcccaccactgacattaagcttgtttttggcgtttcatccctccacctgtagaggtgaggaaattcttgcttgttttattaaagaactgcacaaacggccccagtcccaaagcggataccagcgttcccaggccgacaattcctcctgccgcgaagcataccaccgcacagaacacgtcgcaggccatacggcaccagaagtaggagatctttttctgctttttgcacatgatcagcgcaaggctgtcatacggcgccacgcctacatcggaggtctggtataaggagagtccgaagctgcagaccaccacaccgacgaatacagtcaataacttctgccacagcacggaaggcattcccagcgtcacctcccatattccaaaaaagaaggtaacgatgtatcccagaagcagcgcgttcactgcagtgcccaggccgatcaattcccggcccatggtgatctcagcaataaagatcacaagattcaccagaataaggaaaaacgcatactgaatgccggtgcagtccgacagggccattaccatgccgctgaagggatcgttgcccagtcctgaaagtttgaaaatgctgattcccattcctgtaaaaacattaccgatgatcatgatgacggcccgcctgcggtccagtttcctaaaataatctcttatcattttatgaaggggtcctttctcctcagtttgcgcgtttcgtggccggctgtttattccttcaccgccaaaaactgcgctcctgccccatcataccatccttttccagaacatgccataacaaccttaaaaatttatagcgttctcattcaacttttcttccagctgcaactgtcatttacaccatctgcggagtctcatcctccagaatcttagaaagcgccgtcccgctgctggtatggcagcggaccacgcgggtggcgccgtcatcgattccgtcgagggcacactttaccatcttatgggaaaccgtattggtaaacagaaccagaaggtccggacatccaatcttcttatccatgttggtgctcatctgggtaaagacctttgccttgcatttgaattccctgcatatcttcttgtactggctcaccattcggtcgtggccgccgataattactacgctcatttataatacctccagatctctatcgtgctgtctgcaattcacagcctgccgggttttacaccaatactgtttcctccggctccttggtttatatagttagttataactaactatattttaccagctattacaacatttgtccatagccgttcttgagaacatttattaatagatgggaaatggacgaaaaaagagccacaccgtttttcgtggtatgactctttaaaaccgctccctattgtttctgttccagtaaattagtcatgctcttcagactgaccatgagcgtcgatgtattatgaagcagcgcagaggtggccggcgccaggattccgttgacgcccagcaggatcaggcacaaattaaatccgatcacaaaccgataatttctgtttacacggaccatcagcgcgttgctgattctcttcagcgtcacaagctggtccagtgcatcctccgatatggtaatatccgcgatttccctggcgatctccgccccctcgctgatggcgattcccacgtcggcagcggataaagcgggggaatcgttgattccgtcaccgaccatgataacttttctgcccgcggctctctctgcctccacgaaactggccttatcctccggaagtacttcggagtaatactcgtccacgcccaccttctgcgcaatggcctttgcagtccggtcactgtctcctgtcatcataacgatcttggaaagtcccagcgctctcagctgattgaccactgaggcggcctcctcccgcaccggatcgataatgcagatcaccgcagcgaggcgtcctccaaccgccatgtagagatgggaatactccggcggaaggctctcgtactgctctcttccgtcttccggaatcacgctcccctcatcctcgaagacaaagtggtgactgccgataatcacccgttcccctccgatataggaggcgattccatgggctacaatatagtccaccttcgagtgcatttcctcgtggatcaaacctctccggacggactcctgaatgaccgcgttcgccatggaatgggggaaatgttcctccaggcaggctgcaatccggagcatctcatcctcgtcccgcccctcgaaggtcacgacaccggccaccaccggcctggccttcgtgagagtgccggtcttatcaaatacgatggtatctgcctccgccacggactccagatagacgccgcctttgactgtaacccggtagtttcccgcttcccgcatggcggaaagcacggacagcggcatggccagcttcagagcacaggagaagtctaccatcaggatcgagatcgccttcgttacattccgtgtgagcagccaggtaagcaccgtgccgcccaggctccagggaaccagtgcgtcagccatggcggccgcttttccttccacattagatttcagcttctcggagtcctcaatcattttgacaattcgctcgaatctggtggatccggctgccttcttcacgcagatggtgatgcttccttcctccaccgcggttcccgcgtatacgtatgtatccggttccttcttcaccggtatggactcgccggtcatggaggcctgatttaccatggcttccccggtcacaacaactccgtccagcggaatcacgctgcccacatgtactgtcacgaggtcgccctcgcggattcgggagaccggaaccataacctctgtgccgtccacattctgccataccttctcaatgttcagggacatgcttctcgccagatctcctaccgatttcttatgggtccattcctccaaaagctccccgatccccagcaggaacatcacagaaccagccgtattgaaatccagtcttgcgatcgacaccgtgattgcggtggcatccagaacctcaaccgtcagctttcccttcagaagacaccggaggcccttaatgatatagccagcagacttcaccgctgtatacacagcccgaaacggcacaggcagaaatacctttgtaaacgccctcacaacaacccgctgaatcagtttttccttgtattcccggttcagcgcccggccgctgtccttcgggaccagctcacagagtgactcgtcctgaaaggaaaagcgcctgatttcctcgatgataactggccgaaggccgccttcatacaggatagctgcatccgcggtcctctcatagaccttcacctccttcactcccggaatcaggctcatggcacagcaaaacatatctgcctctctcagtgtcagctcacgccggtcgagatggatccgaagccgtccttttatctcgtgtttcactataaatctcatgtctttatctcctgtcctatgtttctccagctcttcaaaaaggaacgcctgaggaaattccatcaggcggtgtcttcttttactctgctgctgtctattctgctgctgtctattccacttcttccgcggtctctgaaaccatctcttcgctctcgtcttcaaaggctccatccgctctctggcggttgatctccttcgcctcagccagaatatcgtctgcgttctcctggatcgaagtggcagttgtcatcacgcagtccttcgcgcgcagtccggcggccagacagttgacgtaaaacttcttcgcatctttacttgccagaattttaacacccgctgtaccgaataaaacacctcctgcaaagattcctatctttttcattttgaagcagtccaacatttctttatcctcctgtttttcttatctatgcttgtaacccgtgtaaaaaaccatcgccaggcaaaaaagcattgcccaggcccaaaacctgtgttttttcatcttcagtcactccttttataaacgttttactagaaatttacccggttagtcaacgccaacaggccttattgagaaatcgagtcatttaccggcgtgatccggtaaacagtatatcctgcgtccttgacagtatcctttaacacggtgtcgctgaactcctgtttcatgcggacatccgcctccgcctccattaagttcacgcgggcatagacgccctccagagaatttaatgcattctccacccggatggcgcagttgccgcaggacatcccgtccacctttaaaacccggcggtgcggatagtgggtaaggtccttatcacttacctttattttcttcaccgcagcctcgcccgaacctccgcagcagccggtggtcagcctctttctgtagcttcttatcgccagaacccctgccataataagggccaggcatataatcgctgttgccatatgtgctccttcctttcttccaatttctcctattagttgtaactaactatagattagtacctgctaactgaattgtcaataatttttttatattcttattttgacctttttccccggctatgataaactatttgtatcacgcattctgatactttaaccgcagggaggtaaacgaacattgaagatgaacgaatcatccgaaaactatcttgaaaccatactgattcttagcaatagaaagccgcacgtccgttccatcgatatcgccaatgaactggatttctccaagccgagtgtcagcgtcgccatgcgcaacctccgcgaaaatggttatattctggtggatcaggatggctatatcaccctgacagattccgggaaacaggttgctgagaccatgtatgagcgccatacgatgctttccaactggctgatgtatttaggagtcgatgaaaaaaccgcggcggaagacgcctgccggatcgagcatgtggtgagcgcaaaaagctttcaggctatcaaggatcacgtgacaaaaggaaatgaattgttggaaaaataggaaaacaggcggtccggagagaaaccttttctctgcagaccgcctgtttttctgtttttgttttgctttttacatagtttgtattctgttccgtttcctgttaaagccggctcacacctgaatccgccttgccacctcctcaccaatcgcaaggcgtacgttatcccgtccgatgatgattccgtcttttccctgctggaaaacacggatatcgcttccctctctgatcccgtattcatttaaaaaatccagaatctggggagcgccgaacatccatttgatcgtatagtcgtctcccgcctttgcctgtgccagtgactgcataactgcacccccatttccgcatcacgcgctgcgtgttttcgttctatgcgctttgaaactatccgcctcttcttactcccagtgtaaccatttttgcgccggttagtcaatggcaatgagggttaggtacttttaatctttttgtatttgacgggaaagtccgtcgatgctccagccagccgctttttcgcgtatatttacgtaatctctgtagattcccttctcctttatcagtgcttcgtgatttcctctctgtaccacacggccatcgtcgatcaccagaatctgaccggcagctctgatggtatttaaccggtgggcgatcaccagcagcgtcttcccttttaccagctctgaaatcgcctcctggatgaatcgttcattatcggcatccacgcttgcggtcgcctcatcgagaatcaccacaggagcgtcctttaaaatacagcgcgcaatggaaatccgctgtttttctcctccggaaaggcttgcgccgccctcgccgatcacggtgtcaaagccctccggaagcgccgtgataaaatcatagcatctggccttcctcgccgcctcatacacttcttctttcaacgcctccgtctttcccatgctgatattctggtaaattgtatcctgaaagagatataccctctggaataccatgctgatatgatccatcaactccgccagcggcacgtcacggatatcttctcctctcatccggacgcatccggatttcacatcccaaaaacgggccagaaggttggctgccgtcgattttccaccgccactgggtccaaccagggccgtcattgtatttggctgtattttaaaagtgacgtcctttaatacctccttctcgtgataggcaaaggtaacgtgatcgaactctatctccgccttgtgattccgctccggaatgtgcttttttccctgatccggcagttctttctccgcgcagacaccctcaatccggtcgagacagctgttcatgaccgtgagccgcgtcgcctcgccgtacagcgccttcagcgggccaaataaatcaaacacaaacaggagcagccccataagatacggaatggtcagggaaccggtctgctgcaggtagacggaaacgccgaacaacagcgccataccgcaggcataaatcaggtttaatcccctctgccacggcgtcattgcttcctcaaagcccagcgatttgtctctcgacaacttaaaattgttggaaagctctgcggatttctctcccaacaaattatagcttttgatgatggctatcccctccgtaaaggaaagtacggcatccgtaagcttctcgctctgttcctgtctgccgacggcctccttcatggagatccggttcattttcccggctgtgatcatcgcggttacggtaacgagcaggccgatgatccccagccgcacatcgaggaagaaaagaaatactgccataagagctgcagaaaaggcgtagctcatcatattagcaatagagctcatggcgatctcttccacaaagatcatatccgtggtcaaaaccgagctgatctttccgatatttcccgccgtaaagtaccccatgggtagctttcgcaaatgagcgcccaaatccctccgctgctccgcgaacatcatatacccggcgccgctctgcagccggtcgctcatcagctgaaaaaacgcttccagaagcacggacacacagagcacgacagcggcggtcacacagtcttcggccgtaatggcaccggtataaaaccgggacagcatgaaaaaggccacgcatagaggcattttcgacagaattgcctttagaacggaaaacagaaaggcaatctcaattctgctcctgtattttcccgacagatttaaaattctctgaaataattgaaccattaccgttcctcctttccgcccgatacacgccactctgcgctctccatggaagcataccagagtttccggtactcttcactgttttttaaaagctcgtcatgggttcccctggctgcaattctgccttccgccatcacgcagatctggtcggcatttttcacagaggataaacggtgggcgatgaccagaagtgtctttccctttaccacctcggagatggcggcttccatcttctcctcattttccggatccgtaaatgcagtcgcctcatcgagaactactacgggagcgttctttaaaatagctctggccagcgcaattctctgcctctggcctcccgacagctgttttcctccgtctccggccatcgtgcggattccatcgggaagtttttcgataaattccatgcactgggctttcgccgcagcttcgagcacctcttcgtcggtggcagtaaggcggccgatcctgatattttcaagcaaagaggtattgaataaatactgttcctgggccacgtaagagattctggcgttcaaggcttccaggctcatcccgcagatatcctggccgccaatggtgatgtttccttcctcaacatcgtaatagtgaatcagcagctttgccagtgtgctcttacccgaaccggattcccccacaagggccgtcttctggccttccctcaccatcaggctgacgccgctgaccacggatttctcctcgtaaccgaaggttacgcggtcgaacaccacggtattgtccttgccgtgccagccatcggcggtctgtttcagaggctctgcacccagcatctgctccagtgcattcagcttataattgatctgcggcagcgagggcaggaagctcagagccctgaggagtggaattcccaggcttagggacaggcacatcaccaaaatgaaatccggcagggaggaatatcctttcagcacaaaccaggaacccagaggcagcgtcacaatcagcgtgcacggcagaatactgttataggccgccatccacggccagcaggccttataccagtcgagcgtcagatcccggtaggccagcacatctctctggaaccgttcataggattcgccatccctgttgaacaccttcaccacctccatgccgtttatgtactcgataatggtgttgttcatgaccttgccggcctcatagtaactcaccatcccgttctggccgatacggtacatgaccatcatggccaggaggcctgctggcagagaggcgagagacataagcgccagcttccagtccacaaagaacagagctgtgtaaaccacgaccggaatcaccgtgttggcaaagccctctggcagcgcgtgggctagaagcagctccatgctctctacatcatctacaaacagacgtttgatactccccgtccctttctcctgaatcacccccagcggcagcttctccatccggttctgaagagaaatatggattctcatgaggatgttgtaggcggcttcatgggacagggagagccccttcacatacaggcaggcgtgcagcaccagacacaccagcacaccggctatccggaccgccgcatacgacaagtccatgggttctccctcaatcagcggcgcgatgatctggcaggcaaagataaacgggaggacactcatgaacactcccagcaggatgaccgcagaagccaaaaaggtcgtctttttgtagggtcctgcgtactctaaaatcttttgaaacatatccgataccactcctttcaacagtaactcctgtcatgccggactctccggtatgaaaaaagcacgtcaagttagttttgtctaacttgacgtgttatattttacggcgataaccgaagcatttctaccaaaaaacggtatatttctaacagtttttcattttccggcatactccttggggagcacgccgtatttctttttaaaggaggcggaaaaatggctcatgttggagtatccggacagcgcggccgcctggcttacattcttctgttcggtcagcagaagcgccgcgtgttccagtctccgctcgatcagataggagtgtatggtgtttccggttacttccgaaaacaaccgggccagcctggagacacttacccctaccgcccttgccagctgttcgcagtccggtgcatcggtaaggtgccggtccagaatccgctttgcctccctcactgcttcctgatcggttcgggtaatcccacacagtctcttttgggcctttcggcatgtgagaagttccttaaaggaggcggcgagcagttccagaagctttccttccagatagaggcagccaatcccgtcctcataccgcccggactgttccagttcagccagtatccggcagattccgggcgtgatctcaatgctctccaccgcagagctgaaccgctccgccgatatctcttccctgccttcaaaatacgcgttctgaagcctgcggtaaacctgtaccggaatctgcacgcttttaaacacgaaatcgcattttcccggatagtatccccatgtggtcctgtctccgttccgatagatataggcatttcctttttccatggaaacaggtctggggatcccctcgatctcccagaccataccctgattcatgcagaatacaaactgcacctcatctctgttgttctctccccgcctgtatacatggacatccctctggtaattcatgcgccagtccagaaggtcgattccctgtctcgtatttttccggcaaatggaaaaccgtccgatttcctccggcgcatttctcaaaacctcgtagacctgctccgatggcatctgttcaaaaagatcgttaaaatatcggcttgcatcctgcaccttgtattcctccttttagcgggccttcctttgccggcttttcttctctcctatgccagcgcctttcccatctcctcgcaggcgctttccgcctccgcgtccggagcgtcattgcagatcacgcagtcgcaggccagtacagcgccatcctcccggcaggtctcctcccaggttctcatccactcgccgtctccccatccgcaggagccgaagagcgcaatcttcttccctctcagcttcgccttgcagctcaggaacatcggctcaaattcgtcctcctccagctgctcacttcccatggacgggcagccgaatgcaaccgaatcaaattcatccattttgtccgccccgaattccgcagccgtaaacagcgagacctccgctcctgccgcctgcgcgccttccaccacttttgccgccatagcctccgtattgcctgttccgctccaatacactactgctgttttgctcatgttttaatcctctcttcctttctttttttaccaaccacagtatttttgctccagggccggaccgaacaccggcacaagggcagaaacgcctttatctcgtatgaattttgcaggttagtttcagctaactcaaaatagtatagcattgggattccgtaaatacaagtaccgctatttaacaatgtttctcactatctgaaggaaaagaccgggaggcaagggcaggcagggggcatgaacagttcccccctgcgacggcagacagccttaagaatatcaattgtcatgtacttttctgtaatattatggtattattttctatattttcactgttttttctcttaccaaaacaaggtaataaaaagcaaaaatacactcaggaaggttttatcacatgttaaatacaattgaatccatcaacaatgccgtgaacaattttatctggggagtccccgccatgatctgcatcatcggagtggggctctatctgagtatccgcaccaattttctgcagatccgcaaattctcctatgcgatccgggttaccctcggccggatgttccgtaaacgggacgcatccgacggtaccatgacgccgtttcaggcggtctgtaccgctctggctgccacggtaggcaccggcaacatcgccggagtagccggagccatcgccatcggagggcccggttccgtcttctggatgtggatctccgcgattctggggatgtgtacaaaattctctgaggtaactctggccgtgcatttccgcgaagtaaatgagaaaggcgacctggttggcggccccatgtactacataaagaacggtcttgggaaaaactggcgctggctggccactctgttttcggtcttcggagttctcaccgtattcggaaccggtaatgccacccaggtaaataccatcacaaccgccatcaattccgcactgatgaattatcatttgatcgatgcacgctctgcccgcaccaccagccttatcatcggaatcattctggcggctctggtagctctggttcttctcggaggcatcaaacgaatcggaagcgtgacggagaagctggttccctttatggcgctgttttatatcgtgctcgctgtcggagtagttctgcttaacattaaccgggttcccgctgtattctcctctatcgtatacggcgcctttaatccggcggctgtcaccggcggagtggtcggaaccttctttatgagtatgaaaaaaggcgtctcccggggcatcttctccaacgaagccggccttggtacaggttccattgcccatgcatgcgcagacacgaaaaagccggtcaaacagggctttttcggtatttttgaagtattcgccgacaccattgtcatctgcacgctgaccgcatttgtcatcctgtgcagcggcgttccggttccttacggggaagcggctggcgcagaactgaccattctcggattcacctccacctacggcagctgggtttccatttttacagccgctgccatgtgctgtttcgcattttctaccatcatcggctggggattatacggtgcacggtgcatcgagtttttgttttcctcacgcattatcaaagccttcatgatcgtctactctctggtcgcagtcctgggcgccaccatggatttagggatgctctggagcatcgccgaaacttttaacggcctgatggcaattccaaacttaattgcggttttcctgctgtcaggtactgtggtaaaactggtcagggaatattttgacggggaagggaaaggataaccagagatttaaaagaatattgaattgattcttgacatacctcgattttctatgtatcatgatattattatgtatacataggaactcgaggtatttattttaactgatgtcttctgcagaacatcttttagaaaacagtttaaaacggaggcgctatggacaaaaactatatggcagtaggctcttccatgctgatattaaagcttttggaacagcaggacatgtatggctatcagattattaaggaactggaaaaaagaagcgaacgtgtttttactttgaaggaaggaacgctttatcctctgctgcacgcgcttgagcaggagggcgcggtcatctgcgaacagagaactgcggaaaatggccgcggccggaaatattacatcataaccgacaatggccgcaggcttttaaacgagaaactgaaagaatgggattcctttcagacagcagtaaatcaggtgatcggaggtgttctgtttggataaaccctcccataagaatttcgatcagcaaaggaattatgaggaagccttcttagacgatgtagcggaacagattgcctataaaccgctgaggccggcagtggtaagggaattgaaagaccatatcgaagacagaacggaagaatatctgtcagagggaatgaccgtagaagacgcggtcaaaaaggcagtggactccatgggcgacggcgttgccatcggcaccgggatcaatgcggtccgccgcgtccagtcaaaccgtcttctgatccttctgaccgcactgctcctcttcaccggactcgccgcagaaagctggacggccatgataccggaactgtcccttcggggaattcgtttctatctgacgggcacaatcctcctggtattcgcagtgttgaaaggatatccgctccttatccgttaccagaaacgactgcttattctggccgcagctgtattttctgcggaagccgtacttctgcagatgatacactttgatctgatacctgatatcgtctggaacacggcatacatcataccttggcatatgattgattactatacgctcctgctgtccggccccgttttcgtcatttttctctaccggatacgaaagcaggaaaatcaagccatgactgccgcttttcttctcactgcgggggcagtccttatccattactttacatacaaaagctttactctggctgagatagtcatctttctgttttccatgatcgggagtataacatacatggtctgccgggggattttcgccggaaataaaagaaaacttctgcttcgcacagccgtcgggagcgtggttctccttctggtttatggaatgcttcccggccagtcccggtattttcaggcatttgtaaacccggaggcaaatgcccgcgatacttcagacgattcctataacggtgttctgattcggaatcttctgtccaaatcaccggctgccggcagtctctcactcactccggaggaactgatggaatacggaaccggcgagtggtatttcacctatggagatgctaaagaagcagcggcagaaggaaaaaagccgttttccgaacatcactggatcacctttccctacgataagtccgaagtcactttatggaatatactgcctcagcattacgccaataactatcttctggccgtatccatcctgcagttcggctggcttgccggcatgctgctgcttgcagtcatagccgtcttttatgtgatcctcttctcctgcatcctgcggatacgcggggcgctcgccggggcggtgtcctttcactgcgggctttgcctgctgtttcagagcgtactctatattctgggaaacttcggtttccaatacggaagctttcccaatcttccaatggtttcggagggccggttcagtatccttgtcaatatgcttctgctcggatttatcctttcagcctgccgatatgaccgggtcatcgatgcaccagctgcagacagaaaaacagccttcttttaaaggcttcccacacggaagccggatatggtttagcagcgggtacaaaaaaacaggtaactgatgaaatcatcacttcttttcatcagttacctgtttctattatcttttagtttctattatcttttccattcagcaatacataccgttcttagtacagcttcgctcctgcaggaatcctgtcatccaccatcagaagattcagtccctcatgaccatcttcctcatgtaccgctgaaatcagcataccttcggaatcaatgcccatcatctttctcggcggcagattaacaatggcaatcgccgtcctgccaatcagctcttccggttcgtaatactcatgaatcccgcttaaaatcgtgcgtttccggtctgttccatcgttcaaggtaaactttaagagcttcttggacttcggcaccacctcgcaggcttcgatctttacagccctgtaatcggacttggcaaaggtatcaaaatcaatcatttcttcaaacaacggttcaatcttcacattggaaaaatcaatcttttcaacaggcttttcctctgttttcacttcagccgcagctgccttttccgcctttttcccactctcagaaccgcccaggctcttcatcgtcgggaacagcagcacatcacggattgcataggaatccgtcagcagcattacaaaacggtcaattccgattccgattccgcctgtcggaggcataccgatcatcagagcatttaagaagtcctcatccatggagttggcttcctcatcgcctgcggcctttaacacttcctgcgcctcaaaacggactctctggtcaatcggatcgtttaactcggagtaagcgttggccatctcacgcttcgtgataaacagctcgaaacgctccgtatagtcaggatcatccggctttctcttggtcagcggggaaatctccaccgggtggtccatgataaaggtcggctgtaccagatgttcttccacaaactcttcaaacagcatgcttaagatgtcgcccttcttatgacgcgcttcatactggatgtggtactggtctgccagcgcctttgcctcttcgtctgtatggatctccgtaaaatcaattcccttatatttcttcagcgcatcgaccatggtaatacgctcaaacggcttcgataaatcgatttccacgccgtcgtatgtcacgactgcggttcccagtacctttaaggcaacggaacggaacagatcctcgaccaggtccatcataccgtggtaatccgtgtaggcctgatataattccattaaagtaaattccggattgtgacgggtatccacaccctcgttgcggaatacgcggccgatctcatagactctctccaggccgcctacaatcagtctcttcagatacagctccagagaaattctgagtttcacatcctcgtccagcgcattgtaatgagtctcaaacggtcttgcagccgcaccgcctgcgttggcgaccagcatcggggtctccacctccatgaagccctgatcgtctaaatgatcacggatcgccttgataatctgggagcgcttcacaaaggtgtcacgtacttccggattcataaccagatccacgtaacgctgtctgtagcggaggtctgtgttggtcaggccgtggaacttctctggaagaatctgcaggctcttggtaagcagaaccacgcttgtggcatggatcgaaatctcaccggtcttcgtggtaaatgcggttcccttaatgccgacaatatcgccgatatccagcttcttgaaatccttataggactcctcgccgatgctgtctctggctacgtaggtctggatgttcccttttaaatcctggacgttgcagaaggaggcctttcccatcacacgcttggacatcatacgtcctgccacggaaacttcctttccttcccattcctcataatgctccttaatatcactgctgtgtaccgttacatcatactttgtaatcttaaacggatcctttcccgcttcctgaagctccgccagcttatcgcggcgcaccttcagaagctggtttaaatcctcttccttaacctggttctggttctgctgttctgccacttatatacactcctttgtgaacttgacttttcgatttatgatactctctggatctccagcaccttgtactggatcacaccggcctgggtttccacatctacgacatcaccggcttttttgcccatcagtgcctggcctaccggcgactcgttggaaatcttgttctgaaggctgttcgcctctgtggaacccacgatcttgaactccatctcctcgtcctcatccacgtcgtaaacctttaccttacagccaatgttaatcttatccaaatcaatctcgtcttccacgacaacttccgcgttcttcagcagcttctcaagctcttcgattcgaagctcgatgtctctctgctcatctttcgcagcgtcatactctgcattctccgataagtcgccctgctccctggcttccttaatcttctgggcaacttcttttcgtttgactacttttaagttctgaagctcatcctcatatctcttaaggccttcatatgttaatatatttttcttatctgccatggttttacttcctcctggtttatttctcgctctttcgcattcaaagtattatatcttaaacgtcccggattgtcaagaattccgcctattttcccttgcaaatggcaagcgtttcatcctccgcttccaggacaaaccgcagatacgtcctgtcatcgaagctgtgaaatcccggggctattcctttcggtcctttaaaccggaacatgcacatgggatccgtctccttcacctcccggatgacggcttcactctccgcaaggctcccgaaaagttccggatatccgtcgctcgccagcactacttcttctccgggccgaaccggatatacccgggtgtgttcttcatggatcggaaacccatccagcacatcgtaggaatattccccgtcaccattggcaaaacggcactctcccaccagaagcggcataatgtactcacgacccgtatcatgctccgccagctccttaagcgtctttcctgcagccagttccagctggttataagccgacctgacgcccgcagtcagttcatccatcaccgtcgttttccggtaaagcctgccgccgatcatacactgacaatccccaaagcaccagacctcccggcgcatgcggctgtatacaacaagaacggcctgaggacgctcctctctcatccgttccagaagctccggatgttccaatgcctgaaatgaggccgaccgcagcgcatgatttaaacaggaaacagcttcttgcgcactgcagtcctccggaagcgtttccagtgcacccagaagtacatctttggcgaaccgccctcctgtcttttcccccggccacacaaggcttcctttgctggtcaccccatcgataaccgcaaaataatgacggcctgtataaaggccatcctcacacagttcctggttcggatgctttgcctggatccatgtttcaataatccgctctcccattcagaacactcctcctcccgtttgtttccggttcattttcccatacagccagtctccgcagcaaaaccgccccgcaaacaggggtacagagaatacgaaatggcaggttttctccctgccattcgctgtcggaagcatctgctcccgctcataccgtatgataccagttggtagtataccacaaaacaggaataataacaatgtcctgccatcattctgaagccctgttttctccttttttaatcagaaaaattccgcttttctttccttaaagcgccccgtcccctttcatggaatcgtactgaagaagcccggcgaaaaatacaagcgccatgccctgtccccagccctgaatccatttgcgggaaatactgcggtagccttccctgtccttcatcaccgcggtgccgccggagacattcgtcacgcggccgtcctccgtcacattggccaggagaccctgtactgttttgtttacatattttaaatacagcgggttctttttcgccagcatcgccgcggcaatcccggcagaggcggacacttcctcataggattcgccgtcatccagaagcgtgcgccataaaccggactccgtctggtacagcttcagcgcagatagctgctcatttaagcttcccgcaatctccaaatactccggatataaatagcattccgggagaatatgggatacccgggacatggtatacgccgcccagcagttggcccttccccaatagaagccgctcatatggtcctttgtaatatgattatagccatgataccacagtccgtttttctcgtcctgcaaatactgaatgtgccagtaccactgtttcagcgcatccgctgtcagctcgggtctgtcaagcagcacgcctgcccgcagcagaaacagcgcggccataaaaagcgtgtccgcccagcactgttccgggaaatcattgtccgccgacacggtatgctgcaggacgccgtctccgaaccgaagcgcctcatgttccaggtaatccaccttggcctcgatgatatctctgtaaagctccgaaccggtgtgctgataaagcgtcagcagcacatgccccatggcgcaggtattaaccgtaaatccgggaagtccaagatcgatcagttcatccaccctctccttcatacggtccagatactgctgcttccctgtcgcctcatacgcctctgcgatgccgtaataggcgacaccgcagggccagtcccatgtcatatccatccgcatggtgcgctccacgatccggtccatggtctcttcgatgatatctctgtcaaattccagtttccccatctgcctgttcctccatcttcaacagcttttttcttctttcctcttccatttcatccttatccctttaatccgctggtactgattccctcgaccagatatttctggaagaagatgaagataatcactgacggaagaatggatagggaagccatggcaaacattgcaccgtaatccgaggaagagcccggatcacagaacagctttaacgcaaggctgaccggatacttaatggacttattgatgtaaagcagtgcagagaggaagtcatcccatctccacatgaaggagaagattccgccggttaccagagccggcgtaattaacggaaggattacccttgcaaatatctgtggataggaacagccgtcaatcttggccgcctcgtccagctccttcggaataccgtcgataaagttggtcatcaggtagacgaaaaatccctggattgcaaagaaatacggcacgatcagcggtaagtagcttcccacccagccaagcttctggtaccagaggtactgcgggatcattaaaacctgtgccggaagcatcatggagagcagcatcgccgcaaacagtattttctttccccggaattcaaatcgtgcgaatccatacgccaccaccgcagatgaaattacggttccaatcgtggcgattacggagataaacagggaatttttaaagaataccagaaacggcacctttgcaaagcccttcagtccgtttatgtaattatccagcgtaaacggattggggatcaggctcccggccgtctggaagatggttttcgtctccttaaaagaactcatgaacatccagatcagcggataaatcatgagaatgccaatgccgaacacgatgacatggtatacgatatcgcgaattcttttctttgccttcataattaaagccctccttcgtacacccagaatctctttgtcgcaaacagaaacagcgtgatcagtccgattatggccagcatcacccacgccagcgccgcgccgtatccggtgttatagaactcaaaggactgctggtacatatacaccgtgtaaaaaagggtggaattcatcggttttccctgggtgatgatatagctctgcgtaaaggccaggaagccgttgatcatctgcatgaccaggttgaagaaaattgtcggtgtcagaagcggcagcgtaatccggaagaatttggaaatgccgttagcaccatccacattggccgcctcgtacagagactgcggaatctgttttaacgaggataagaaaatcagcatggaggaaccgaactgccataccgccaggataattaacacccagatcgccgtcttcgtgttgcccagccaggacatggtacagttaattccaaccgcctgaagcagcttgttgatcacgccgtccgtggcaaacatacgcttccacagaatagcgaccgcaacggaaccgccgatgatggatggaaggtaataggccgcgcggtaaaaaccggtcagcttcgtgctcttcagcagcagcatcgccacaatcagcgcaaataaaagacgcagcggtacagacacaaacgcaaagaagaaggtgaccttaatggatttatagaatgtctcatccgcaaacatagtcttgaaattctgcaggcccgtgaagacgggcggagacaaaatatcatagctgcagaaggaatagtacagtgaaattcccatcggcactatcataaacagcaggaatccgatggtaaacggcatggtaaaaatcattcccgccgtgcgctcattattcatagcttttttcagcattttcatagatctgctcctttttcccttgatcagaaattcctgattcctgaaaaaagggtgccccatatgtcagattttatcgaaatggggacaccctcaaaatgttttcaattaacagccgtttatttggctttttctgccatgatcttatttccctcggtataaagctgctctgccgcttcctccgcagtcagttcgccgtagcataccttctcacccaacttattgattaagtcggatacctctgcgcttccgttgggatacggagggttgatctgagaagaattcggtgtcaccacatcgttgataaagctgataaccttctgatcactctctgtcagagacggagccagttcctcggcaaccttggatgagatcggcacgcctctctctgccagaagaatctcgttgcagtccatggaattggtccagtaatcaataatcttagcaccggtaaccgggtccttggaatccacggatacggagaagagctgggacggttttaagaagttggactttttcggatctttggagggccatgtggttaagtctaattccatgtcttccggagccgcattggtaaacgccgcatactggtttgaccagcagaacgccacccatgacatggtttccgggctggagccgtagatcaggggatcctgctcgatggaacccggtgtcagttctgcgaatacgctcggttcaatgtaccagccttcttttacgccatcttcatataccttataaaatggaacgaattcgtcagcgctgtctacgcccagttttccttcgtcaaagagcacatggccgtcatagccgcggatcatggcctgtaagatttcctgggatacaccgtatgccatgttggtcttgcagccggtcttttcgtagatttccttgctgaccgctacaaattcatccagcgtcatattgtctttaatttccactcctgcctggtcggtgattgtcttgttatagaccatggccggcgcattgattccgattgcgatggagtagacctttccgtcaaccgaaccggaatttatgatgtcctggctgcagttgtccacattcagggttccatcttcgatataaggagtcagatcaaccagaaggttattggtaacgtactggtctaagtaagcgtaatccatctgaatgacatcgggaagcgaatggcctgctgccgcggtcgccagcttgttccagtaatccgaccactcggagaactgaccgtcgaatgtcacgcccggattcagctctgaatatttgtcaagcgcagcctgtgttctctcatttctcgtctggttgccccaccaggccaccgttaaggacgcatcgccggaagccgccgccgtcgtattttcagccgccgcacctgcggttgtctgggaatcagctcccgttgtgcttccgctttccgccgcaccgccgcaggccgccagggataccgccgccatggaagcggccaggactactgccagtttctttttcattttcatatcctcctgtctcaattcttttctttaaacggtgttgttcttccgtttcgtttgtaagcttattataaaccggtttcttccgataccggtataaataaaaccgacttccttttagaaaaaaccgactttcctctctgaaatcttgagtttgcagcccaattattatatactggccatgtaccatttgtaaccatgtttttccggttcaacagaatctttaatatagaaagaagcagggcaatttccatgaaaaagcgtgcagaagccattcaaataaagttccttaccttattcaaaaacctctccctgagatggaagattttctttattgtgctgttaaacgtggtctccctcctgctgttttccttcatcggctttaccatactttcaaagacctacaacgaactgctgtaccggtccatcgcaggtaatctgagtttttcggcaaataccatttctacaaatttaaaggatgtggagcgcctgtcgtccattatcctgtcgacatcgtcgattcagacttccctctctgcgatccatgaatcggaggatgccgtggtccgctccaatgccaacagaagcattaacaccgccctttcatcctattatgagaccttccgtcagaacggagtctcctatatcgtcctgtttaacgacaacttttccaacgcaaccaactgggccgcctacgaaaagactgaccgggaatttatcgatcatgccctgcaaaacgcggagctgggagacggtgcggtcagctggaccacaggaggcggcagcacttccggcctttttctggggagaaatatcaggaaaatcgaaggcctcgatttttctaccatcggaaggctcctgatctatgtggataccgacagactgattaacaccatcaaccgttcttttcagaccttcgataccggatactacatcctggcagacggcccggataccatctacgcctcctccgggctctccaaagacctggtaaaccggacgctcctgctggaggatgatacctaccagacgctgcaggcggacaatcacacctatttcgcagtcagcagtaagattccgtattacgactggcgctatatcagcctgattccgtttgactccatcatccactccatcggacgttcggcgaagatcattctcggcatcatggtactcggcattctgactgcactcgttttgacccagtggctgatttactctatcctgcgccatttcaacgctctgatcgtcaagatggacgtcttcagtaagaatgaactcacgctggagcagtccgcctacgattacagtacccgcaatgatgagatcggacgtctccatcagcgttttgaccggatggcaaccaggatacgaactctggtggacaccaattacaaaaatgaactgctgcgcaaggaggcccagatcaaggcgctggagtcccagatcaaccctcatttcctctataacacgctggaatccattaactggagggcaaaggcgtccaaaaatgcggaaatatccatgatggcggaatcgctggggacactgctccgctccacactcagcaatcacgagtccctggtggagctggactatgagctggaactggtgcgcgcctacattaccatacagaaaatacggttcgaggaccgcttggacttcctctccctggtggatgacgatctgcatcatatcctgatgcctccgctcaccatacagccgctcatagaaaacgccatccgctacggcatggaggagatgacggaaacctgtcacatagagcttctggtgcgccacgagggcgatcaggtgttaatccgggtaaaaaacaacggttctgttttcgaggatcatcttctcgaaaaattaaaaagccgggaaaaacagccgaacggcttcggcatcggtctcatgaacattgaccagcgcatccgcctgctgtttggcgacacatacggtctggaacttaacaatgaagacgactgtgccaccgccgatatccatattccatttcaagtcaaggagaactgatactatgctgaaactgatcattgcagacgatgagcgcatcatccgggaaaccatatccacaatcatagactggagccagtacgggattgaactggccggtctctgctccaacggaatcgaagcgtacgacatgatcttagatgaatcgccggatctggttatcacggatatccgtatgcccggcatgaacggactggagctgatcggccggatctgcgagacggatcttgacacgcagttcatccttctctccggctacggggaatttgaatacgccaagcaggccatgaaatacggagtccgccactatcttttaaagccctgcaatgaacagcagatcattgacgccgtaaaagaaagtgtcagtgactgctacgccaaacgccaggcgcgcaggattctggactcccagttcagtcaggcggacagcatccgccacaatgtggtctccagtatcatcaacgacgccctctatctggaaaagccgctggaggagatcattccgacctatgaaccttacatggacttttactttaccccctaccgcctgttttacatttactatctggaacaggaaaatctggaagaatttctgggactcttaaatgcgtttgcccggaattcccttccgcaggtcagcatctacggaatctacgtgagaaacaccttcctgatcttctgtcaggatatttcctttgacttcgaccagctggaggcaaagcttgacagcgtcagcctggaaggccagcacaccagcctggagcttcatatggagacgtactccgatttaaaaggcctgttcgccattgtgctcgagaaaatccgcagattcagcaccttttacttcgtaaataacgatcacgccttatgtacctgcaactataccgcaatcacccaggagacggaaaactactgccgcgccatttccgaaggggatgctgccgccatgagcgggcttatggagctgatctccgatatcatggacatccggttcctcaaacagctgtccggcagtatgtttttaaaaatcaccctcggcaatccgaatatctccggctccggcctcacggagtggctgatgcaggccgagggggagacggatctttccgcgctgaaggaatccgtctttcaaaagcttacagaagtggtggaaagcggctccagaacggagaccgtcagcagcatgacgcggcagatttttacgtatatcaaggaaaatctggagaatcccaacctgacgctaaagtacattgccgaacagcatttgtacatgaatgtggattatgtatccagaaaattccagaaggagactggaatacgcttttctgattacctgaccaatgagcggattcaaaaggcaaaggaatatatcgaaaccgatggaatggaccggatttcggacattgccgagcgggtcggcttcggcaacaatccacagtatttttcccagcttttcaagaaaaagaccgggatggcgcccagcgcctacatcaccggtctgcggggaccgtccgggatgtccggacagaaggaggaattttaagatgcagattcagtttcagccatttacccacagcacggacacaggccgtcttccgggggattcggaacggctcgctataccggaactgtctgacggctttgacagagagctctcctctctggccgacggcgtcgcgggcagtatgactcccgtcagctattattcggaccgggtgccctgcggactgtacgccatacatatttcgctgaccgccgtggaagaggcagagcagatttttctcttcaccggaagaaaacttttgcgggatatcatctccttaaagaagggggaacggtacgagcgtaccttttaccagtccatagccgggattattccgcgctatcacgaagagtattatcctgcagaacacctcttcgtcacgctctgcacccccacgcccggtgctgttaagatcgacggctgccatgcagaaacggccggccctgtgacgacagtctatctctgcggggattccacagtcacagaccaggccgcggaaatcccttatcttccgggagcctgctatgcctcctggggccaggcgcttccggcgttcctagaaggcagaacagccgtggaaaaccaggcgcactgcgggctgacgaccgaaaccttccgccaggaaggccatatggacatcgtaaagcgatttctccgtccgggtgacttctgcctgttccagttcggccataatgaccagaagcttccccatctgctggcccacagggaataccccgtcaatctgcgaagatacgtggaagaagtccgggccctgggcggaattccggtgctggcaacctctctgggacgcaacatctggaatgcggacggcacctaccacgagcttctggccgaacacgctcaggcggtaaaggacgtggcggccgccacgaataccccggtcattgacttacatgaattttcggtacaattttataaaaaaaccgggatggaacgctcctgcggatacttccatcccggggattacacccacaccaacgagtatggggcatatctctttgcttcctttatcgcagcagagcttaaccggctgtttcctgagactttccacgtcaccccgggacggacggactttacaccgccctccagtctctgggaggagcttgaaaaccggaacaacagggccggcggtcaggaacagagggaacagtttgacgccatggaaaaatccacagccgcgctgctgaaagcattggaggaggcagaaaagccttacacggatacgctctgactcttcctccggcttttgccggctttgccttataccattgccaactggtccctcagaaaactcaaaacagatgtttgtaaatcggacagtgcttctttctcgatcggataatgggatccattctgaagcactgtttttgtcaccggtaccttctcaatctgattaagaaaatcgtcacttaagaactgcggcgtccaaccgtccttttccggctgagtcagaagaatcggacaaaccgaaaactctttcggctccacctccggtttatacgttatataactgtgcagaaattccattgtaacccggttccctgccgaagttctgtccgccatcataatatccaggcattttctgtcattgacaagggccttcatctttgacgggatactcattttgattctgaatccggagaaaccggccgcacaggccagctttgcaagcattgctcccgcatgtccccaaaagggattactggctgtagtgatctgaaccggcttttggcgctggtcaaggaatgtcattccaataatgcctcttaccctgccgtttttcgctgctatatggtaagtttccatgcctcctgctgataacccgtacagaaagacagggcggtcatcctttttcagttcttcctcgaccagatcgcttccgcactgcacccagtctgcataggtaatccgcattttggggttgacctctgtcaccccgtaagttggcatatccacggatatcgtctcaaacccctcttttgccagcggacccccgatgatcagagaaatctgcctcccgtttgttccgactccatgaaaacagatcattttcgcctccgcatccggattacgaaacgtatccagatggaccttatttcctttccagttccacagttcctcagccggctgatactccccacgaaaatgatattccggcggtaaaaatttctcaatctctttccaggctttttgattgttataggtcattccaatttcctccgtttccatcttatctgacagaaattctattctaaacggaggattttggcattaacaaatgttaaaacagactcagccgttatccctgagattacggcgcagtctgcttaaggattccttttttattccaagataagacgcgatcacattttggggaacccgctctaaaagatctctgtaatcttcccgaaactgaagataccgttccatcgcctgcatattctgcaggctgtattcgcggcgcatcttgtatataacggtctgttccagcattcctgcgtaactcaccagggccgccttgtcagagtaaatgatttccttcatttttttcgcttcaaagcgaaggctttttaagttctccaatgcctcaaaaacctccagactctccggcaaaaaaaggctttcccctaccgcaaattcctcttcccgaataaacatttttgttatatcgttgccctcgctgtcgatataatagcttcttgcaatcccttctgtaatcaaatagaggtacttctgctccacgccaatctcctgtatggctgcaccggccggaaaatgcacttcccgggcaagctttaccatctgatcaatcgtctcgggtttgggagagcacccgcttgtcttaaaaaccttttctattgtgtatctcttttcggcttctgtcattctcacagctccagtcttttctaataaacaggaaaacagccagtccggacagtggggaccagcatggaattttgggggtattaaacttaatagaattataacagatatcctgtcaataagggaactgttatttcccaaacattttaggatgcagccaaatgccctcgccaatttgttataataatgtatcacgcaaatttaagtgcaggaggtaattcaatgaaaaaaactaaattgataaggggaaatgcaaagcgggtgattgcagtagcatcagctttcatgatgacttgcagcacagtggccggaaatcctgttaaccatgcggcagctgcatatgcaaaggaggccgatactgcaaaagaggaagaaaattcatcctggaaggagaatgctgcatctgatacagagaaaagtgacactgaaggaactatgtctgcggaagatacggatgaaagcagagccgatgacgaatccaaggaggccgatgatgagattacctctgacgaatccaaggaggccgacgatgggattgtttctgacgaatccgaggaaaccaataatagcgaagaagctgatgagagtcaggcagcagacggatcagaagccactgacgagtcagaggagaacggagagacaggagccgcagaggagtctgagggcacagatgagagcaatgcctccaatgagccggaaactcccaagggcctggaaaaagcaaacagactggcagctgtaatggcagtggatcctgattcctggtatgtagaactcgacagctgcatctgcagggacgatcgctattatgtggtggatgagactacgcaagaagaaaccatgctgaaaaaacaatacatagaggtggaaaaggacggcgaatctttcattatctatgtagacggtaatggtgtgatggtcaagagtaaatggctggaaacagaagacggaaacttccgttttgtcaacaacaaaggaaaagtgatcaggaacaaagagggaaaggaagccggtaagttttacggcaactttgatgatatgggatattggactcccgtgcccaatacattttttgaatcccaactggatgacggtaccagtgtgataaagtattcgggtgaagatggaggggtatcaggaaagaagaaggatgacatccagaagtactactgtttccagacaacggaggacggaatactctgcagcctgataccagctgaaggcatatccggcgcagaagccgtaaccgacacctgggttgtggatctatggatcgatgcagacggctatttgactgttgacaaggaaaaacagctgatcggaggcaactactacaactttgacgttgtaggccattcttcccggtctgccaataccttcatacggacggaagatgggacaatcttatgttatctcgacgaggccggagaaaaagtaagggagcagtttgagtcagacggcgaacatacgtattatttcgacgagaatggtgatctggcagtacgtcagtggatagaagaaaacggaagcttccgctatgtggacggcaaaggccgcatgattgtgaatgccacaaagctagtcgccggattttacggccattttgacggagaaggttactggactgcgatcgaagatgaattttttgaggataaactggacgatgggactcctgtaacaaagtattcgggcaaagaaggagaagtagccggaattggcaaaaagccagaccgcaggtactactgctttgtaacaggtacggacaacaggatcagctgccgtctgctctccgcagatgaaacgtccatgagcgagacggtaaagaatgtctggatcgacgatatgtgggtaaacgaggacagcattctcaccatcgacgtgagggagcagcagatcgacggcaaatattacaattttgatgcagcaggccatggcagtctgattaccagcgccttcatccatgatggggatgggaacaatctgtactatgtggatgacgccggggagaaagtgaccggtgaggcagaatatccgattgaggacaaatattacagtttttctgaagacggcagggtcactctgatcaccaattcttttatccatgatacgaatggcaataacctgtattatgtggatgagaatggagataaattaaccggattaagagagcatccgcttggagagaagtattacaactccgatgccgatggccgtatcgagctgatcgtcaattcctttatccatgatgagaatggaaacatcctgtgttatgtcaatgcagatggaataaaagtgaccgatacgaaagaacagttagccggagataaatattacaactttgatgaagatggaaacggtactctgatcatcaatgcctttatccatgatacgaatggcaataacctgtattatgtggatgagaacggtaataagctgacgggcttaagagaataccagattggagatgtatactataacgtcagcacagacggcctcctggaactgatcgtcaacgcctttatccatgacgcggatcagaatatcctgtgctacgtcggcgcagacgggatgaaagtgaccggagtgagggaacagcttgttgacggcagatactatagccttgacaaagatggcaaagtcaccctgatcaccagtgcctttatccataatgcagccggtgagaatctgtattatgtcgatgaggccggagataaggtaactgggaaagacgagtatttgatcgaagggaactactacagctttgacgcggaaggcctctgccgcatgatcaccaattcctttatccacgacactgccggtaaccttttatattatgtcgatgatacaggttctgtcataaccggcaaacaggactatccgatagaaaccaaatactataacattgctgatgacgggaaagtcactctgatcaaaaacgccatgatacatgatcagaatggaaagatcctgtgttatgtcaatgagtctggggaaaaagcagccaaccgcttcgtaacggttgacggccgaaccatttattttggagcagacggagcacaggtattccgccagtggatcgaatcagacgggaaattccgctatgtggacgggaaaggctatatgatcgtgaacgcggttaaggcggcaggcggattctatggccgctatgacggagaaggctattggaccgcaatctccaatacatttttcgaagacaaactggataatggggaacctgttacgaaatatgcaggcaaagagggagccatcgcaggaatcggtgaaaaacccaacacccgccattattgttttgaaaccggccaggataacaccatacactgccgtctgctttccgcagacggaggttccgttacggatgatccggtagcaaatgtatggatcggcgatctatgggtcaatgaagacggcaatttaagtatgaatgtaagcgcacagcagatcgatggcagatattacagctttgatgagaacggtcacggcacccttattaccaattctgttatccagagcccggatggggagggcttgtgttacgtcaacgagtccggtgaaaaagcagccaaccgttttgtgacgttcgaaggccataccctttatttcggaagtgacggcgcacaggtattccgtcagtggatcgagatcaacggaaaattccgctatgtgaacaacaagggatatatgctcgtgaatacgaaaaaggcagtcgccggattttacggcagttttgacggagaaggctattggaccgcgatagaaaatacattcttcgaagcggatgtaaacggtgaacttgtgacgaaatattccggtaatgaaggaaagattgcaggcatcggagataaagaaaaccgacaggagtactgcttcctgaaagaaacggatgggaaactgaaatgctgcttaagcgcggctgacggggattacctgacagaggaggccgtaaagaacacctggatcaacgacatgtgggtgaacgaaagcggatatctggtaataaatgcagacgctccggttcatggcgtgtattatcattttgataccaatggccacggcacgctgatcacctataaggtttcctatatactggacggcgggatcaacagcgggaataacccattgcactacaccggggccatggacacagtgatcctcgagatgccttccagaccgggctactcgtttgacggctggtatacggacagcagcttcactgacaggatcacagagatcacatccaagagccatgggaatctgactctgtatgcaaaatggagaaggatctacgaagacaacagcagcgacaataatgaagagtctgccaccagtaccactacgaacaataacaataatccaactgtcgtcacaccgccagtcacagtcacggttggggaagacaaaaaggtaaccctgcagaccggcgggactacggtagccgcatcggctacgcagactgcagaaggcagcgtaagcggcaataccattgtttccactacggaaactgcttctgttaccgtagcagaaggtcaggtggctgatgtggctacggtcgcagtcagcgcagatggctctgcaagagcactgctggcgtctccggcactgggggcaacggttcagcagcagactgtcaccgtacagggcgtgcctgtaactcagaatgtagtagtctatgcagacggcacacaggtgacccagaaatccggcgcagaagagctggaaggctttgcagaggctgttacttcgactgagaaggccatccagagcggaacacagacccttgcagccgcgtacaatgataaggtcagcattgatctgcagcagtataaacaggtcggcgcagccgtcacctatgcggtgacttccggaataaacggcgcagttcctcaggtacagatggagcagaccagctttgcgccgggccaggaagtggcggcactgatcacagatgccaacggtaatgtaacagcagtcaccatcatcgtaggcgccaatggaatcatccagtatcagattccgggcgtaaactgcatcgtcagatttatgtgtaagatttgatgaaccgatcgtttgaatatcatgactatggggcgccgcatctgcggcgccccataaatttgcatgaaatgtatgactctatcttcccgattcacagataatatctgaaaaccgttccatcacaagcgtttttaaatccgccagtgtctccaccgcgttaatgtcattcctcagctttgccgagtgcggcagtcccgccgtataccatgccatgtgcttgcgcatctcccggattcccaaatactctcctttgtattccaccgacatctctgcgtggcgcagaaccatgttctgaagctcttccatggaaggcggaggaagcagctctcccgtctccagataatgaatcgttctcgagaagatccacggattgccctttgctcctctggcaatcataattccgtcacatcccgtctcgtccaaaagcgccttcgcatcctcgggtgcaaagacgtccccgttgccgatgaccggtatcttcacggcttcttttactctgcggataatatcccagtccgcagttccggagtaatactgctctctcgtcctgccgtgaactgcaaccgcggccacgccgcagctctcagccattttggcaaattccaccgcgtttacgtcgctgtcagtaaagcccttgcgaaactttacagtcacaggctttttcaccgccttcaccatggcgccaagaaccgcctccgccagcctgggattcttcatcatcgctgaaccttcgccgttattcacaatcttcggcaccggacagcccatgttgacatcgatgatatcaaagggccccggctcgatgagcttcgcaatatccgccataatttccggatcggagccgaacagctgaaccgaaaccggacgttctctctcttccacctcaaggagcgccttcgtattcctgtttttataaagaatcgccttcgcactcaccatctccgtcaccaccatgccgcatccctgctccttgcagagaacgcgaaatggcaggtcggttacccctgccatcggcgccagaatcagattattctccagtgttacattccctatcttaagcttcacgattcctcttcctcatcaatctcttctcccagataaaaaacccggtaatacatctccagggcttccagaagctctctcttttccatctgatactgcttgatcttcagcacacttcctatctcatcaaacagataatccgactcctccgccgtcaccttaaattccagagtgccgtcctcttcaaattccagagtcaggattccgcccacatcttctgtatacaatacacacataatttgaagctcctgccgtatgttctcaggcaggttggaaaactgttcattaaaataatatttctgttcataggaattggctccgcacagtacaatgcggtcctgtttttcttctatcatcaaactaccgttccttctatacataatttatcgtaacggtagtatatcacaggacagaataattgacaatagcgcctaaaaatccgtcgtacaccgtttcaccagcctgcacggcacctggctcttctgcgctgcctgtttctcttctccccgcaggaccgccatcatctgatccgtggtgatggcgcagagttcctccaccttattatcaatggaagagagttcgggatcgcagcagatggaaagcgcggaattattaaagcccgtaatgcagagttccccgggaatctttaacagcttggcattggcatatttgatcgcccccacggccagaccgtcgtctgtggccagcacactgtcaaacttcaaatcccgcctctctaaaagaatgtctctcaccgagtggatccggttcttcacatacagttttaaatcccccagcaccggaaggccatggtcctttaaggccgcctcatatcctgccagcttctggttcgcactgtaggaatgggaatcacacagaaacaaaatccgttttctcccagcctcaatcatctgtgaagtcacatcataggtggcaccgtaatcatcgctgaacgcacaatatacattttctcccttaatataaccgttgatcataaacacaggaaccgtcttcgccgcattccgcacgtaatcggccttcctgtcgtctcctccctcgcccgcatacgtcgatcccaccagaatcagcgcgtcgatccgcttatttaacagaagactcacatacttttccttattcgcctgttcaaagccgctgcagcaaagaatacagtcgtatccgtactcatgcagacggccttccagatgaaacgcagccgacgccatataggaatccgagacatccgggcaaataatcccgatggtcttcatggagtccagccccaggccgcgtgcgaacacgttcggtgtgtaaccgttctcctccatgatggcgcggaccctctgttttgtcttctcactgacacgcggactgtcgttcaccacccgcgatacggtggcaatggacacccctgcaagttctgctatatcgtatatattcattctgctccctctctcacctgcgattcctgtttcgcaaacagcgtaagcgcttacacttttacttacattatatctgatcgtctggctaaaagcaactgctttccattgtttttttctggtattcacacgaccgtccgttactatttttcatatattttacagcgttgtacaaaaaaaatttattcttttttctttccctattgacgaagcggcaaaaatggtgtatggtttatgtaagtacttacattccgtagttgcagaaaggaaaaacgattatgcaggactttattaaaattcactccggagataacgtggcagtcgccttaaagcctctggcctccggaacgaccgtgacaacaggcgatcagacaatcactctcatctccgatatccctcaggggcacaagttcgccttaaccgacatcgcagagggagcttccgttataaaatacggctgcgccatcggactggcgaaggagccgattttaaaagggagctggatccacacccataatctaaagaccggactgggcgatttgctcacctactcctacaagaaacaggatacgaccgtcgctccggcagaggaacggttctttcagggttaccgccggccgaacggaaaagtcggtgtccgcaacgagatctggatcattccaaccgtaggctgtgtcaataatgtggctcaggccatcgagcgccaggctaagagcctgatcagcggaacggttgaggatgtagcagcgtttccgcacccctacggctgttcccagatgggtgacgatcaggaacataccagaaccattctggctgatctcatcaatcatcccaatgccggcggcgtcctcgttctcggcctgggatgtgaaaacagcaacatcacagaattgaaacgatatatcggagaatacgatgagcgccgcgtcaagttccttgttgcacaggaatctgacgatgagattgccgattccctggaactgatccgcgagctgaatgcctatgccggcagctttgaacgggaaccggtcagctgcagcgaactcattatcggtatgaaatgcggcggctccgacggtctctccggcatcacagccaaccctgccgtcggcgccttttcagacatgctggtcggcgcaggcggaaccacgattctgaccgaggttccagagatgttcggtgcggagacactgctcatgaaccggtgcatcgatgaaaagacctttgaaaaaacggttcatctgatcaatgactttaaaaactattttaccagccacaatcagacgatctatgagaacccgtctccgggcaataaaaaaggcggaatctctaccctggaggacaagtcgctgggatgcgtccagaaatcaggaagcgctccggtcatggacgtcttaatgtatggagaacctgttcatacaaagggcttaaacctcttaagcgcccccggaaacgatctggtcgcctccaccgctctggccgcctccggcgcccacattgttctctttaccacaggacgcggaacaccgtttgcctgtccggttccgaccatgaagatatcgaccaatacagctctcagcacaaaaaagagcaactggatcgatttcaactgcggccgactggcagaagatacggatatggataccttaaagaatgacttcttcgattttgtcctggaggttgcctccggaaagaaagtgaaatcagaggaggccggattccacgatatggctattttcaagcagggagtcacactgtaaatgccggctgctgtttacagccggcatcccgcagctgcagacagcaacccaatagaaatcatataaaggagagtatttcaaatggaaaagttatgttatgagacactggaaaagcagggctacgacggatatttattaaaggatgcgccggaacgcgtgctgcagttcggagaaggcaacttcttacgcgccttcgtggactactttatcgatatgatgaacgaaaaagctgatttcaattccaaagtcgttttatgccagcccatcgcccccggacttgccgacatgatcaatgagcaggaaggcttatacaccctgttcctacgcggctttgaaaatgggaagaaggtcaatgacaagcgggtgatctcctgtgtcagcagatgcttaaatccatataaagactatgacgcggttctggcatgtgccaagaatccggatttacgcttcatcgcctgcaatacaacggaagccggcatcacctacgacccggcatgcagcttcaccgatgtgcctgcggacagctatccgggcaaactgacacagttcttgtataagagatttgaaacattcggaaaggaaccaggaaaaggctttgtcattctctcctgcgagctgatcgacaacaacggaaaagagctggagaaatgcgtcctccagtatgccgaaaagtggaaattaggggaagaatttaccagctggatcaaacaggagaatatcttctgctccactttagtagaccgtatcgtaaccggctatccgagaaatgaagccgcttccatctgtgaagagctgggctaccaggacaacattatcgacaccggagaagtctttggcttctgggtcatcgagggacctgagagtttaaagaaagagcttccatttgagaaggccggccttccggtactcattaccgacgatcacaaaccatacaagcagagaaaggtccgcatcttaaacggcgcccacacctcctttgtcttaggcgcatatttagcaggccaggatatcgtccgggactgtatggaagatgaagtgatctgcggttttatgaacaaaaccatttacgatgagatcatccccactctgacacttcccagggaagagctgatgagttttgccgcttccgtcacggagcgctttaagaatccatttatcgaccacgcgctgttagcgatttccttaaactccacctccaagtggaaagcgcgcgttatgccttccttaaaggggtatatcgccaacacgggcaggcttcccgaatgcatcaccgcctcctttgccttctacattgcgttctaccgcggaacggagctcaccgaggaagggctgactgctgcgagaccggccggcaatgagtacaccgtgaaggatgaccgtccaattcttcagttctactatgaccacaggaatgatgacgtaaagacgctggttcacgcggtctgcgtaaatgaagagttctggggcgaggacttatccgcaatcgccggattcgaagacgcagtcgccggatacgtggcagcgattgaggagaagggcgcttacgaagtaatgaagagctgtcttgataaagaagcttaaaaaggaagcaggtcaaatgcacgatacatttgatctgcttttttatcctgttttttattcttccttattcttccgcactgatccagaacttgctctcctttccctgctccatacttagaatcacctcccagccctcgaagcccccgttcagaaagaaaatgggatttatctctgcaggtttcctgtccagttccagaagcactgatccccgttctccttgaatccggtatctgatcttttttagtccgtaatccacatcatttccatgagtgattatggaacaggattttacaccagtttctctgccattctctgaatccttcagacgctccactcctgcctcatgctttccaacaacagggattacccagcgtaccgtttcttcacatactcctgtctcagcactgatcataactctggattcttctatttgataacggaatcgatattcaatttcctgcccggaaactgttctcttctgtgtccgatcagtcaaatgcccaaaagtctccaggcagacaaccgtttccccgtcacggctcctgttcccgtcagcctccgcagatactctgtcttcgcttttatttactatcgttcttttgctcataagcgcggcgtgtttaaagacggcccgaaaatcatatgcactcgataaatacggctttccgcatgtctctaaccgcatcgtcataggtcggtggctgttcttttttagggatagctggccattggtcggttcaatcagagtgtactcgacagtagatgaagccatcatcattcccacacttctatgccacagcatggtcatcgttccacccgaagcatggccgcccggcctgtattcaatatcatacgcggtgaccgtcgcaataaaaccgcctcgcgctatccggtatgtgtcaatgaccggccagtattttacagagtccagatgttccgatggcagctccgacggggttacactcacagccccgaaatccaggagcagtgccagcgccttcgccttgcagaatgtatggtgtacacagggcagttctccatgctcatagtaatcaattccgccgtaaagcaggccatcatgagtacaccgtttatacagtttgaaatttcgataggatgcatcggaaaaaactggttcctcatctcccagaagtccataggccaattggcagccatccgaagtcctgctgccccaataactccatttataatttctggtccccatggtattgtcccagcccccatcaggattcataaattcgagatgcacccatagcatgtgctttaccttatcccgtactatcttatttttcctgattgttccgtaagacagaagagaggctagactttcttctacattatatccaatatccacaggtctgcagcccttaggcgacacatcgtcccgcggctttccctctccgaaaaacagaccttcctttgaaatatattgcatacagaaatccgccatctcatccgaacgtttcaaatatttttcccggtggaaatacatgccggtaagcgccatcgcttctgcgcaggcggcatggtaattgatattgacgtcaaactgcggcgtaatcgtctgaaaaacccactccgcagtccgattcagccgcgcttcccacttctctttctcctgtgcagtaagaagggaagcatgaaactccaacgcgtgagtcaatgcaatcacagaaaaaacagtaattcccatccagtcattctgggcatcattataatagcttccatcatcacagagcagattgccgctccattgaaacagaagtttcgcagcttctaagtatttcttctccttcagcctgtcggccagatacatcatcggataaatcgcgtcatgacaccgtccatgaatcatcatacaggacgggcaaaagattcctccgtcaagccgcggattgtcctccttttgaaactgaagtctgatcagcccgtcacaccagctttttaacaattccagatactcattttctacattcatacctcttctccctctttatatcgaaatgataagtttgcccgtttaactccatattaaatccggatttatcaacagacaaacctcgaaggttcgcatgttttcccgctttcacaggaaccagcaccgttgcaaaatatcgtgttgcttcccctccctcctcacagaaatccagaatcaaagagggacgtttctgatccatcatatctgaaatccacccatgccgaaaagatggtttcaatttgccgtcccccacaacgattaatgaaggggccccggaatcccaaaaggtcattgtctggccatccagtcttacctttgtataattaatctgaaaatgaagttccacctggtctcctttccccagtccattaacctggtcaatcattgccaggaacggctgtttttctgaaaagccagttatcagaactctccggtggcagtatttttcaaacgtttgttctgatgaaatccggtatatctccggatgcaatatattttccaatgacaactcagtaaccattccattcccctgtctcccatagttccatgaagaaatgtattcaaatggctcttttccattgactgtcagtgtggtatgggaaaaagccgacttaaacaacctcctctcagaaatttcattataggtaaaacgtcccggatctgcgatcatgttcctgccaaatgccgtaaaatcaaatccgcccggatccatatgtgcgtgagcattctgcactggcaaacgacaggcaaaaaacacgctgacagcctcactgttccaggaattacggacacacacctgggaaagaggcttaaaccatgccgccaatgaaattcccatcttcccattattcatcccgttttcgaatctcctcatcagctcatcaaactcttccggcaccggacagtcccatatacacgataaaaacacccggcgcacggtttccgtgcctgccagctgtactgccatctctaacagctctgtccctccatacacaaaccagccgtacaacacactctttatcggagcgtccgctgcatcggaatccccccacggcacccccacccccgtaggcctgcaggtgtggagtgagtaaataagaacctcccggattctattttcaaagtcttcactaaaaccgccgtccgagtcctcttcctttaccaccagaagcgaacgaagcagcaacacaagacattcattatgataatgagggcagccttccagatgccccccacccgctgtatactgccgcatcagacagcgttccagctccgttacggctttcgacttccattcatctgcccccggcagattctgaaacttacaggctgtaaaaaaaagtccgcacatctccatcaggaagtggttatggtctgcttccggatagagacgtggactcacgaattccagcacttcagcatgctccttcacggacttccacagttcctttctggtttcttccgtcatatagggggttcccctcagacactcctcgatcagataccaggacaggaacatgcgaaagcccgcttccaggctacgccagggagcagtcttctgctcccccgcgtcaaatttaaagatcaaatcggctgtccgcggcactccagaatgttccattgtaccgtattccgggatatcaggccttggacattcctgcacccagtttttcaactctgctatcaccttatcggcatatcggccgtccgctgtcagcagaaatgcctctataagcgttttccagtgtcccattcggtttagaacaaagacagcctccctgtccttctgcggcgttggattttccttccacatcggcggatttccgacaaatacgggcattcctccgcttcccggaaggatcatcatcccatccagcgccaaatcggcttcacgaattattttaattttcaaatcaggaatatgtcgatttatataggatgctgtgttaatcagacgttgattcatgaagcttccctgccttcctatatggctttactctgcgagtaactttggtatttcctcattcagctgcgcaattccatcatctacagacacagctcctgtcataatactgtcatgtacttcatttaaagcagtatcgatctgaacagtcttttcatggaccggcatttctaaataagtgtttgccgtatgaagcgcttcccggctctgctcatcttgtggaaatccctccatggctgccagtttatcaataaccgcttccgtcttcacagccgggatagaaccactgtccgccacgatctccgccccttccggacctgccataaacttgataaactcccatgcctcctctttgttatcagacatggccggaactgcaattcctgttatggtagcgatggtagatcccgcttccaccccctcggaatgaggcatcttcgcaattctccagttcggaatctccgtaaattctccgcttttgatcttattgataaatccggaaatctgccacgttcccataatatacatggccacattgccctgtgcaaatgcagatgaatgatgaagtccagtcgtcttaagttccgcgtaattatggcataccccatcgtcctgctgctttaataccatctcataatacggttttaggaaatcgtaatttccatccaccattgtctgtttcccatctgtcagtcccagacattccacacaggatctccatgtatggtaatgcgtcccgtaaacctcgtttccaggtgtgatatctgtcacttttctggcaagagcatcataatctgtccaagtcatatcattagtcggacactccgctccggcttcctcaaataagtcaggattatagtagagcacccagaagtcacttcgaaacggcagctcatacagttttccctccagtgttacttggtcagtaagtccgccgtaaccggacagatcgaatccatcccgctcaatatatccggtaagcggctccagtactcctttttttaccagtgtggagtatcccggaacgtcctggatacacaccatgtcaaattctgtgtcctttccagtcaattcaatgcttaagctagtcatataatctgttccgccagcacttcccaaatccaccagctcgatctctatatccggatgcgcagcctcaaatgcctccgccatcgtcttataatagaaaacagaatttaaatcccataacgcccacttgagcagcgttttctcttctccatttgtctggcttaccacgtcagtcaccgtatccgatgtttgtttgtactctcctccctgctcattattactgcagcctccgagcgccgatgctgcaagaatcccggtcataatcagactcaatacttttttcttatacatgatcctttcccctccgtatcttttttcataccagccattcgctgtacctgtattatataaccggccccctcctgtttaaatggaaaaacattcgaaatgtttcacttttttactttcttatgttatacagtccgaaaaagatgtaattttttttaaaattaagcattttttttggattgtattcaaattaatcctgaaatgatgtagaattatcttattatgataggaggaaggaatcatgcaaaaaaacagtctgttgaaatcaatccgcggcaaaattacatttttcacagctgccctcaccatcacgctgaccgtcctggctgtcaccatctgcttctatgcttttcaatcctatcagaaaaagatgatgatccgttcctcagaatttaatcttcagtctattgcagacaacacctcggcggacttaaacaatattctggcatttgtaaagtggtgctactccagcagtgatgtggcagaatacatggacaccattcacggacagggtacactggggcagatatcgtcaaagaatccccgagtagcgcaaatggcatttgatacatatgaccgaatctgggaagaatataccctgcacaatcaatctaattacattagaagactgatcctgtcctctgataatcctctgacttatatgcagatgttttactcttctgttccggaccggactgatgccgcctccctgatcgcctcccaagacttcttcattcctctttacgaggcctcctcatttcagtggaacggactggtacaaaatcctttcaacaaaatcagtaaagattacatcataccggtagttcgccccatttacagcggcgaaagcagtcagactatcggctggctctatgtagaggtttcctcagagcttatcacaaatcgtttaaaagcctatccattggaatcagacagcctcctctaccttaccattggagaaaagaattatctctgcaaaaacggcgagttgacagaatcgccatttgaatttcagtggatatccgacttaacggacagcaccataagcagcaattccaaagctatggaagccattctgccagaacttggggaacgtacggtcctcacctgttctctgggcatacccgactttcatcttacggaggttctgtccgttagacgggaccgggcccagcagacgctctatacctgtatgatcgccggcatcctgtttgccgcactttcctttggcattattcttatgtactttttaaatcggaccatcgtgaaaccggttcaccagctccgtcagaatatggactctatctcccgtggtaattttcttaaaaatcctgatattgaatgggaaaatgaactgggggaaattgggaaaggaatcaatgatttgtcagaaagtgtagtaaacttaatggacaccaggattgagcaggagcggcagaaaaaggatctggaatatcagattctgcagagccagattaatcctcattttctctataacaccttaaactccgtcaaatggatggctacgattcagggggctacgggaatcgcggatatgatgaccgttctcgcaaggctgctaaagaatgtctccaaacggagtgaatctatgataacacttaaggaagaactggaactggccggtgattactttcagatacagaagtaccggtacggaagcagtatctctatccggtacaaaattgcttcagaagatttatatagctgtatggtacaccgattttcgcttcagccactcatcgaaaacgctctcttccacggccttgaaccgaagcgggctcctggtacaattactgtctctgcctcctcggaggtctccagtgaagcaacgcttctcattctctctgtcaccgatgatggcatcggtatgactaaggaaatgattgaaaaagtaatgacatgtgaatttccagaagattctgatttctttaagcacattggaatcagcaatgtgaataaccggatcaagcatgatttcggtgacagtttcggaatcacagttaccagtgagcccggcgtctataccaccatgacaattagaatcccgtatatccacagaaaggaaggagtggaaaaacagacatgataaagctattgattgcagatgacgaaccgctcgttcagattggtatcaaatccatgcttgactgggatcggcttggttttgaaatctgcggaatcgcagttaacggagaacatgctctggagctgattgaggagacttctccccagatcgtcatcacggatatccgaatgccggttatgaacggactggaacttattaaggcatgttctgaaaaatatggaaagcttccactttttattgttctgaccagttatgaagaattcaatctcgtaaaggaagcgatccactatgaagtgatagagtatctggtaaaactggaattaagcgaggatgccttaaaagccgctataaccaaagccgtcaaacgccttgaggatatccgcagagtggaagaaccgcaggcagttctcttaaaccagagtatgacggaaaaattttttatgaggcttttatacaatttatttgataacagggaacaatttgagctccaggcccgagatttgaaatttccatttcatgacttttcctaccaggccgcctgctgtgaaatttgtgaatccgaccgttttcccctgactcgtgagcagctggcccacctctattcaagttgcctccagatgatccatgacgtcctgacccgatacgtgaggtgccatgtcatttctctggatcagaaacattttgcagtcatcttctgcctgccttcaggcgaagcgtcctgcgatgtgacctccagagccttaaaggacgccaattccattgtccatacgtattttaatgtaaacttaagaatcggagccggcacagcagtcagtaccccctttgccgtcagtgaatcgtatcaggaagcgcgcgaagccaccttgaaggcctcagataatcaacctgtcatcagcttctccccgtcttccaccagttcgctgcagagttcctttaatttgtcaatctttaaacgggatatgatccgttcctttgaagaatttgataccgatgtcctctcccgcacacttagctccattatcgaactgtttgccgcccatcccaaccgctatctgcaggctatcgacggagcctgtaacattatgtacctagccatgtctcttctgccggaaggcgaggtaaacctctctgaaatttttgaaggctggaacggttcctaccgttccatttaccgttgcagcagtgtggaacagattactgtatggctggaaaccctacggaatggactctgcgaaatactgaagtcacgaaaaaaaacgtacaaagaccatattgttaccaatgtcaaacattacatcaatgatcacatcgaagaacgcctgactttaaacgaagtgtccgatgtatttggaatcagccacaattacttaagtgtcctgttcaagaaaaactgcggcattggtttttccgaatatatcacacagacaaagatagccaggagcaaatccatgcttctggaagagaatttaaagatttatgaggtagctgaccgtcttggatttgagacaccctgctatttcagtaaggtctttaaaaaggtggagggcgtatctccgcgggaatatcttcaggaaaagacagtggctccagaaccagagcagtgaaacagcgatctcaggatcagccctcgatatggatgaaacaaagctactttcatccatatcgaggcattcctgtctgtcggtccaaggttatactcctcaatcaaacaccgttttccagttcttatccgcatatgcatcaaaacacatctcgacctgcgccttcgtatttttgtcctccgacagcacaggcagttcgtccggagaaaaccagccgctctccaccgtctcgatattttctgcaaattttccctccacaatctcgcacagaaaaaacaccttgcagactccataggcaaagagctgcttattatgacgccccatatcatgaagcgctaccacacgcaccgggactaccgtcagaccagactcctccttcgtctctttgactgcattttcccccaccgtcttattcacatccacccagcctccaggcatggaataccggccatccttctccttcaccagaagtatctttccattctcgataatggcagccctcgtatccagcttcggcgtctgaaatcccgtttcactgcagaagagatccgtcaccttctcaccggacaagccggtatagctgctcataatctctcctgaaagctctctgatccgttcaaaccgctccagatcgtagctgtcctttgtgtaagtgattcccgcctgggcgataaactgaagctccatagcccaggagagccattttctcccttcatcctccgcctccaggcgctccagaacggacagaacggacgccggatcgggaaaatagtaatctgcatggatatgcttcacgccgccggccccccacaatgccaggccgcaggcggcctttgccgcgcaggcgcattccatatcgtaaatgctgtctccaatatataacacttcttccggcctggcccccgtcttcctcatatagaagtccaaaggctccgcctccggcttatggttcaccgtatcttcctcacagactaccgtatcgaagtagccgtaaagacccaggcgtgtaaaatcctcctcatattccgcccggctcctgctcgtcacaattcccatgtgaacaccttctgcctgcagccgttttagcagcagctccataccgtcgaacacgcagacgtaatctcttaaagctgtcaggttttccttccactgtgagagcagttcctcctcatttccaatccccagccgattcagggcggctgcccctgtaattccaagacagaacgtgagctccgaacactctttctcgattcccgcgccgtctctcagcgtcttctgaaacgactgaagaattgcttcttccgtattcaggagcgtgccgtccacatcaaatacaatatactgatatctcatgttttcaattcctcctctgtctcatttcatttaaccatattctgtctgaaggagcaataacataggaacaaaaactggaaaaatcaagaaaaagtcaagaattccgttgtaatatctcacaacttcctgtatgataaaaagataacaactataacgaaagacaaggggaacaagtatgttagagactttgaaaaagcatgtaaccaaaaatctgatttggcgtatcgtcatctcagtcatcatcatcggagccgtcttctttttcagcggcaagtcgattctgatgcttttaaaagggccggaaccgattacggcaggcatggactatgacgacgccgagggctcttatgtgagctttgacgcgcggtacatcgttgacgaatacgttcgccagaccgagcgcaacacggataccaagaaagaaacgctgaaaaacatcagctacttcgtctactttgaggaagacggatactttttcggaatcgaagtcccttcttccaaagaagacgagatgaaccagtatatcgacgataccatcagctggctgaacggtgaggtagaagagctcactaacgtcaaaccggtcaagggaacatggacaaagcttaccggcaagcggcttcagtattaccaggaacagattaccgacgatctcggcgcagaattcctcgagattgcccttccatattatatcgattcgaataaggtgggagagcgcacctatgtctccatttatatctgccttgccgtgattgctttgacattgatttaccttctctacagcctgattcagtattttaccggcagcagccagaagtatttaaagaagtatttagaagccaatccaaccgtagcgatggagcatttagaagcagatttcgcttccgcttccgccatctccaaaagcatctgggttggaagacgctggaccttccacatttccggcatctacacaaagcttattgagaacaaggatctggtctgggcctattactactatcgttcaggccgccattccgagagtaccctgcgcctgtatgacatcaacagacacttacacagcttaagcgcctcggaaaaagaggccaaagccgcgctggctgtctacgaacagcagcagccgcatatggtgctcggctacagcaaagaaatggaaaaattacatgataaagatttccagggtttcttaaacctgcgctacaaccgtcctgtggaagaattacagaccgcgccggatgaaccgtggaactacacaaatcccgaagaatcataaatcatcacatgggcagcaccgggcggactaaaaagaagtccgcccggtgctgcccgtagaaattacaggagatctgccatgcattatgactgcctgattgtagacgacgagaccgcaatcgccagctctacctcggaatattttaacttatttgagctgtcctcagcctatgtaaccagctacgaacagtgcatccgctttttaaaagagaatacggtctcccttctcctgctggatatcaacttaggcggccgttccggcttcagcctctgcaaaaagctgcgcgaacagacggatattccgattctgttcatcagtgcgcgcaccagcgacgacgacatcctgactgctttaaacattggcggagatgattacattaccaagccgtacaccttaagcgttcttctggccaaggtaaaggcagtcttaaaacggtgtgcgcggtccggggaagccgtgcccctgcgcattgccgatgtggagatcgatctttccgcccataaggtaaccgttggaggtaaaccggtcaaactgaaggaaatggaattccgtctgcttacctatctggcacagaatctgggacgtgtcgtcacaaaggaagaactcctggaaaatgtatggcccgacccctatgtgggagaaggcactttatcggtgcacatccgccatctgcgggaaaagattgagaaagaccccaatcatccgcagttaatcttaacggtgtgggggaccgggtaccgtatggagaacggagaatgccatgattaagaaaaaatggaccttcctgtttctgatttcctggctccttctcggcgccgtctttctcttccggcttttttcctcgatggagatgccggagatcgatatggtttccatcaaccgcatcggaaaagagacggcggtccagtgggaacagggaaccttttttaaaccggatttcagcccctatgactatacagttacagacctttccgggaccatcctgttaaagacttccgcttccgctccgtcaagtgtggccgaagccgtccgcaggcatgatcccgtgctggatgtcaccgtcggtcagggtgtgaagggccatgtactcattgcagccggatacggcgacgctctgctgaaaacaaaaaaagaactggctatattcgccgttcttctgctgctgatgccggtaattcctgtttttctctatacagcatacttaaatcataccgtactgaagccgttttacagaatgaaagagttcacccgccacatcgccatgggagatctggatttccccctgcctatggacaggaaacacatcttcggcgccttcaccgaaagcttcgacatcatgcgggaccagctgaaagaggcgagacggaaggaggctgaggcaaacagaagcaaaaaagagctggtcgcctcactgagccacgacattaagactccggttgcttccatcaagctgaccagcgagcttttactggtcacggaaaaagaaaaaccggtcagggaccggctgcagaccatataccagaaatccgaccagatcgatcatctgatcaccaatatgcttcaggcctccttagatgaactgggagagctgacggtaagcttatcggaggtgagcagcagtgccgtcgaagccatgatccgggatgccgattactgcggcagaatcgcctccctcaccattcccggctgcattctcctccttgatccgttccgtttagaacaggttatcggcaacatcctgaataattcctacaaatatgcggataccagggtcaacgtggtatcccagctcacagaagacggcctgcgcatcgaatttatggattacggaaagggagtccctgatgaggaactccccagccttttcggcaaattctaccgcggctccaattcagataagaaggctgacggctccggccttggcctttatatctcgaaaaacctgatggaacgtatgggcggcatcattgaatgcaggaaccgcagcgacggtttttctgtaattctgtatcttccgctccgccatcccggctcctgatcatcactgaagtcgggaatgcttctgcagattcccggtttaatccaggtaccggactgcaaacaccgcccccgcttcgcctgccagtactaccctgccatcctccgggagatagaaggggcggtctttctccattgtccacgaactcgacacgcacttcatctcgcagccgctgtggtcatatagataccaggcgccgttctccggcttttcaatcagaacccggcgattctgattcacgtctccggtagtgagccagaccgcctccccggccgctccgagtgtcacttcacaagtgctgccgggaaacgcttccgcgtcttctgccgccatataccggaaactgcccgattccaggatctgtttcccattctcctccatccgcgtgtaatcatttaaatcgcggcctgcctgccccggaacctccgtgaagaagtccgcatgggtctcatccaagaccacagccatccgcagttccaggttctcaaaagaaagaattccttccggttcatccagcagcagcggttttaccataaaccgtttcagccaggcagcagaatcgtatttttcacttatcagataatattcctgaccatccagctccttccaggctgataccgctgcctctgacggcacattcccggtatagcgggttccgacgggcagatatgtcgccacgcgtccgagccccggatagacctccatgctttccgccatcaaatactctcttccctgctttccttcctggaagctcagcctggtccggccgatccggccaccgcttccctttgacagttctcccgatgcgctgatataattcccgtccgtagaataaaatccgccgtccgttccaggctgatagacctgctctctccgccgcccgctcccctcagatgcaaccgtcatcttcccgtcaccggagacggaaagctttaacagatcactgccggcgtaccatccggaacgctccgcgatatcggcaggtaccgtcatttccgcagatacctctgtttccgcagataccgccgggtccgtgtcttttccctttcttacgtccgcttcccagcttacgttctcttcctcttcccgctcaattcttccgatctcgtccaaatacgtcatcacaatctcctgcaccgccagctggttcaatgtgctggagccgccgctggttaacacggcacaggaaatctgttcctccggaagaaccgtcaggctgccgtgatagaagttcgtatcgccgcccttaacaagggcctttatcccatagcggctgaatggatacgtctccacgctgtcccagccaagcccataggataaggtcgtatcgcagcccttcggattgatctcctcatgataacggctggtttccatggcagtcagcgctccgtcggacagcagcctggcattgccgcttctgttcctcataaaaatttccgaaaaacggcacaggtccatggcagtcgcgtaaatgccgccgctgccgatcacattggcgttttccgcagggagctccccgccgctccctgcatcgtatatcttcgccaggcggcctgacagattactgctctgaggcgttttaaactgtgtcagaccaagctgatccgcaaattcccgttccacgtattccgtaaagctgagtcccgtcacccgctctgtcaaaatctccgccagtgtaaaaccatcgttgcagtacacctggatctcccccggatcggacttcagacgctgtttcttcagccgctccagcagcatatcgtgattttccgtatcgttgtctcccagcagcatggcattgtttaatgtgctgcccggaagccctgaactgtgatccagaagcatctccggcgtgatccggcgataccgttcatccgccatctcaaactccggaatgtatgtggtaaggggcttctttatatcaatcaattcctcatccgccagtttcatgactgctgccgcggtcaccaccttgctggtggaaccgatcccgtacatgagcggctctgccggtgccgtctctttcgccaggcaggtcatctgtccccagcccgccattcctgaacataccgctgccgctgtcagtgccgcagtgatatagcgccatcttttcttcatcctcatcattcctccgtcaacaatccatataccgtaatccctctgatctttcccgccagcaccatggaaaccgcaaatgcgaatgccaccagcgcaagggccataagaagaatcagccacggctcaaccacaaaattcatctctgaaactcccagccgctcaaacaaaagactggccatacgattcaccgacagacatgccgccgcggaaccagcaaacgttcctccaatggatgccggcagaaaacttatggcgatctgttccatcagctgtctgtccgtgtagcccagagccttgtagataccgaattcccctctccgcctcgtcagcattgatttgatcaccatatagagcaccagcaccacaagaagcaccgttcccgtaataatgagggccgccatcatacgcgttgaatcggcgatactgtccacattggtcacaaagagcctcctgttgttttcaatccggtctatctcataatcattcgtgtcgccgcttaagacgatttcaccgtctgccatcagggcatactgggcgctgtccacaccgtacatggaaatgagggcggtaagtttctcctccgcctttcgcctggccgcagccagcgcctcctccctgcccggtttcgcatttgtatctgtcttggtctcctccgcgccagactccctgactgcgtcattcactgacggagaaagcacacggaacttctgctccatggcggcgataaccgtatcgatatccagccccggctctaagtacacctgaatcgaactcttctcgtagtacggttccacccttaaaagtcctgtctcatggataaagcagatgcggccgaaattattcatggtctgagtcagtccgcagatcacatattccgatgaaaccccgttggctgacaccgtaatggtatccccgatcttctttccccagctcctggcgagcagccctgtgattacgatctcgttatcgtattcaggaaaatccccctcatagacttctaccagttccagtttgccgaagtcatccgacacgtaacagcttaacagttcgccctccacggtcagggattccatctcatagagacttaccttcctgaccccttccatggcgcccaccttttcagacaattcttcataattctcatgaggcgccttatagaccatgatgtcactgatctcatatccggtcagcttaagcaccagatcgtcgttgattcccatattccaccaggtgatgatggaaaacgcgctggcaaatgcaatcccggcaaatatcacaccgaccatgagaatcatttttcggtgaaaggccatgctctttaatcccagcaccatggacagagagcctctcgtccgttccagcgggaaatactcctttttaaagctgtgggatttgatgcctccccgcagcgcctccacaggcagaattctggcagccgctgccgcggagcgccatgccacaaacacaaccacagccatgataacggccgcgctgatcatatcgaatccgatatgaccgccgcttctccaggtaacgcccacagagctggtgatcagcccgcccagagccgcaatgatcccgtaggaaagcgcaatgcccaggcaggttcccagaatcccaatgataacaaactccagcaccacagaccaccggatctgcctgccggtatatcccacagcccccagtgccccgatgttgcgcatctgggaatcgatatggttggagatccggaacttcatcacgatcagggcaaccagaaccattaaaaacgagaatacaaacagcaccgccgaaataatggtgaccaccatggtggtaccgtttctcatatcatcaatggtgatttccatggcatttgcctccatggagatcgcttctatatttacatccgtactgttcttaaaatccgctgttaatccctttaaatccgcctgatccttcagccgcacaagaagaatatatccgccgccctgctgttcgtacagtttttcatacgccttctccggcatatagaaattcaccatgctgctgaccgaggagtgaagccatgtggactgtgtgaagcccgctatgcggaaatggtaatcttttttattataattcaggatcagctcatcccccagtccatatcctaagtccttcataaacaccggcatataaaccgcctcatcctcgggaacctccgtctgttccgccacaaagtaaccgcttatcttcctgttgatatccatattcaaaaagttggcagtgataatgcctccttccgggaaagaggccatctgcatcagaacagcctcctccgtctctgccgtctccaccctcggatcctgcaaaaagaaatccagatattcttcccggtactcattgcccgtaaaccggaccatataatgggctccgttcagccggtcattttccatgtcgtaaaaacggttgatcccagccagcagtgtaagacctacgttaaagatcgctacagccagcaatataagaacgcccatggaaaccgccacgccctttttctttttgatatttgccatggcaatcataaaaaccggcatgttaccaccccatttccgttaaaaatgcactcagcttctcgtggcgcgccgtatcggcggcggcatacgttcccagccggcactcgccgcagatcataccgtctttcaaatagaccacccggtccgcccgccttgctgtctttacgtcgtgagtgacaacaacgatgctctggcccttttgattcacctcggtcagggtatttagcacctgctctccaaaagcggaatttaaggctcctgtgggctcatccgcaaatatcactgccggctcattgatcagcgctctcacgatccccacccgctgggcctcgccgccggacagctgggccggaaacttcccccagtcctctttttgaatcccgacttcctccagcaacttctttgccctggctgcaaccgcccttttatccctggacaccaggagcccgcaggccagcacattgtccaggacgctcatttgatccagcagatgaatctgctgaaacacaaaaccgcagtttttcctgcggaacactgccatatcactgattcccaggtggttaatcttcacctctccgtacatgacctctcccagcgtcggcttatccatccctgacagcgcataaagcagtgtggacttaccggagccggaagcccccataatcacggtaaaatctcctttataaatacttaaatccagatttttaagcacatgctgctgcctcccggcactggaaaagctcttgcataatttatctgtctgaataaccacttctttcatggtctgtctcccttctattgccgccggccattatcattctgaccgttttctccaatatcaccattataaatggccgccgggtaaaagtccttagaaaactgctgtcaaattcttatcagtttcttaactgaatcataattctgtgataaactggaaaaaacagatttgcagaaagcatgcggcggtatgtgatggcagaaccctccattataacaccaggctttccggttatgataagatagagaagctggaggcatcagacatgaaaaatacttactctacttccgatgtggcaaagctgatcggaattcacccaaacacagtacggctctatgaggatctggggctgattacaagaccggaacggaaagagaacggctaccggatctttacggacttccatctgatccagtttcggattgcccgcctggcctttcaggttgaagtccttcagaacggcctgcggacgcaggcggcggccatcgcaaagacctgtgcgtccggcgacatcgacggtgctctgctcttaaccgaccgttatatcagacaaatcggagaagaaagccagaatgcggagaccgccatacagatcgccggacagattatatccggtcagactcattttgccaatcccctgctccttaccagaaaacagtctgccgcttacttacacattaccgtggatacgctgagaaactgggagcgcaacgggcttctggtggaaaagagaatgcaggacggccgccgcgtctacacctcccgggatctggaacggctgattatcatcaggtctctgcgctgcgccaactactcccttgcctctatcctgcgcatgcttcatgcgctgtccctcaatccggaggccagcatccgggacgtcatcgatactccccggtccgatgatgacattctgactgcctgcgaccacctgttgtcctccctcgatcaggcggggcaaaatgcaaaacagatcgccggactgttatcagagcttaagaatctgaattcccttatgttaagcccaggacagaaagaaagacaggggccggcgtaaccgccgctcctgtctcctcttcttctaatttcctgcgactcccgccggaaacaacggaatgccgtttattgctcagatatattattcaaatttatttttcaaatctctctaaaaatttcctggattccaccgcattttccggtgtgctgtcctcgattgtcatctgaatgtacggtttttccttccgaacgaaatccattatcttatcgtatttcatgattcccgtccccggggcgcccgatacgattgtatgatctttcacaacgaaatctttcatatgcagaaccgcagtgtactctcccagatcctcaatcgcctgagcaaagacagactcataatcgccgcagttttccacagagagaagattcaccggatccagaataatctggaggttgggagaatggatctcctttaaaacccgcagcgcctgttttgaatcgtagacaatatggctccaaaccggctcaatggcaagaataacaccgaatttttccgcgcactctaccactgggcggacattggcaataaaggtctgaagcgcctcttccgtatggcaggccggttcaaagtggtaatccgcgttgggagctcccgtctctgttcccaccacgctgcatcccagaatcgaagcaaaccgtatatgggcaaaataccgttcctggatcttcttcaactcttccggatccggatgggcaaggtttaaataacagcccagaaccgcaatatccacatcgtattttgcaaacatctttctcaaataagcagcatatccgggtgtcagcgccgaattggccacggagtgctccgtcaccgtcttggccagcgccagatggccgcaggtaaatccctgctcatgcgctctcatcactctctgttccagagttccaggttcaatatcgtgtaatcggattcctatctgcatttttctttcctccttgttatgaacacatcgcgtgttccgttttgcttaaagcaccattaaatctctttaaaatgttcaatattactcataataaacgcgtcgcccttctgaccggtaatcgttacattctcacagaccagcgtatctacattcataaccgtaaatccctgtctggaacaggcagagacgccttccatcatggccggaacgccttccctggcctgttctgcaaatgaaatgtctacatttctcagttctatcttccggatcttctgctccggcagaccacagaggaacgatgccgccgcatggcagttggccgctttgatatcggtgaaggaaagattctgaatctcaggcgtcctctcatctgccggcaaagcctccctgcactgcacatactctgtcttcccgtccggatcacaaaaatagaaactgttgaccacaaacggtgtcatgacatgatccatgacgatatgctgaaaggaaatatcagacagtaccgaatcttttcctctcccgcgcctcgttttcacgcggagccccctgtccgtatggcgaaacaggcagtcccttacccgcaccgccttaactccggctccaacctcgcttcccacagtaaccgcaccatgaccgttttccataagacactggcgaatctcaatattctcagaaggcgttttataacggcgtcccatatagattttccctgactttacggcaatacagtcatcgccgagggaaaagtgcagtcctgtaatctccacatccttacaggactccgggtccagcccgtccgtattgggcgagtccgcaggattttcaatatccagatccaaaaagcggagcccctgactgaaatacggatgcagcacccaggcggggctgttctttaaataaaatccctgaagcgtgatgtccttacatctctccagaaataccatgcgcggccggaaagccccccgcatcgttcccgcatccttccaccagttctcaaaggaagcctgaccgtctatcagtccctctccatagattaccacattttccacttcaattccattgattattccggcaaacatgggaaggggattcccctcccaggttcctaaattataatcctctgtctcatcatagctttcgatcatgcccggtagtcttggatacttaaaccggtcggtatccgccgccaaaacggctcctgctcccagctccagcctgatatggctttttaaaaacaggctggtaatccggtatgtacccttcggtatcaatacacgcccgttcttcggacatgccagaatagccgcctgtataaatcctgtatcgtcctgtaatccgtctccctttgctccgaactccttcacattgatcgtcacaaactcataatctgtgcggaaaacagttctggcttctgctccatcccgtttcagacagacctcatactccgtatccggctttaatccgaacagactgaaaatcacccggttcgtcctctgataaagacttccgtttacatatacttctccctgtgtatcaaactcgaaaatctgcccggcctcagtctctaatgtcgctgacctggcagtcatacaaatcaccttaagctccatgttcttttatcctcacatatcaacagatcccatatcttcagttcttttcaaagatcaggtactgtgccttcagcatattcccgaatccctcacccttatcctgctgtacctcgaagcgtctccagattcgaagtcctgcctctccatacttctcacggtttaatacgcccaaactgcatgcctttaaaactgcatagccaagccaggcttcttcctcattaagcagaacctccggacgcggcccctccgccggcagcttctgacggactgcctgcttcaataaatcacacagcgccctgtagtattcataaatttccatggacatcttttcaattgtatcaatcagcacagcggcctcccggcctgaccacgctttttttccttcaaaatacgccgcaatctctccatagtgagccttcttattaaaaagagtatcatactctgcataaaaaggcatggcagcctccggcattgctgtctctccgttcaccagccggttgaatacgagatcagccgccttccggtattcctgctttcccgtctgcttcagtgcaaacagacaggcccctgcttccggaccggaaagaagggttccgtcctgccgcagaatggctctgttcgtctgttcaagagcacgttccccatattccgccttacctgtcgcctgatacatctgaatcaacccgggcagctcatagatatcttccatgacgttccatctcctcatcgttcattcccgcggcacataaccgttccagtcgcacgaccgcatccggctgtgtaatcgcttacatattcattttatgtaattttaatgataaatccatgcattttcagtttatcatctttcccaaatactgtcaatgtgtaagcgcttacgcatgcggataattttcaatacatgttatttcaatgaatattgcaggttccgtcacaaaaccgcgatatggaacatattttaaaatcggatggaagcatcattcccgttttccttttcccacgttcgaatcgtctcgactggagtcctggtataccgggcaactttctcatatggctctccgtttttccgcatttcgatggccagctctctcaaagtttcacttctgcccttttcaatcccatcatttacaagcatctgccccaataatgtcatggaaaattcctcctttacctcttctaagtctttcgagtccaaaaacttcacagccagcgcgtaaagtacggcctgcatctttgccccttcatccgccgtaatttctccggaagcctgcagcagacggttcccctctatgaatctctctttttctgccatcttcccggacataagcggagtcagcagcagcggaatcacttcttccctttcaatcctttccccagtttgcagcttttgcttcaactgatcgaacagctggtctgcatcccggtcttttagcctcaccgtcataacacggtatgtattgattccttcgtgcagctcgctcagtacctccgccgcctttgctgagcagatcacaatcgtggtaaccggtacctgatacgtatagccggttactgcctcatacccacgaaagcggcgcagatccttttccgtcactttatcactctcaaattccagatggatccaggagccgtcagaaacgatataggtaaaatcctctatcagcccctttacttccaggtataccagttccgtcgacgcaatccccgtaatcttacaatcgatgccaagatacgggagcagcacctccccgaaatacgtaacagcggactttagaatcatgtcctccagcggaagattttccggaagaacaggcaccgtgccagtgcatgattccccggccgttgaacggctcctcccactttttcgcatatagcctccaatccaagctatataagaatctgtctccatgataacagaagtaagaccgacagacaataaccctgctttccgtattattttctatcataaatcagtgctgcaataaaggaaatatcgtcgaaatcgacgcaggaaaaccagatgcctgacggcagtatgatccgtgaacacggaacagaattctggaaatggagacagctccttatggaaggctattatctgtttagctggtacaaattacttatattctaagtatatcatactattgatccattcgcaagtccatttttaattaccggaaagaatcgcaggggagaatccttacatgaacaggagaatggaaatgcaaaaaggagaatcccccttctgcgccgcatataccgcacacagccagcaggaattctcccttatccttttatccaattctcttaatcctaagatccgccggtcatcgaaaccgtttctctttgcattaccgaaccagcattctgctgatctgatactgatcctccggaatatccttatgcatattcagcgcttcctgaatatcgaaatccacgtattcgccgtgcttataagctacgatacggttgctttctcccttacagagaagttctaccgccttcgcacccatgatggaagcgtaaactctgtccttacaggtcggcgcgccgcctcgctgcatgtggcccagaatcgtggctctcgtctctatgccggtagccgcttcaattctcttcgccatggaagaagaatggccgatgccctccgcattgatgatgatgtgatgcttcttgccgcgttttctgttctcaatgatgcggttgatcagagcctgctcatcgccgtcgtagcgctccggaagaagaatgtcctccgctccgttggcaaatccgcaccagagagcgatgtagccggcattacggcccataacctcgatgatgctgcagcgctcatgggaggtagaggtatcacgcaccttatcaatcgcctccatggccgtattcactgcggtgtcgaaaccgatggtgtaatcggtacatgcgatatccagatcgatggttcccggaagtcctatggtattaattccaagtgcggaaagctttcccgctccgcggaaggaaccgtcgccgccgattaccaccaggccgtcaatcccgtgtttcttacagatttcagcgccctttttctggccctcagccgttgtgaattcctggcatctggctgtatagagaatcgtaccgccgcggtggataatatccgacacgctggtactcgtcatatcaacaatttcttcctgcagaaggcccgcgtatcctctcatgatgcccttcacttctaaccctttatggatagccgtcctgacaaccgcacggattgccgcattcattcctggtgcgtcaccgccgctggttaatacgccgatcgtctttacttgttttgccatagtaacttcctcctgtttctgaacatcttttattgtaaattttcttcgctcctaccaaatcatacaagttgtattctaattcattttccttatcttttcaacctttttttctacaaccttgacatttttttcaccaagtttttcagtcaaaacagagacaagttcattggaagcacttacatttctgttggccggtaaaacctttttcgcccgctccttttccagataaatgataacggtatcgtttccctccgactccttcaaatctgaaaggatttctgcctctctggccatataaacgtctttgtcggggaacttaagccacagctctttcggaaggctctggaaggggattacgcgctcacagatgacctttcccaccggatcgtcaccgatggatgcccgcccctggataaagaccttggcgtcctccacaaacagctccctcttgctctcataatcctttggaaatacgattacctccacagaaccgactaaatcctccagcgtaaggaaggccatcagcttgttgtttctcgtcgtcttcaccgtcttgcctgtgatcatgcctccgatggtcacgtaagagccatccttgacacgagcctcttccgtctcctcatccactatgaaatctatggtgaccgcggtaatattattcctccaggtcgtctcataagcctccagcggatggccgcttacgtagatcccaagcgcctctttctcaaaagcaagaagctcctccttcggaaattctcccacgtttgggaaggtgatctggtaccgcgtcttctcctcctcgctggcaatatcgaacagtgtcagctgaccttccatggagttcttcttctccttgcttctctggtctaatagctccggcgccaccaggatcttctgctttctggttccgggaagcgtatccagagcccccgatttaataaaattctccagcgtccgcttgttgacctccttattgctcatacggtccacaaagtcctcgatggaagtgaacagcccgctgctctcccgctccgtaacgatcaagtccacgacggacttaccaacgctcttaatggccgaaagtccataacggattgcacctcctgaaacggaaaatccgctctccccttcattaatatccggcggaagaatggagattcccatctgccggcagcttaaaatatattccgacaccttggtcacattatccatcaccgaggtcagcagagccgccatatattcctgcgggtaatagtattttaagaaagccgtctgataagaaaccacggcataggccgccgcatgggatttgttaaatgcatacttcgcaaaatcgatcatctcatcgtaaatatgattggccgtcttctcatcaattccattggctatgcagcccttaacgccctcttccggattcccgtaaacaaaattctggcgctccttttccatgaccgacgtcttcttcttggacatggctctgcggactaagtcactccgtcccatggtatagccggccagatcccgaacgatctgcataacctgctcctggtagacgatacagccgtaggtcgggcttaggatcggttccatctgcggacagtcgtacgttgctgacgatgggtcattctttccttttaaatacttgggaatgaaatccatgggaccggggcggtaaagggatattccggcaatgatatcctcaagactctggggctttaactccttcatgaagctcttcatccctgaactctccagctggaacacgccgtcgtcctttcctgttccgatggattccagcaccgccttgtcgtcgtagtcaatcgtatccatatcgagcaccacgccgcggttcttctccaccgccttcaccgcattctgaatcaccgtcagcgtacggagccccaggaaatccatctttaaaagtcccagttcttccagcgtagtcatggtaaactgtgtcgtaatcgtaccgtcggccgcctttgaaagcggcacatactcatctaccgaggtacggctgatcacgactcccgccgcatgcatggaagtatgcctcggcagtccctccagacgcatggacatgtcgattaaatatttgacttccgggtcctcattgtaggcgtttcttaaatccgggctctgcttcagcgccttttccagcgtcatccccaaatcgcccggtatcatcttcgcaatggcgtcacatctggcgtaaggcatgtccagaacacgcccgacatcgcgcaccacgcctttggccgccagcgtaccgaaggtgacgatctgcaccacctgctccttgccatactttctcaccacataatcgataacctcctggcgccgctcgaagcagaaatcaatatcaatatcgggcatggacacacgctccgggtttaagaaccgctcaaacagcaggttatagcggatcggatcgatattggtgattcccagacagtacgatacgatactgccggccgccgagcctcgccccggccccacgatgatgtcctgagatctggcataatggatgaaatcccacacgatcaggaagtaatccacgtatcccatggtatgaataacgttcagttcatattccagtctggccttcagggttccgtcgtcgtccggataatgcttcgccagaccttcgaagcagagcttgtttaaatatccccaggaatcgtatccctccggtacatcgtacctgggcagcttcgtcacgccgaactcgatctccacgttgcagcgctcggcgatatcgtgagtattgtcaatcgcctctgacgcatagggaaagagctttctcatctcttcctcggtcttgcagtaatactggccgccctcatacctcatacggttttcatccgtcaccttcttaccggtctgaatgcacagaaggatatcatggggagtggcatcctccgcaaacgtataatgaatatcgttggtagccaccagcttaatgcctgtctccctgctcatgcgcatcaatccctggttcaccgtgtgctgtgccggaattccatgatcctgcagctccaggaaaaaattcccttcgccgaaaatctgctggtagcggagcgccgcattcttcccctgctcatacatgccgcgctcgatatagcgctggacctcgccggccagacaggcgcttaaagcgataatgccctcatgatacgtctccagcacttcataatccacccgcggtttataataaaatccatcgacgaagcccttggacacgatcttcattaagttctggtatccctgattattctcggctaaaagtaccagatgatagtagcggtcctccccgtttgtcgtttctctgtcaaatctggaaccggccgtcacatatacctcgcatccgatgatgggtttgatccccacctctctggccgcccggtagaaatcaatcacgccgtacatgacgccatggtccgtgatcgccatgctgtccatgcccagctcttttgccctcgccgtcagctccttaatcttacaggagccgtctaacaggctgtattctgtatggacgtgtaaatgcgtaaatgccacgtttcttctctcctttgttttatctcatcacttgtcaaaattattttaacatattcgatccgtttattatagcctattttttatttatttcacagcgatttaagtccgcagctacagtttctcagcagttatctatgaattcaaaaacagacatgaatctccgcatcttcgcagaatcattcatgcctgttttcattttcccatttagagcgtgtagcaccctttagttgttgctcaaatatttttcaatatcggtaacggcctggttctcatcggcaccatcagcagaaattataacctgctctcctgctgcaaggcccagggtcatcatacccataatgctcttcgcatttacctttttggagtcgatctccacgtaaatactgctttcatactggctggctacctgtacaagcatggctaccggcctggcctctaatcctgatgcaagttcgacggtgactgttttttttaccataattatcctcctcattcctgtgaacggaccctattccattctgctgcgttcactcctgtcccgcagttgctccgcaatatcgcagagtttcctaagtcggtggtttactcctgattttccaacaggagggtccagagcttccccaagctcttttaatgtagcttccggtctttcaacccgctcgcgcgcaatttcttccaaattctccggcaggttttccaggcctattgtatctctgatatattctatatcctctatctgcttcacagcagctgataccgttttattgatgttggcggtctcacagttaacctgacggtttacgctgttgcgcatgtccttcaggattctgatattctccagctccatcagtgctaccggcgcctccatcacgtttaaaatatcgacaatctgactgccttccttaatgtagacgatatagtaacgttttctcttgacaatcttcgcctctaagtcaaaggtggcaatgatcccctgaagctgcttcgccttctcctctgttgcacatacgatctcaaaatgatagaatttctcgggatcacttaaggaccccgatgcaagaaacgccccgcggataaatgcgcgcctgcagcatgactgctgaatcaccacattctgaaccacatttaaattttcccccacctctccatgctcgtcaaggagcttaacggcatgaagcacccggagggcatcctcatgctcccggatcgtcaccgtgtatgtacggtttttatttaagtaggcgtttcttctaatagagacatcagtaactatattaaatgtttttttcaataatgtaaagtactttcttgcaactgccacattttccgtgtggattttaatggcataatggtcctcttccgagattgtgatctttccgcaaaggctgatgatcgccgctgtttcggcaatctgacagtgtctcgccgggcttaactgcctggaaagttcgtcttttactttggaggaaaatgacatggcagctcattccttttttcttttattatccttatcaatatcgcggtgctcaatttttaagccgaattcctcatgggatttgagccgctcgtaaaccgccttcgcaatcgtcaccgaccggtgctttcctccggtacagccaatcgcaatcacaagctggtttttcccttccagcacgtatcccggaatcaggaattccagcatatcgtacagcttattcagaaaaatgtctgctgtcccgttctgcatcacgtaatcccgcacttcctgatcctcgcccgtctttggacgcagttcatccacatagtatggattcggaagaaatctgacatcaaaaacaaggtctgcatccgaagggattccgtacttgaaaccgaaggacagaatcgtgatatacagattcttatagctttcatttgccataaatattttttccagctctgccttcagttcctttgtcagcagcttgctggtatctataatgtaatccgcctcttcctttaaaaatgccagtttgaggcgttccttctcgatgccgctgtcgatccgcccctcccccgccagaggatgggcacgcctcgactctttatagcgtttgatcagtgtctcgctgctggcatccaggaacagaatctcgtatggaaccctttttctggaccactcatcaaagatcctgtccagtgccgacagttcatcgccgctgcggatgtcgatccccagcgcggcatttctgattccgccctgattgctcagagtaagctcagcaaatttttctaccagagggatgggaaggttatccacacagtagaatcccatgtcctccagcatcttcagcgcatttgtcttaccggcgcccgacatgcctgtcacaattaccagtctcacgttacgtctcctctacgactttcgaatgttcccagcgtcttaacttccatctccagctccaccccggagcattcaaacacctttcgcttcacatcctgacagagcgtcataatatccgaggccgtggcatgatccctgtttatcacgaaaccacagtgtttcccggaaacctccgcgccgcccacacggtatcccgccagaccggcttcctcgatcagtttacccgcaaaattccctgccggccgcttaaacgtgctcccggcgctgggatactccagcggctgtttactctttctcctggcggccagttcgtccatatatgccctgatctccgtcttgctgcccggctttaaacgataccgcgcttcaagcacaatataccggtttgcaggaatacagctggtccggtagcccagctccagttccggcagggaaaggaccttttcctcaccttctatggtcatcacacgggctgattcaatgatatccttcgtctcggaaccgtaggcgcccgcattcatcacgacggctccgcccaccgtgccgggaattccggctgcaaattcaaagcctgtgagcccggcctccagcgccgcctttcccacccgggaaagggacgcccccgcgccggccgcgatctcacaccggtcactgtccaccgtacacccggaaaatccggccgtcatggaaatgaccacaccgtcgaaaccgccgtctcccacaagcagattgcttccgtttccgagaatgcagtacgggacctcttctctccggcacagccggatcacctctcccagttcgcgcgcatccgccgggcttacatagtaggctgcgggacctcctgcacgaaaggtggtgtgtctgctcatcttctcttccgtcttcacatggctgctatctgacacttccagcagtttctcataaaacattgtcatgaaacacctcaatcatcctgttttcttgacaggtttgcctggacacggttgtataattcctgtgccgcgttgtaccccatcttcttctgtctgtagttgacagctgccgactccacgatgatggcgagattccgtcccgggcgaacagggatggaatggcagaccacacggtttcctaagaattccgtatactggtcttccagtcccagtctgtcgtactctttatccttatcccagtcctccagcttgattaccatatcgatggcctgggtgtccttcacgctctccacaccgaacagcgtcttgacatcgataataccgattcctctcagctcgataaaatgtcttgtaatttcgggagcacttccgatcagagtctcatcgctgacctttctgatctccaccacgtcgtccgttacgagacggtggcctctcttaatgagctccagagccgcttcactcttaccgattccgctctcacccatgatcagaacgccttcaccgaatacatccaccagaacgccgtggatgctgatgcacggagccagttttaccttcagccagcggatgatctctgccatcagatcagaggtcgtctgctccgaaacaaggcatggtacgccgtaatggtcgcagcgtgcgatcatgtcttcatccggatcctggttcctcgaataaaccaggcacggaatctgactggacagaagcttatcatacatctccaccttgcggtcatgttccatctgacggatatactcctgctccacatagccgataatctggaccctctcattgtcgaaatggtcaaaaaaacctgccagctgcagtgccggacgattgacatccggatgactcagcacaattttctctgcatcgatctccggtgtcatgttccggagattcattttttcaattaactctgtaatcgcaactccatgcatggtctgatgctccttttccatctgtttttctcatactaacacagatttcgtgttttgaaaagagattcggagggaaattccacaatcctgccgccgggcagctgcagttcactccccgtttattcctgttttggacgtaagctgacgcagccgattaatggaaaaagtcatagacactctgagccgacttagcattcatgcccggtgcggcagtcagggcttctatggtggcctcttttatggcttcgatatctttaaaatggcgcatcagtgccttgcggcgggtggggccgatatcagggatgtcatccagtatggagtgaacctggcctttgctgcgcaggcttcggtgatattcgatcgcgaaacgatgggcctcgtcctggattcgggtgatcagcttaaagccctcggagcgcttgtcgatggggatctccacgttgttgtagtacaggccgcgcgtcctgtggttatcatcttttaccataccgcagaccgggatagacagcttcagctcatcgagcacttccagggcaatattgacctgtccgcggccgccgtccatcatgagtaagtccgggaatttcgtgaagctgccgaactcttcgtccacgcccttttcttttaatgcggcggcttcgtcaagtccgtgggaaaaacggcgggtgagtacttcacgcatggaagcgtagtcgttggcgcctttgacccatttaatcttgaatttccggtaatcgttccgcttgggcttgccgtcttcatagacaatcatggagcctacggattcaaaaccgctgatattggaaatatcaaaggcctcgatcctgtggactccggttatgccaagccagccgctgacctcgttcatggccccgatggtccgcagctcttcgcgtttgatcttttctttgtcctgggagagcaccagagctgcgttccgctccgcaagctccaccagccgctccttctcccccttctgcggaacgaccagcttcaccttctggccgcgcttggcactcagccactctctgatgatcccgctgtcctccagctccgtctgaacccagagttccctcgggacaaacggagttccggcatagaactgcttgacaaagctggttaaaatctgtctgtcatcttccgccgtggctatggctacatggtaatgctcacggccgatcagacggccttctcttacaaaaaacacctggaccaccgcgtccttttcgtcctttgccatggcaatgatatcgcggtcctccatactgctgctggtaatcttctgcttctgtgccaccgctctgacgctggtcagcaaatcccggtattcgatggctttttcaaaatccatctcatccgacgccgcctgcatcttctcctccagcatggagatgaccgggtcgtatttaccgcccagaaaatcaagggcctggctgatggcctttccgtattcttctttgttgatgtacccctggcagggcgccgagcactgcttgatgtggtagtttaagcaggggcggtccctgccgatatctttcggcagattacggttgcaggtccggatcttatacagcttatgaatcagatcgatggtatcctttaccgatcccgcactggtgtaggggccaaaatatttgcttttgtcctttttcatatccctggaaaataaaacccggggaaaatcctcgtaaaccgtcaccttaatatacggatacgtcttatcgtcctttaacatcgtgttgtatctgggacggtgttccttaattaaattgcactccagaaccagggcttccagctcagaatcggttatgatgtactcgaaccgggcgatcctggaaaccatctgttcaatctttgacgtcttattcctgctgctctgaaaatactgcctgaccctgttctttaaactgatggccttgcccacatagatgatctcatcctttttatcgtgcatgatgtagacccccggctgggcgggcagtttctttagttcttcttctatattaaatccattgtatccggattgctccacgtattagtcacctcagtctcgctccatcgtatttcgtctgcatctccagataattgacggcggcccggtacattccttcccgtgtgcccgttccgcttccgatatccagggattcacagacagccgtaagctcctcttctgaaaatatctcacagcgctcttttaaaacttccagcttttcataatacgtctccgcgtctaaaaaagcaagaagatttttactggaaacagcggtttcttcactcgtttcttctgcttcctctgtcttaagttcgacccgctcaaaccggtacttctgattcacctccggatatttttcatggtccacttcactggtgaacatggacagcggccgtacatacgttccaaatgttccgtacagcgcctgataaaccaccatcttctctcctgtctcggaatgttcggctacggtgataatctgatacagcttattcttaaaatgtctgtaacattctcctggttttggtattctgtccatatgcgtttcctttcctgatttcccgtcatgctgtatccgcagaagcctgcgcagcgctgcacggttcagtacagcgctgcgcaggcttccgtgaatgatcagttactctccagcgcctcctgttgtgacgatcacaacattgggcttgcttctcttttccccctgtgccgcagtctccggctgggcggcggctttctcagcggcttctgtttccgcatcttcaccggtctgcagttcttcactggcggtggttccgtccaccggagcctctgtctcctccatcgtggtttcttccgaaggctgtccctcctggggaagcgtttcctccggtgcaggctgcgtctccccgtctgcagcttctgtcggcgggaccgctgtggtctcaggaggcagagccgccctggattccgctatcttctgatcttcccggccggcttcctccggggaaagaagtccatcccacgtatatttgttggatgcgctccatagaatccattcatcgtatccggcgtcgtagaccgcctgaatctgagcccgcacctcggcagggccgtatttgatataatgctgcagataggaggcggtgaaatcctgaagccacggccgcacgatggcatggtcctcccccgccgccgtcacgatagccagatcctgctttgacttcatcagggccgcaagaatcgtatcgtaaggctgcgtatccggatgctcaatcccgaaattcccgtcaccgtaatgggagggataaatcatcggacagatatagtctaaatgctttgccatatcattatacacctgtcccaccgcatccgcatcaatcttacttccaatgatggtgccgaaaacgtctgccgatacgaagacgccttcctccgacagcttatcataggcatacgtaataaactccgtgatgatatccgtcttggagcgtcccctcgtatccgcctcgtcaaacacgacctgcttcatggtgctgtccgtggcaaagcggatgtaatcgaactgaatctcgtcaaacccggcttttgcggcctgtctgcccacttctaccaggtaatcccacacctcctggcggtagggattgacccaggccagccccttattatcgcggtgaagactgccgtccgcgttctttaagctccactccggcttcttttcagccagatatggatcacggaatgccacgaccctggcgatggtatagatgcctctggcctttaaatccgccataagcgatccgatatctctgatataccgctccgatgcaccgatctcattgaccgtgggcgcatcatccatggcaaatgtgatccttccatcgtcgttcttcacatcgatgaccaccgcgttaatctccgtctggctgatcttgtcaagaatcgcctgaaagccttccgatcccgccatatatccggaaatgtagacgcccttcacccggacccgctccttcttaacttcttccggttctgtctctggctgaatctccagcgtctcctcttcagtttctccgctcatactctctgtttctgttgtctcatccgtttccggcaagtcggatacctgcttatacttactgcatcccgtaactgccagtgtacagacaagtactgccaaaagccatttcttcatattgctcccgttctctttcctgatggttttatggtaatctcctgtaacatttatttaatattttaccacattttgtaaaatttacaaacgtgttttcgttttgccgtcttaatcattcattttgtaaattatatttgacatttagtcgtatttaatgtactattaaagtatgaaacaggagtcctgcagaaaccggaggtggatttttattgaagaacaaacggctgaaaattgcccgcatagaacacgatttatcacaggaacagttaggggaacgggttggcgtcacacggcagacgatcagtatgatcgaatccgggaactataacccgacgctgaatctctgtattgcaatctgcaaagaactgggtaagacactggatgaattattttgggaggtatcagaatgaaatcactttttaagaaacgaatcgtagatgaacgaatggaacttcaaagtcttaagaatgccagaaagagctggaactttcttctcattgcgaccggcctctgccttttggcggagcttcatttacttcaatgggagctgaaatacgtactcccacaggccgttatcgtgcttgctgcctctctttataatatatttttggataccagagacggcaacatttataccgcggaatccgccaaccgcaaaaggctgtttctgctctactccataagctccctggctgcgtcactgatcatcgccagcggtttttacaggcgctattctctcataacagcgattattattttcattattctcttctttttcatgtttggactgatgtatctgtttgattctctcatcttccatatggggaaaaaaagagcgctgaaagacaccgaagaggaagagtaaccacagccggaactttcccgccgcaagcagaatatcacaaccacagtttacagaaggagaaggcgcctgccttctccttctgctgcttaacagctccatcacagagtttcttcgagctataacagatgaactgccacgatcaatcctgcaaatacaatcgagaccatggacgtaagcttaatcagaatattaatggacggccccgacgtatctttaaacggatcgccgaccgtgtccccaacgaccgcagccttgtgctggtcgcttccctttccgccgtgtgctccgccctcgatatatttcttcgcattatcccatgctccgccggagttggccatcatgaccgccagaacgaagccggtcacggtattgccggccagaaggcctgcgacaccgtttacccccagcagcagcccgacggcgacgggaatgatcactgcgatcagggccggcgccagcatcagcttctgtgccgatttcgtacacatatccacacaggaggcgtaatccggttccgcctttccctccatcagccccctgatctccttaaactgccggcgcacctcgatcacgatggactgggccgcctttcccaccgcctccatcgtcagagcggcaaataaaaacggaagcatgccgccgataaacaggccgattaaaacagtcgggttggtaatggttaaattcagcgcgatatccgggttcagctgttgtaccttatcgatgtaggaggcaatcagcgccagtgccgtcagcgcggctgaacctatggcaaagcctttaccagtggccgctgtcgtatttcccagggaatccagcgcatccgtccggtttctgacctccggaggcatgtgggtcatctccgcgattccccctgcattgtcggcgattgggccgtacgcatccgtcgccagcgtgattcccagtgtcgaaagcattccgaccgcggatactccgacaccataaagtcccatattaaaatcggtatttccgcccgaacagtagtagctgatcaagacggaggcaccgacaataatcaccggtgccacggtggaaagcattccgagagacaggccgcttatgatgaccgtggctgcccccgtttcactggatgaagccagattcctggtaggccggtacgaatccgacgtaaaatattctgtgattgcaccgatcagaaccccggcgatcaagccggacagtactgccgcataaatccccacatggcccggaagcaggattcggataatcacgaatgcccccacggccaccagaacggcgctgatatacgttcccagccgcagtgcttttaaaagactcttttgagaggcatcctcctttgtctttacgaaaaaggtgcctgtaatcgatgcgataacgccaaatgctgccagcatcatgggaacagccacgccctttacgccgaaaccggccgcaaccgccagcgcagaggtcgaaacaatagatccgacatacgattcatacaaatcagcccccataccggccacatcgcccacattgtcacccacattatccgcgataaccgcgggattgcgcggatcatcttccggaattccggcctccaccttgccaaccagatcggctcccacatcagccgccttagtgaaaatgcctccgcccacacgggcaaacagcgccatactggaggcgcccatgccgaaggtcagcatattggctgtaatctggccgatccgttccgcctccgggagcgaacggaacacggtattcaggataaaataccagatggtcaaatcgagaagtccaagtcccaccacggtaaaccccataaccgatcccgccgaaaacgccaccttcagtcccttattcagactgtgggaagccccctccgccgtcctgcagttcgccatcgtcgcggtgcgcattccgataaatcccgacaaaccggaaaagaagccgcctgtcaaaaatgcaaacggtgtaaagtaacttaaaaatccgccaaacgccatacacagcaatatgaggaaaacgacagcaaagaaaacgccaacgcccagatactgccgtcttaaataggcgccggcacctttcctgaccgcagtagatattttaatcatcccggcactgccctccggctgttccttcacccggaaaaacatgcaggcagcgtaaatcagagcggctatggaaccaattgctacgacatacataacattcatggtacccctcctcgtaataacacttgttgaaattgtttagtttcaacttcattatagttctttatatgggcgttttcaacaaatatgtgtgatttttttcagtaatttaacggacggcctgtctgtctgggccctgttgtacggactgccataaacaaagagcccggcgggaaaccagagcgaacatgtttcttccgctcttcgtcatcccgccgggcttctccctgcaatcgtttatcacgaaaaaacttaataagtaagaacctccggtccctcttctgtgatcagtaccgtaacctcccactgtgccgacagacttccgtcttccgtgtagatcgtccatccgtcttcctcatcctgaacgacatcgggtctccctgcattcaccatcggttcaatggtaaagatcatgccgggaacgagaagcatatccgtcccccgctctccgatatggctgacccacggctcctcatggaaatcattgccaacaccgtgaccgccgatttcacgcactaccgtaaatccattggagtacacatactccgaaacagccgccccgatgtcgcctaaatggccccagggccttgcttccttaagcgccagttccacgctctctttcgtcacacggaccagcttttcagcctccggcgtcaccgttccgatgcagtacatcctggaggcgtcaccgtagtatccgtccagaatcgtggtgacatctacattgatgatatcgccttcctttaagatccggccgggatccggaataccgtggcagaccacctcgttgacagaggtgcagacactcttcggatacccttcaaaattcaggggagccggaattcctcccatttttatcgtattttcatggacaagctgattgatgtcctccgtgctgatgccaggcttgataaacgaatccaccagattcaaaatcttcgtgtttacctctccggctctgcggattccctcgatctgagccggtgtcttgatcatatagtgttccggcaccagatcgcccatgatggcgtaattttcgattttcgtatcgaacgccaggtggcagttcttatacttttttccactgccgcaccagcaggcgtcatttcttcccagtttctttaacatcgtgatttcctccatcttctctacaacgttttatcacgttttgaggccgttgtaaagagcacttcccattattcttttaagacagccttcacccggccgttcttttccacattatcattatatggatcggaagccacgatatccccatcttccagaccggaaattatttctacccggccgctttctcttctgcccgtctccacaggagtgaggaccgcttttccactgctcacgacatagacggcgcttccatgttcctgcggcatgacggcggccgcgggaacagagaagacctgctccgccttaattacggtaaaggatacatccgccgtctgccctgcacccacatgctccggcaggctgagcggttttaattcaaccgtacagcggttttcctccaggccgatggaggacatctccttttttgcagtttttgagataaaacccacctcggcctccgacctcgtgccgtcggcgtaaaccacctccgcggtaagtcccggcgtcagtgcggccgcgtcctcggataagaccgatgcggaaagcttcatttcctgagggcggtatacctttgcaaccggctgattcggcgataagtatgccccctcctccgtgtagacttcccacaggacaccgtcgtagggcatcgcaaccacgcccggatttaccgtattctccagaagctcaagctgtttttcgtaggaggcgatctgatcttgaaaggcggtgcggcgtgcgtccgaattatcctccttcgcctggttatatttctgaaaggctatgtccatctgcgtcttcagcgtatctaaatccgagcgggcaataaagccgccctgctgctccagcaccagtccgttgtcatagtttttctttgcgagcaggtactcactttccgctgcggactgggccgctgcggcggaaccgttggccccgtaaagccgctcgtactcctgacgcgcactgatcagctgctggcggaactgctcccgctgaatatcgagtgtcgtctgggaggcggaatccgtctttatcagaatttccccctcctttacctccattccgggtaaaaacggaatttccgacacattgccggccgtaatggagttaagcaccattccggataccggaaggatggaggccgagactgtaaactggctctctaagctccccttcacggcccgctccgcctgcgcttccaccggctttagaagcaccgccgcgtacgctccgatactgatcacggcaatggccgcaagaaatatccatttcacgtttcttttcatcctgcacctctattcccgttcccgcagaagatccgcaggaactatttttttcagctttcgaagcatcataacggaactcagaccgaccgacaccgcagtgagaccgatggcctgcaaaagtgctttcccatcgataaaccccggaatcgtatacatatcagacgccatggacaccgagatcagacggctggctcccatggccatgggaattccgatcagaacggctcccaccgccagaatccactgtcccgtggaaatgacctccagacattctctgctctttaagcccagcatcatcagagtggacaattcccgtttcagttcctcgaagctgatgagggagctgatgtaaataacggcaaagctgatgattacccccagcatggacatggacgccataatggcgctcatactccccatcatggaccggtactgttccagtctcccctgacggctctgaatcgcagatacggccgcagcgtcactgagtctggtccgcagctcctcctgcacggtaagcggggcctttaagagtaccgtactgcatacaccgcggtaatcgctgatctttgccgcaccttcaaacgacatatacgcagagcttcccatatactgggcaatcgtatctgtaacggcaacgcggctgatccgttcttcaggataggtaaccttaacctcgatggtacttcccttcttcactcccatgagactggccatgtgttctgaaatcacgatcccctcctcctccggatatgccctgcttccatcctcgcggaacagtctggtcagtgatgcttcccgtgataccgcctgaatcgtacagtctgtttttccctgcggcccggcaagggtcactgcaaattccatcattgcctccgccttctccacctgcggatgctttaccgcctccagcgcgccgttcactgaaaccggctgttcaaatgagaccataatgtcctgtctctgtgtcttttcccaatagtcaaagataaacacatcaaataaggagttcatggataccagagtcgctgtgatcatataggcaaaggcaataccggctatggacatggccgtccgcctcctgttccgcgacagactccgcagtgccatgatgcccggaactgtaaaaagccttaaaaagcccggtatccgttccagaaaggatggcctggccgttttgggggccggcggccgcagcgcctgagccggtctcattttccctataacgcctgcgatgatccatgaggtccctgaacagaagattcctgccagaaggattccctccagtaagtaagcggccgacaagggggcggttacttccggaagattaaaatacatccggtaaaatcccgccatggggtccgccatggaatatcccagcattccccccgccagaccgccggccaggccggtcaccgcaccgaagcccatatagtgaagccgtatctttttcaaaggaatcccgagagccatcagcgttccgatctgggtccgctgctgctccaccatgcggctctgggtgatatagaggatcactcctgccacagccaaaaacagaaacggaaccacgccggacatcttttccagctgcttaatctcctcatccaccatggaaacagccagctggtcttcactggcaaaatgggatataagaccgtatggggtcagcgcctgctccacctgatccttcacatcttcccacatactcccgggcgccatccggaacaaaaagctgttggcgtggccttcctggccgtaaagctgcgccagtgtccggtaagaggtaaaggcggcgtcatacacggccggacttgggaacagctcattcatattgcgtatcatataaatattttccggcgtcagaccaatccccgtgatctccatgggaatccgttttccccccacgatgatctctaccgtatcgcccggatttaaatttctggcctttgccatgccgtcgccgatgacaatctccctctttccctccgcaggcagactgcctctggaaagtaccggccggttcatctttccgtcggtccaggacgcaagatgcagctccacatccccgtcgaagccgtacacacggacgtccttaacgagacgcggttccacggcgtagattccgggaatcatgttcaggataccggcttcagagaccggcgaatccgtaacctctgcaaacccgtcacagaaatcagactgggaaaagaataagtcccgcgattcgacaagattatcgtaacagagttccagcacagtgaaaccgcagaaaccgatggccacaatcagaatacagagaagataggccgctctggatctcttcatgtcgcgaatcattttcttccataaaagcttcgtcataacgcccctttccgctgcctaccagtcaagctcctccgcccggcacggatgctcattgaccgtgatccgttccagtctcccgtccttcatgtgaaatacacggtctgccaccctggccatctcggcattgtgggtgatggtcatgaccgggcagtttaagttctttcccacttccagaagcagctttacgatggccacgctgtttttgctgtccagcgccccggtgggttcatcacagagaagcagatccggcttcttgacaatggcccgggcaatagagacccgctgctgctcgccgccggataactgggccggaaaatgcttctctcttccctccagccccaccatggtgagcacttcggccggatccatgtgttccttcacgatgctggcagccagttccacattttccttcgcagtcagggacggaatcaggttgaaaaactggaacacaaagccgaccacatccttccggtaatcagacagctgatccggagtacagccagtcagcagcttctctttataccagatttcgcctcccgcaggctggtccataccgcctgcaatattcaaaagtgtgctttttcccgaacctgacggtcccagcaccacgataaattctccctgctccacctcgaaggagacgtcctttaaggcgtctactgcaacgccctccccctcatatctgacggataaatgttccgccctgattaccggttttcccataatcctccttccggctctgtgtcctggtactcctctttataagcaatctgcttcagccatttctcccagacacagaatttcttcataacttcgtcaagcgaagcggaaagctctgactttctcctgttatagaggaacccttccgtcatccaggtcagcatctcatacacctcctgaggcgagacctccggcttaaacttggtgtagtctatatttttaaaatactcctgtaaagtcatgtttaccgcatgcttctgcatcagcttccccgtcactgcccatgacctggttcataatcagcttcgcacagtaatcaaataaatataaatacagagacttcttattatgaaaatagtagaataaaagccctttggatatcccggcttttctggcgatctcatccgtcaccgcatgtttgtaatcgttcttcgaaaatacctccagcccggcattgatgatgcgcatctgtttttcctgcggcagatcgtaaaactgttcattcatcttcctgacccccttaacctgtctggtttaaccaatccggtcattttcattgtacctcattgactatattttacaacccctaaaagccggacagatggtcattttttctcaaaagcgccgacacaaaaaaggccggccccggctgctgttctcctgacatggcacggtcgggaacggaaccggaccgcacatctgcaaaatgctgaaactcctgtggaaatttaaatggatttatgatacaatcggtaggtattatgggctaaaactcatattatttcatgactcagcggcattttggggatccatccccatggaatacgtctgccacgaacatagattctaaagaataaaaaaggggtacaaacatgaaaatcggatttgacaacaacaaatatttgcagctacagtctgagcatatcaggaaacggattaaccagttcggtgacaaactgtatctggagttcggcgggaaattattcgacgattaccacgcctccagagttcttcccggctttgcgcctgacagtaagctccgcatgctgctgcagcttgcagatcaggctgagatcgtcatcgccatcaatgccgcggacatcgaaaagaataagatccgccatgacctgggcattacctacgacgtggatgtccttcgcctgatccagtcctttaccgaccagggactctatgtcggaagtgttgtcatcacccagtactccggccagaagtccgccgatatcttcaaaagcaagctggagaaaatcggcgtgcgcgtctaccgccattacatcattgacggttatccgagcaacgtctctctcatcgtgagcgacgagggatatggaagaaacgattacatcgagacgacaaaaccgttagtcatcatcacggctcccggaccaggcagcggaaagatggccacctgcctctcccagctctaccatgaaaacaaacgcgggatacaggccggctatgcaaaattcgagacctttccgatctggaatattccgctgaagcatccggtaaacttagcgtacgaggcggctactgccgacttaaacgatgtcaatatgatcgatcccttccatctcgacgcctacggtgtcactacagtgaattataaccgcgacgtggagatattcccggttctcagcgccatcttcgagggaatctacggggaatgcccgtacaaatcccctaccgatatgggagtcaacatggttggctgctgtatcgtggacgacgaggcatgcgtggaggcctcccgccaggagattatccggcgctattatcaggcgctctcccgcctcgccaaggacatgggcagcaaggaagaggtttataaaatcgagcttctgatgaaacaggccaagatcaccaccgctgccagacgggtggtcggagccgccaacgaacgcgcggaacggaccggttatccggcggcggctctggagctggacgatggcaccatcatcacgggaaaaaccacaaacctgctgggcgcttcggccgctctcctgttaaacgccgttaaggttctgggaaatatcccccatgacatgcatttaattgcaccatccgccatcgagccgattcagaagctgaaggtcaattatctcggcagcaaaaatccgcggcttcacaccgatgaggtactgatcgccttatctgccagtgctgccacggaccataatgcccagatcgcgctggaacagcttccaaagctgaagggctgtgaagttcacacctcggttctgctttccgatgtggatgtgaagattttcaagaagcttggcgtcaatctgacctgcgaaccgatttatgaggagaaaaaaatttaccattaaaagaaaggacaccgtaactgtcagcggctcccactgacactgcggtgtctttttctttatgaaagcggtattttccgcctcaatctgtcttctataaagccgattcccatttaatccgaaacagcagaaccagggagattgccgccgccatgtaattggaaaaaagatttccccagaacacggagtaataagccagaaagctttctgttgcaaggataaataaatatcttaaaagccagattcgcaggagccccaccaccatgggaaccttcgtccttcccagtccgataaatgccccctgaaccaccatacagatgccgaatccgaccacagaatacgtataaatatgtaaagcatggtccgcgatctccagtacatccggctgtctcgtaaacagagttgtcaaatgggaggatgccggtacgatgacggagatgataaggacggctgtaatcatactggccacacagccggtcagcgtacatttctttgcccgtggtccctgtcccgcgcccacattcatgctcaccatggttgtgatagcggaaccgaaagagctgggaaggttgaagcataccgacgtgatattattggcaatcccctgaccgttcaacacgacgggcccgtatttctgcgtttcattattgatcagaaaaaatccaaaattcagcatgaggctggtaatcatggccggaatgcccacgcgaaccagctggtggatcaacactccgtcgaaatgaaagccttttaatgtcagctgattatctcctttctggagaaacagctcataaaacatccagatgcagatcagcacattggcacagagcgacgccaggacacagcccacaatccccagatttaaccagacaatgaaaacgacattaaaaataactttcaataccagcatcagaaccatccggataaaagtcgcttccggccgtccggtggcgttcataattgcattatagatactttccaggaaggagaatggaagaaccatggcgtataaagcgatatacagccagacgttatgagatatttcctgattgacatgacccgatatcgggaacgcgatcagcacaagaagcggtgcaatacacagaccgaggcagaaggcaaacacgaccgtctgggtgctgatatgctttacccgtttaaaatccccctgaccgaaggtctgcccgatcacagccatggccgccacacttaggccctgcgccagcgccgtcatcatattgataatcggttcactgtaggtgacggcacttgccaccagtgttcccgccacattgttgataaaaagcccatcagacaacggcatgagggactggacaacactcatcatcaaagttggcattgacagcatcataagggtctttacgatattaccgttcagtatcagatcacggcgttcgaccgggcccgttttcagtatttttgttttcatctttcttacacaccactttctgcatcatttcataatttcataaatccctactatagcacaatttgatccgttctgcatactgtccttctatttttaacgctttattatcatttgtaaaatcggcgttaagcttttttgtttttatagatttttcctgtcaattcggtataatcgaagaaaaggaaatttaaaatccatgtaaaatgaaggatcaatgtaaaaaagtgaggtatgaaatgaatgaggtaacgatcaccatatccgactttttaaccggactctcatccagcccggcgtttgccgttacaacggtgctgacgctgggcgttattctggtaaacggttggacagacgctcccaatgccattgcaacctgtgtttccacacgggccatctccgccaggcacgccatattgatggcggctgtctttaattttctcggagtctttctcatgaccatgattaactccagtgtggcttccaccatctacaatatggtcgatttcggcggcgacagccacgaggctctgatcgctctctgtgccggactgaccgccatcgtcacatgggccacggcagcctggtggtttggtattcctaccagcgaaagccatgctctcatcgccggtctgtcaggagctgcaattgctctccacaatggtgtggatggcatcaacggatccgaatggatcaaggtcttatacggtctcctgctctccacatttctcggttttatcttcggctggctaagtgtccgtctggtagaacttctctttcggaaccgggacaggcgaaagacaaaccggttcttcgaaggtgcacagatcgccggcggtgccgccatggccttcatgcacggtgcccaggacggtcagaaattcatgggagtgttcctgctgggcctgttcctggcccagggaaacgcaggctccgggcatttctcgattccggtctggcttatgattctctgcagtctggtcatggctgccggaacttcgatcggcggttaccggatcatcaaagccgtcggcatggatatggtgaagttggaaaaatatcagggatttgcggcagatttagccggcgccggctgtcttctgctctcctccgcagcgggaatccccgtatccaccactcacacaaagaccactgccatcatgggcgtcggagccgccaaacgcatctcctgtgttgactggggtgttgtaaaagagatggtccttacctgggtgctcacctttcccggatgcggtatcatcggatttttaatggcaaaactgtttctggcggtcttctaagctgcatcgtgattcaagacctttgccccgctgcgatatcattttaatctgtataataagagaggagcctgcaaaatgacaggaaaacgcgattacttatatttcgaactgtttcaggagggcgttcgttacgctatggaagccgccgctctgctgcacagggatctggaacacttcgattcttccggactggatgaacagattgatgccatgcatcagctggagcaccaggcggatttaaccaaacatcaggcaatggaaaagctgatccgggaatttatcactcccctggagcgtgaggatattctcagtctgaccagcgccatcgacgatgtgacggacagcatcgaggatgtacttctacgcctctatatgtttaacattcgcaccctgcgtccggacgccctggaattttccaaaattataaccgactgctgccatgcgctgctggatctgatggaagagtttccaaattttcgcaaatcgaaatcaatcaaagacaaaatcatcgaaatcaatcatttagaggaggtcggtgacaaactctacacggaagccatacaccgccttcacacagaacagacggaagccgccacactgctggcctggactaccatctacgagcgtttcgagaaatgctgtgacaggtgtgaggacgtggccgattcggtagaactcgtcatactgaaaaacagctgaaggcagtttacacggtactgcctttcttttttgcaaaatattcctcattatacaaaacagccggattatccggctttttcgctttggctttttcgtgatattccaaagccttcgcgttctctcccagacggtcatagcagacacaaagctggatatccgggataaaatcgtgacagtccggatttacaaaagctccgcttttttcgtccgtcacctgccccttggcctgcagataccaataaactgcctgttttaagtactgccggtcccgatttcccctctctaaaaaccattttccaatggcacagcagatttccggacggggctcatcataacgaaagctcccaaacagggcagtcagcgcttcctccgattttccaagcttcataagacactcggaaagattgagacaggcgcttatattgttttccccccaaccgttcccttccttaagaaaggtttccagtatccgggccgcttcctcataccttgcgtggtaatacagttctcttccatagtaaaactgatgcctcggttccagttttctgccgctgtccaccatattttcatagatttttaagttgcggtccggatctgagggatgaatctttctgtgacagacggcagcatcgccataaatgatttttcccgccggtgcaataacttcatgaacagccccctgccatataaaatgacttttcctgcgcagaagacgttcccggtaatatgccatggccggacttccatggctgtcaaacgccacatgatatggaagcatgattacgtcgggggtagaatccggcccatcctctgcgttctctttctgccgggtatttaatgtattcttcatctgaaggaatttctctctgtcctcttcctccatcacatcatccgcatccagccacatctggtaatccatagtggcttttgagaatgaaaaattgcgggcagcggcaaaatcatcgatccacgtgaagtcataaacgtgatccgtgtatctggcggctatttccctggttttatcctgagatcccgtatccacaatgatgatctcatcaacaaggctgcttacactgtcaaggcaccttgccaagacatcctcctcatttcgtacaatcatacataagctgaccgttatcataccaactgctttcccggattccggtcaccggaattccgtcattcttttcccattatcatatgcagaaatctgccggaacggtcccccgccccggcagatttctcttgcgaatccctcactgatactttaatctccaagacgaagaaccgtcatggataaatcatcgacagtaaatccatcctgatctgtaatgacctgaatgattgacggggtggccgatacctggaacggaacgtggaacgacaaggtagcaacttccgtcgaggctgaaaaggtgtgacggactgtcgatccgatcacatcgtatccatttagcagcatgcggaccatcagtgacgccggaatctgggtccccggattgaccgaaactgttccctgaaatactgcctggtaaatccccggctgactgatatcaatatcggaagagccgggctgatgtgtgataaacgtccctgatacaagaggcgtatcatagaacacaaggggaccgccaggtatggtctgctgccccgaagtgtctaccgtggcaagtacctccggtgcgcctccgccgcctgttacaccgcgcggaatcacaaaatcaaacacggcatcattttcatctcctgagttagtgacttccgcctgggtccccggttctcctgttatcacggttccgatgctgatagtggccgcggctcccgtcggaccggtttctccggtggctcccgtctcccccatagggcctgtcgctccggtctcgccggtctcaccggtcgctccggtggctccggcagcacctgttgctcctgtagctcccgcagcgccttccgctcccgtatttccccgcgggatcacaaaatcaagaatgtgatcacttcctgtgccaacatctgttacggaagccggggttcccggttcagccgttatcgtgctgcgtatggtaatcgtatctgacgcacctgctgctcccgtagcaccggtggctcctgtgactccggcagcacctgtttctccctttatcccctgcggaccttcgcttccctgtggaatcacgaattccaaaaccgcgtcctgatcggttcccacattcgttacactggcaggactccccggcgcaccagtgatggtatctcccactcttacggaacatctgcacgtctgtggagggcacggcggggggcagggcggaggacagggcgggggacagggcgaagggcatgacgggggacagggcgaagaacatgacgggggacagggtgttgggtacggacatgagggacggtatgatgactgtgctgtttgtcctgatggataaaaccttctctgtccaggctgcggattttgataataattgttttcataatgattcatataatctttccttctttccgacttctggcaatgagtgccatataatatgataaacggatctgtgaactgatgcaggaaactcctgatactaacataatacgtaaaaaaactgatgatgtgaacatgctttgctgagccagtaagccttatacaaaatccccgaagatacgctgacctccaaaagttaaactttttttgagtcaatcatattctccggggattttattatttgttcttttaacttttacagaaaagtatccttattatttatccgtcacgattccaatcctcactgatcatcttaaggtatttaagatacattactgtaaatgatggggcttctctttctccaccagatcggctggtgcgatggttcctgcatcaaaaatcggatttacgttctcgtcacggtaatcggaacagtagttccgtcgtctaatgttatactgcctcctgtaaccgcaccggtaccggcatccaccgttagattcagtgaagtaacagttgatccggctgggccagttggaccagtcgctccagcggctccggttgggccggttgctccatccgccccggttgggccggttgctccggcggctccggttgggccagttgctccatctgccccggtcgggccagttgctccggcggctccggttgggccggttgctccagcggctccggttgggccagttgctccatctgccccagtcgggccagtcgctccagcggctccggttgggccggttactccatccgccccggttgggccagttactccatctgccccagtcggaccagttactccagcggctccagttgggccagttgctccagcggctccagttgggccagttgctccagcggccccggttgggccagttgctccagcggccccggttgggccagttactccatctgctccggttgggccagttactccatctgccccagtcggcccagttgctccggcggccccagtcgggccagttgctccagcggctccggttgggccagttgctccagcggccccagtcggaccggttactcccgcagccccagttgggccggttgctcccgcagctccagttgggccagttgcccccgcggccccggtcgctccagtccctcccgcagctccagtcgggccggtcggacctgccggaattgtaaacagaagctgtgcgccttcctgcgtgaacgtctcatcaacgcctgcctgcgtaccaggatttccagttacggttcctgctacagtaattctgggagaaacaccatcccggcctgctgctcctgtaataccggttgctccggttgcacctcttgctcctgtcggtcccatcggccccatgattcctgccgcgcctgttgctcctgtaacacctggaagcccctggagcccggttaccccctggggtccctgtggacctgttatccccctttgcccctgcgggccggttgctccctgaaaccctcttggtccctgaaccccctgcgggcccggataaccttgtactccctgcggaccggtcgctccctgcgggcctctgggccccggaaatccctgcgggccctgcggacctggaagtcccggaattccctgtggcccccttggtccctgtggcccgggcaccggacgacagcagccataattattgttgttattacaacactgtcctccacagcgggaagcattctgcaaatcggcactgttagcatcattcgtaccgcagggagtctgcagtccgttaaaacggtcctgcatcccttcctgcatgttgttcccgaaaccggggataccaaacggacctcccgccataggataatatctataattcatataaaacctcctaaattctatttccactattattctatgtccaactcaggtaaagagttcaatggctgccgttccgtgataccgctcccgaaagtaatcctttaatagtcgctgccacccgtctaacgggtggctcgcgcttcggctataagcctttgttactaggccagcgtctcaaggcgctggctttcacttcgttcaagccactttgtgcttttacctctgttgccgccccttcaaggggctatctgaataccgactaacccctaaaggggtcttcatattctttcacactcaatttgtccagcatgatatctgccttctcctgatcttgtatatacttctttatggtgtcttcgtttaatcccactgtgcttacgtagtatccttctgaccagaaatgacgattcccgaacttgtactttaagttggcatgacggtcaaacatcattaatgctgactttcctttcaaatagcccataaaactggatacgcttatcttgggtgggatactcaccaggatatgcacatgatccggcattaatttcccctccagtatctgaacacccttataattacataattgttttatgatatctctcaggtcttctttatattgattatagatcacttttcgtctatacttaggggtgaagacgatatgatacttgcacatccactttgtatgcgctaattcattggctttcttcgccataaaatcactctcctttttaatagtggcttggacacctctattatatcaggctgagtgatttttggtataaccaacaccgcgcacccgcatagcgggtggtttctatttcgcgcgcttcgcgcactcaactgggtctatccgacccacaacaaaaaggaccgccgtcaccagcagtccttttttcatcatatcttttcaaatctctccacgtccgttacaaatatagttgctccgccaagttcaaccgtcattggcatcatcatatatcccgctgatatcgatgcgatattcggtgccggaacattacaggtaatcttctgtctctttccgcaggtatccttaattaaattaattacctcctcaaccttgtcgtcattcgtaccaatcatcagggtagagttgcctttcttcaaaaaaccgcctgtagtagccaattttgttacgctgaagctgttttcattcagtacatctgtcacacggtttccatcatcggaactgacaattgcataaactatcttcatctcaatcacctcgttgtctttcttggcaaatatataagctggttctattataaagcataatcgggaaaaataaaacagcaaatcacaaaataattatcaattttctgttaatatctaacagttcagacggctcatcttttctgcaagctttcgataaatccatgtctgcatccatggttcctttgatgcattgatcccatcttctgttaaaaaccagcgtaccccactgttttcatcctctttttcatgcagaactgcgtcttcatccgcctccagcagataggtcacattcaaatgaagatgagacggcacatagctgccattcttcatatgacctgacacagtcagaatctcaatggaaaagatgtcttccatgacaggccgcacaaagcgaagcccgctctcttccatcacctctttctcagccaccagaagcagattcttttctccatccgcgtgaccgccaagccaggcccatgaatcataaatattgtgatatgccatcacaatcttactgcgcgcacggtttgtcacccatgcagaggcagtcatatgggcatctttgctttccctcgtatacaccagatctccccgttccagaaaatacagaatctgttccctgtctttttcttcctgttcattaaatggtttgtaattccttaacgcatcccgtaaatccatccgtttttcctccagctgccactttttttattttccagtcatacctcgtctttttttgcttatatatggaataagacattatttaacgaggatatttcatggatataacaacatttcacttttcagatcatactccatacccacccgttaaggtagacggaaaaaacccccagtatgcagccgctattctttccaatatcggttcctgcaattccgagatgaccgcggtcagtctttacttttataacagcctgattaccagggaacattatcaggaaatcgccgaatgctttaaccggatcagtgtggtagaaatgcatcatctcgatatcttcggcgaactggcattgaagctgggaaccgacccgcggttatggagctataacaaaggccgtatgtattactggtgccccggctgcaatcagtatccgactcagattaacgcgctgctcaccaatgcgctcgccggggaactggaggccctccgcaagtaccatgcccaatccgaatggattgaagacggacacgtccgggccattttaaaccgcatcattgcggatgaagaactccatgtccatatatttcgttcccttttgaccgagctttccatacccgaaacggctccggccgaatcccaggagcagacctgcccggatcttacataatatgtttctttgtttcctgatccagtctggcacgcagtgcggccatcctcccatcttccttaaaataggaggcgccgtactgcaaattaaattcataatcaaagtcagggggatttatcccctgattgtgctgcaaaatggtttccgccttatcaagagccttcaccagatgagcctcaggagtactgttctcattatactccctccagaccgccataaaatactcacgttccttttccgggagaaatgaaaacaaccgttccacagaccgctgctccccggcatgcttctgctgctcatccggcagcagagcggcagagatatcgccgtcgtacagttcccccagatcatggatcagacacataaaaagcaccctttttccatccagttcaggataatcacccaacagcagagcggcaaagagggccagcctccagctgtgttccgccgtactctcctgtctccctgtagacccccacgccgtgcgaagtacattttttaaaagttctgtctcctttataaaattcagatactggtcgagacgttcctctcccatctgctgattctccatcagtcatcctccattctgatttctacgccctcctgatgcctcttctccatctgatgccggttctttcgattttccactgtatcgaaaataatggaaaaatcgtagccttccggatagagttcttccgctgcaacctggagttttatccgtttatggttaatccagatcttccggtcctgcagctgtacctggagaacgcccttctcgtttactgttctgcatacaatccccgtctttttatccggcagcaccaggacgctgtcaccaaccgcatattttacagccagttccttctggtgtcccttttcctccttctgcttccgaatacgcgggccttccggaagaatgacgtttttcctctttttgcccccgccttcctcctggagccgttccggtttcagactgccataggcagcctgctccgcccttaaaagcatggcgtccggcatgcctaattttttagcaataaacagagcacagctttctcccgcttccccctgcaccagacggtaaagcggctgcagagtctcccggtcaaatgccattctcgcattctcaattccatcggcggcctccgcatatcccttcacttccgggtaatgggtcgtaaccaggaacaggcagccgcactgcctcaggctctccagtatggcaatcgcaatgcccatcccttccgcgggatccgtaccggacccgagttcatccagaagcaccagactctccggtcctgctttcttcaaaatatcaagtacgtttgtaatatgggcggaaaacgtggacagattctcagagagattctgcccgtctccaatatcacacagcaccagattattcatacaaagaacggcttcttcacacggtacatggagcccgcactgcgccataatacagaacagtccaaccgttttcatcgtcaccgtcttgcctcctgtattcggccctgtaatcacgacacctttcccccgttctccgagttcgaagcttaaaggtaccgcttcttcccgacgcatcagcgggtgccttccgtttttgattcggatgttccgttccgtgttaatctgcggttcttttgcgtccatggcagcactgagctttcctttggcaaagataaagtccagtttttcaatcagccttttgtcggcttcaaaaacttcctgattttccgcaatcatggctgtcagttcgtagagaattcttctcgtttcattctcttcctcaatcttcagcagctccagttcggaattcaaagaggcaaccgcctccggttcaataaacagagtcgctcccgtagcagacttatcaatcacgcttcccggcactgatgaccggtattcctttttcacaggcaggcacatcttaccgttgcggctcgtcacataatgatctgcaaaacacaccttcttgctttttaagatcgaatccgctttagcccgtaccttttcctccatacgaatcatatcctgccgcagactcttcagcaggcggctggctccatcttcaaccctgcctcctctgacagcttccgcaagctgttccctcacatgctccaaaggatccagttcttcatcataacaggccagacctgtattcaagtatctgcaccggctcaaaaagtccttcaaacgttttaccgccgtcagcgtcataccgaccgattccagctgctcggctgtcagacagccgtcctgtccgataacgattaaaatatcatccacgtcacccatcgaggcaatcggcggcagccccgcactttctatgatccgtctcgcttctgacgtatctttctggcttttcctcacatcgccctcgtacagatacggctcaaggtctcgtatcttctcttttgccgactttgtgcaggccagttcctccagttgtcttactatacggtcaaattctaatgtatgaaatgtgttgttcattgttctttctcctgtcttttattccattactaatcagtaagccaggcagcatcagaaaaagaggggagagctttttgtgtcatgaaaccactaaaaaactgcaggatcatagagctgtctatgttcctgcagataacgattcattctttacgtgtatatcactgccgctcacatctctatggtccaaacaggtacacaaaatagaaggaagattctgccctgcaaaatcaatcttctctcagactgttcctgttcccgctattctctttctatgcgccatattcagatgcaattaacaaacacacacttccaatcatttttatttatcgtaactatatcatgtcaccctgcaaatgtcaacggaatttccttccatcttcggcccagcaggttacgattcgcgtaacggtttcccatccagtacagcctcggtcagtcgttccccctcatagcaaagctttaatgaaaagaacggctggttgtcccggagcaatttgaaaaagatcagatcgccttcccacagattcaattccccaattctgtcttttttgatccactccaggcaaccttcccggcattctccgatggttccttcatagcggtctgccgtatacaggcacatatactcttccggaaaacagtctgagacaaacgttataaggccgcgaaaacgccatcttaacagggtaagtccggtctcttccctcacctcccgaagcaggcattcctccggactttcccccttttcaaaatggccgcctacccccagccatttatcgcgattcatatctccttctttttttacccggtgcagcatcagatagctgtcctcacattcaatatagcaaagggttgtaaaatttgtatttggcatgaaatttggtacctcttctaaaaaattattcttctggatcctcatcgttccagaattgacaaacgtacacggtctaccatgacagaagtatagtctacggtgtttaaataatccagaatctcctgcttctttccggaaatacagtaattcttcgtggtcagcactgcctgcttcgcggtctgatccagcaaattctttatcggttccaccgttgttggagcctggaaataccgaccttcgcttcccatacgaagtcccagcgcattcagcagcttcggctgggacagcagatattctaaattccccagatactcctgttttatctcttcatctgtcatctccacacggtcgcgttctccttcccccagaatgctctttctgatcgtgagaccgccgcggatctccccgtcttcgctataaatctccacccagttcacctggacaggcgcagcaatcacttcggataccggtttttcctctcttgcactgagcgatacatgtatgatgctggaatccggaagctcctccagttcttccatcagtgcagctttatcctcctcgctcatcagtccatagccgtaacggctcgcggttacagtcgtaaggcgctggggatcctcgactccaatcgttccccacttgacattcagcctgacattaggaggaagccccacatagatgggaccgctggtgtccatgacccccatgtcaattgcataacgtccaaaacccagatccttcaggctggaatcatacacggttacatatggctgcgctgtctcataataaattctcatgtactttgtaaattcattctcatacgctgcatcatccgatgtaaacaaggggcgcggatcaaaactgcagaacttcatcaccgggttaataatcagcagcagtaccgcggccgccatgataactgcaaagagtgtgcgaaggctgattctcgtaattcttctgttaatctgccgttcgatctgcttttccagacctgtgtcctccatggcattccaatccggcagttcattcaagccatctgccagttcatcaaaatccttcatgttcttccacctccaataacctcatgacctgtttctttgcgcgtgaccggatctgccgaacgttctcctttgtaatccccatggacttcccaatctcctcgtcgctcaaatgaaaatagatcgaatccagcagtacttccttataatggaccgggagcttcataatcgcttccagtaaaagacgtctctcctcatcctgaatcagtccctccagggtatgatcttcttccctgagaagagagaaatcaaagcgcccctcatctaccagccggttacgcttcttccacaggttaaaatactcattcttcaaaaccctggtaagccagtaacgcagactcccgcctccctcataagacagcagcgctttcaaaaatgtggactgcaccagatcctctgcatccgcccggttgccggaaagagacagcgcatagacataaagcggcctgtaaaactgcctgtatacagctgtaaactcatcctgttccatgcccatcccctccttctgactataaaacaattccggcggatatttgtgacacttcgggtgaaaaaaattcaaacaattaattggtaattctcgtatcctcgttcagcccttcttttgtctctggaacatctcccgccggcccggtcacttccagagagatcacacagtttgtttcttttccgtcatagaataccggaatctggtaaatccccttctcctcccagttacagccgctcatagaaaatgtgaatttcgataaatcatagtcctctccggaaaaataattttctgcactgatatccggttcatgtccagctgccgtctctgcataaaacgtggttctcgtcccctgatcaaacagcggatcgttctttccggtcaggcttccgtataatgccgccgcaataatcaccagcacaatcgcgctgaacagtgtaatatgaatttttttcatttttttcctccctgcattccaaacggtccgaaacatcagatccctgctccggccgaaagttcagtgttttcattataaacatttgctttactgatgtaaagtttcgtggtatattttttaggaactgtctggaaaaacaaaagaatataagaattgaaggttatgaaaatgaatacgaacgcgattcaatggaaaaatggtttaaaagacggaattcccatctgtctcggatactttgcagtgtcctttactttcggcatcatggcctccggcgccggtctttctccgtggcaggccgtcgtcatgtcctttacgaatctcacatcagcggggcaattcgcagcgctgggaattatcgctgcgaaagcgccgtttatggaaatggcggcagcacaatttatcatcaatctgcgttattgcctcatgtcctgctctctttcccagaagctggacgataaaacgccattttttcaccgtttcctgattggatacggtgttaccgatgagattttcggggtctccgtctgcagacccggaaggctgaacccattcttcagctatggcctgattggcgctgccgtgccgggatggactctgggtacgcttctcggtgcagtttccggtgatttcctgcctccccggattttgagtgctttaaatgttgctttatatggcatgtttctggctgtcattattcctccggctaagggaaaccggattctgtccggagttatcctggtatccatggtatgcagcctgatcgctgcagtgacaccggttttaaacacgatctcatcgggatttaaaatcatcattctgacgcttctgatcgcaggggcggccgcttatttatttccggtaaaagaaccagaggaggaacagcatgaataaccgtatttacttatatatacttgtcatggcgggagtcacctatctgattcgtgtgctcccactgaccctcataagaaaagaaattaaaaacacttatatccgctcatttttatattatgtgccgtatgtgacactgtcggtcatgaccttcccggcaatcttaactgccacggcaagtgtctggtccgccgtaacagccctggtcattgctattttcctggcttataaaggaaaaagtctgtttatcgtctcgctggctgcatgcacggccgtattcctgacagaattatttctgtaaagccggccgtctaaaaagctcagcccggccattcaaaataatgtttttcatgaattcctgcatgtgatattcatcatcaaagcttacttttatcgattcttctttcctttctccttccccattggaacagccgctgcgttccccggagtattccgggaaaagcatcaggtacggctgttccgacaccggatcaacctccttctgaatggctcgtatggagaacagatactccccctgccgttccgccgacaccttcatataactgatctcactcatgttcagcgaccaggaagactgctttaggtatgggtatctctcttccagaaacacaggatgtttccggtcttcttctgccagaaattcaaaaatcagtttcagcgtctcaccaggtatccgtgtatcggaagacagaagtgataactgacgaaacgtgacggcggcaccggcaagaaatctgtcattcacgcactgagtccggcagatagaatgaacagcgtcccgaacggacggacttttcagcagtgcagcaatggggatattcattcgttccagggttggacgctcccgcatgggccggcggttgtgatgatctgacgaagctttacaatgccgttctgaagaaataatcaatctgtacctccccttccgtgtatacatacaatccatacatcggtatcgtacagcacataacccgtctgcctcccggaatcaatatctgatatccgcggttggacagaatgcaggccggccgctttgattttgcaccgaatgaaatgtattttgccgttgttttcagatcaagccactgctgatcgacggctcctcttgcctttaaaacctcttttttagaccagtcaaaataagtccatgtctgatttttcggagaactggaaatctgcctcggcagcgagggactttcactgagaagtagcgtttctttatctgtgtagaaggaaatcccgcctgttttcttatcaatacgcaaaagcagttttccaaaccttacctctaccctgcttttgtcttccctatagttccattttactctggatgccgtttcaatctctgacggtatatcaggaagatgatccggcgcctcccctgcaaagctgatacgaaccgtgttctcggataccggtgtaatccgaagtaccccgaaagcatttgtcagctccagacagtctctatggccggtcacccagcgaacctcaggatttaaccgggaatgtcccaagggcctcagactattcgtgtccggaatccctccaaattcagatttttctatacggtttgcagtgtttttcatcttctctgcccgcttctcgtctatggaattctgaacaacgattctcttcggtccaatccggttgcggagctccatctcaaatttcccgtgggatacccgctccagttccagctccctgttggttttaggtttctcctcacgcacgcgcctgactggctgctcctgccgcaccacaacgtatttttgcttcttttcctccgatacggtgacagcaatcaagtctgtcagctttccggtgtaaagcaccgccagttcatgaagcgctctcgtagccgccacatacagcagccttgcaaagccatcctctgccggatagttcctgtcactggcattaaaaaggagaaccgcatcaaattccagacctttcgcatactcaatcggaagaaccatgactccgcttccaaactcttctgtctctgcatcaaattcccggattgctgctcttttcctgagttctttcgatactctgcgttcctcctcttcatctctgcaaattaccgcaattgtttcatatccattcttctgccattgtaaggcagtcttcgcagtctcgaggatcagctgttcctcatccttacactctgactttcggacttcatttccgtgacggataatcggttcaaccggatagattgggaaatttccgtgctgcaggatgttcgttgcaaaatcagagatctccactgtattgcggtagctttttctcagcaggccgaaataatcaaactctccaggaagcatcaggctccggagctcctcccagtctgtcaggccatagtcaaaatagatattctgagatacgtctcccataatggtgtacgtgcatttactaagacagtactttaatgcgccgtaggccatcatgccaaagtcctgagcctcatcgatcaccacatggcttgcctcctggatgacttctgtctccttgattcgtttgtacagatatgccagcgccgccaaatcatagagatcaaacgcatgaccgggtaagggaatctgattccccttattattttgctctgtcagaaagctgtcatacagttcaaaaacagaacccttccactcccgttttccaaaataggtctgataatacttaagaagagccttctgttcttccggcggatacgtatagtatcttccgtatatctcattctccagctttgccataagatgttccgtcagtttgttcagcttatcaggaagtgacaggaaatcaaacttatgaagcagctcttcaattgaactcctgctcatcagcagatggtgcgttttctctgtatagacatcttccctcggaatataactccactcataacgccggcaaaaatcttccagatcatgaaaccaggaatagctgccttttatacaggctgttttattctcccgatccagttttttaatggtatacttctgatcatcccagtcctcatacagaagacgtgtaaaaagctgttccatcgtcatctgtgaaaccccgtaaacatccagatccggcagaatcccagtgatatagttcaaaagaatccggttgcttccaataatgtagaaatcctttggctgaaattccagatcatagttgtaaagaatataggaaatgcggtgcatggccacagtagtcttaccggaaccggctcctccctgtacaatgacattatgctgcggtctcttacggatgatctcattctgctcctgctgaatcgttgcaataatatcatttaaaaccgtccgtttgtttttggcaagatatttggtcagcagttcatcattagccacgacgtcggaatcataaaagtccttcagttcgtcctgttcgatttcataggtgcgtttcctggagaggtcaatctcaaatgcaccttctccctttaccgaatacgtacatggtccaagcgaaccttcatagtaaaccgatgcgatcggcgctctccagtcgattacgaccagctccgcagcgtcttttgtaatcgccgcctttccaatgtagtagcactctttctttaacaaactggaatcagtaaaatcaattcttccgaaatacggtttttttctgcatcgctccatacggagcagttcctgcctgacctgctggaatctggcgtcggtattaaaccacagcgccaacccttctttatcctccgcatcgtagatttctttcagttcatgcagctcatctgcaaggttctgaacagacgattttacctgttttaaattcctgtctgcaatggcaaggatttctgaaagcgtccttctttcttcctccagggtgactcccggtatacgctttgtctgtgactgattcatgcctgtctcccttcttttccgtgctatggttcacagcctacgttactgtccactactatcttagcaaaaaaaagaaaaaatggtagacttgtaataaaaaattatgtataatggataatgaaatgtgccctgagagatgtcagggcatttcttatatctaagagacagcgctcctgtgattcctgatccgctttgtacgcagcactgtccgtccgggcggatcaggagccacctctaatgaccttccgagaaggtattaaaatcaaacagactcatctgttttcccatacccgggtcgcgctgttttcctgcattttcccgttctgtcacgtcctccggaatatcctttaaaaacggggatgcttcctgcgatgtgatcaaaatcaattcttcctttgcccgggtcatgcctacgtagaacagccgcctctcttcagcctcatcgatctcctgcctgccgctctccagcggtatcagcccttttctgactccgcacatcagaacgactggaaattccaggccttttgatccgtgaagagtcataagagttacagaatcggaagtatacgttttgcctccgcaccgctttaaatcactttcctgtccaaaggtcagattatccagaaattcctgcatattcttatagaaaaccgacatggcggccagcttagccaccccctcttcttcctgcaggttcatgtccgaaatccaggcctccagaaccttctgcggcttttccctttttatcttcttccggtatgtctccgccatcccatcgaaaatcccttcggatatgccatcctccggcagcttccacaacagcttcaggctgagacggcgcgccgcccgatcttccggatttaaaagtgccttgaaaaagcagatggttccccgcacagccggctccatcaggaaatcttccctgccggcaaccacataaggaattccttcttttttcaggcatgtttccagcagctccgcctgcctgttggtacggtacagtacggcaatctctgagaaacttcttactctgtgcccatctcccatttcctgatgcccctgtgcatccagcatatcgataccaccgatcagccggttaatctcttttgccgcaaagatatcctctgacatctcaccggctgctgtcaccagacgcaccggaacacctttccgtttctgcggaatcagcctccgcttctgtcccctgttttgtgaaatgacattggaggctgcatctaatatctgcggtgtagagcggtaattctgttccagacagatcgtggtcacgttcggccagtcttcttttagcttttcgaagcatctttcgtcagatccccggaacgaatagatcgcctgatcaggatcaccgatgacaaacagctctctccctcccttattccattcccggatcaaccggtactgcaccgggctgatatcctgaaattcatctaccagcaaataagaaaatccctgacgaagcgttttattctttccgtcctcttcgaaaagatggagtgtttccagaagcagatcgtcaaaatccaaaatcccctgctccttcagccttttctgatatgcctgatacgcctctttcgggcatgtctctgtttgtttctccagtccgcatttctctgcggagatctgccgcagaaactgtctggcggacagattcagctgcatttctgcaataatctcctctgcggtatccttcatctccacttcatcagccagtgtaaattccattcctgattttttcagtaaatcgtagcagatcgaatggaacgtgccgattctcatacggctcacaaaacgttttccacccaactgcccttccagacggctgtgcatctccctggctgcctgattggtgaatgtaactgcggtcagttccgtcggctttacccctctttccttcagaagatgaaaggcatgggataccagtgtttttgtctttccggttccaggccccgcaacaacatttatggcacgcccaatagctgtcactgcggcttcctgctgtaaattcaggccgggagccggctggtctgattccggctccgcttctttcccatggatcgcaccttctgccgctgcagtgcggacagcaacggcggcggaatcagcggcaacagcaacggcagtgcaatcggcaacaaccgcggcagccgtctccatgtgcgacagttccgccatctcggcacctgtaaagagactgagctgtccatcgatttcctcccgctccatctggtcaaataaacggatggtaccgtattctccgtcgtatcccgggaggcgctctacttttccttcacgcagcctgcggattccttccgccgtcagacggccggaaactttccggatatcttcgatcggaagctcccttaagatcgcaaattcggagcccagcgcggaaagcatgtcacggtactggttttccaccttccggctggccgccgaatgtccggtggaagcagcgatcacctccggcagcggaaccagactttcgaatgccttcgctcccggcagcacgaaaccttcttcccggtcagccagctgctccacgcgatgcgatacgcctatcgtcagcttccgaccacagacagggcatttcccggagtatttttctgcttccagagggcttaagcaaagatggcattttcgatggccgtcataatgatacttcccttcttccgggaagaattcgatggttcctgccaatccctcgcctgtctgtatcgccttctgaagtccttgataggacagctccatatcgagcaaattagcttccctgcccagctttgccggagaatgagcgtcggaattcgataccagctgatagctgtccagcgcggaaaggcgccagttcatgggcggatcagaggaaagccccgtttccatggcatgaatatacggtgtcaagtcttcatagcattcctctaccgtgtcaaaccctgaaaatgcaccgaacagggagaaatgcggagtccagatatgcgccgggatgtagatggattccgagttgagttccagcatgatttccaacagatcatggcagtccagccccagaatcgggcgcccatcggagtgaatattgccgattgtctccagctttcgtgacagacactcagccgcctccagtcctggcagaagaatcacgctgtgtacctttctaaccctgtcatgtttcttgtagatcgaactgatttctccagtaatcacaaagcgcggcgtaaccgaagcccccaccgtctcatctttaatccggtattcctctttcagcacgtaaagcccatcctccgccggctccagcttctcctccagctccttgcgccaggccggatgggtaaagtctccggtgccgacaatggaaatcccttttctcctggcccataaatccaggtattccggtgtgcagtccctgctcgttgctctcgaatatctggaatgaatatgtaaatccgcaatatacatcatttttcacctgcttcttgtcaatatatggtatattatagccttctttggcggacggcgcaagaaggtttcatggtagaagttcccatgaaacagaagcgtgtaaaataacactggcaaaacatggcgatctttgatacaataaaactattctatgataaaggcgtggataatcgaatgaaagcctatattcctacatatttaaagaaacaaaatcgcaccactgtgctggatctttttttagaacataaagagcttacccgtgcagacgtttccaaattgaccggcatcagtcttcctactgttttaaaaatcgtggattttttacgtatgaaacagattcttattgataagccggatgcattgactctttcagacagtggtctgggcagaaagagtcagctgcttcagctaaatgaagattcgtacagtaccattggtatctattttgagggaaactatctgcatgttggactgatcaatttggcctactcaattattgaccagaaagcatttccccttaattccctgaaagtatcggaagaccatttctcgtccctttcttatatgcttgtagatactgttcgctacttatgttcccagcatccaacaacagaaattttagggattggattcggtttacctggaatagtcgactatctgaataaaaagattatgaaaaagaattaccagttctttatagaattttatgatctctttccagctttcaaggaattaaaagagttccctctgtttatagaaaatgatattaacgccgcatcacttggagaaattcttcttaggaaccgatcccacaatggcaatcttatctatctgtctttgggaagcggcttcggaagtggcattattattgacggtgaaatctggcacggggctaataattttgcaggtgatatcagtaactccattcttgtccttccgaaaccttcatctgcggtatctccggaagacctgcgggtggaaaagaatgtatgtctggaaacactgcaaaaacaatttgattttgacatacgctataaagaaacatgtgatgaccggaaaagggaaaagatctgccagtacctcagctattatttgattccgctggtaaataatctaagctatactctcgatatttcagattttgtgctcgcaggtcttaccacgaattttttaggaaaggaactgtttactaaactggaaaagggtctggaagccctcagaacgcctgccattctgggacctgaaacacatatcatgccgaccatcagcgacagcactggcatcgtcggggccgctgcaatcgcgttttccaactgtctgccaaagctgctggaagaaaatgtataattcaatacatctcctgtcacaacaaagctgcaacactttataagtgctgcagccttgttcttgtcccgctcatactgaccatattcacaattactgtttatcgtccataaacttcttttatctgttccaattttccatcaggaatcaatactgcataataaggccgcctcgcctccctgatctctccctttatttcaatctcctctcccaaaatgatctcccggtcaaaatcacaacaggtaagattaatcatattcagtttaatccttgctcttccgctgccctgtgttctgatcacaagagttacttcattgccttctttcctcgcctttatctgataatcataaaacggcgcatccaggcgataggaacgtgaagccagcaaagtcatatgttttatctgaccacagcagcaaatctcgtaattccccgccggtaattctccttcataccagcccgtttcggaattgacagacagctcatagatacagccataatccatattggtaaaaagtactttcccatttttctgcggcatgattccgctgatttttgctcctccatgcagatcggatgccagccagatccattgaagaaccgaacgaatccatacctccttataaacgcaggtattgacctgtggccagaatggagaatcatgttcatccagtgttgcaaatccaactcccagttccccaaccatttctcccggcagtactgcatattcctgacaataatcatacccttctccaaacatcacggattctgcaaacggattttttccggatatccactcaaactgccgttgcgccagttcagcaagtgcataatcattttttgcggctgcagcgcaggccacaccttttcctcccgccagtgtcacatcgtgatttcctctatgttcaaatgctaccggttcacggcgcagataatacccatttcccagcggtactccgttttgaacctgaagacggtaattctctctgcgctcgtcatcggttaaatactttttaatcatgcccatatcatattcgttatcgtgcatcgcctcatcctcgtgatagatggaagcaggcactacatagtatggcgctgttgcttcactagcattctgaatataatcactgtacaggttaacagcatacatccattttccaaagttttcatgatccggcatgcaggcagccagacgagccagcgactgtattggttcattatcatggcttctatgactgcagtgagcaatcagcttatggcttgcatcatcgtagaaaaagccaacatacggtgtatcccaatctgttatctcctgctgctgacaggcaatgatttcatctgcaaagcagattgccatatcccgataataaacctcctccgtagccttatataaatctacagcagaccagcaggcagccgatgatttcagcagaggggtgcaaatacggttggggtcatcaaatttacaaaagtccggcatctcgcgatttgtatatgcaaaattccagtcctcctttgcacatttcaggctgtatgcagccagctcgggctcaatctctctaagttccatataggcaagcgcctccgctccagcacacataaagttctctataggttccaatgcagcttcacggaaaatatcatcatcatctccaataataccgttcgtccaacaggatttactggaagatggcacacgatatccatcaccaaaccgtgttttaagaagccactccaatccccactttgcttcctccaatattcgttcaaataagggttcattatcacgaaccttatccagcagctcgaacaacgcgtatgtacactccgatgtattcgtcgtcacctgagtcatgtctccggcatcgtgccagcctccattcgcaatgattgatcgttctccatggcgaatggttacatcgtgatgacagctgtaatgtttccccggtacctcacagccacagcgctcacagaaaagaaaattaagggttttccatattgcatcttcccatatcccggttcctatgggaaaggaacgtgatacgacgcttccgcataccagcagatattctcctggagtctgtatttctgaaaaatcaaggacctggtgaactccattgctatcacactgcacttcaatttctttttccagcactgtgcgcccgctggcggtttccaccagtttaaaacttttcgcttccggttcatttacaacggcagtcttcatactgccggcctgatagcctgatcctgaaaatgcaatgcggtgttctcccggctgccagccttcatatacgtccaaatcctctggcgcaagcgtttccagcatgatatccgtaatataccagcatgctgtttctgtagcacctggctctccgcccaccatatcgtactcaaaactcaatcccagaacatcgtcccggtgaacgtagggaatttcgacagaaacatactgccactttccattcgtcatgttaacgttatgatgcccttccctgtcgtaacggtctggtaccggatgatctccgccattgcggaactgcatccgaaagctaatggagcggaatcctggcatatctgcataaacccagaaagagatccggtttatatgctcccaattttcatgatttactttacgtatcacctttggcacagtataaatccgtccaaaagcattgggccaatgatccagctttgttactgatgtaaatttcagtgaatttacacactgtcttgtatgttctttacttagttccattcttgcataaggaccttccgtctcccaatggtccagggaggtcagatcgtcaagcagtatacttgaaacaacccgtttacgaagacatctggtttcccgcatctcttcttcatgaatgcgcagtggacggtgaatattctttgactctttcaaatcctgcttaaaccactctctcatttattttctccattctcacttcattttcaatcctacagcatataaaaaccagctggcatgcggaagccactgttctgcccagcgccagttatcctgaatctccggatgttcgtccggattcatgacaaattcaattccttcttcatcctcaatgccgctcgtaataccatttacaatcccgcccggagcaccaataaaatcatactgattctggaaataataatcgatattgtgccgtccggccccttccagcatacatgtatcaaatggattcagtcccaacacccaggcgatctggtcatccgcataaatattcagcctttttgccaggtctaaatccctcgtcatagacgctgtatagcgggctgctgcagacagagacagaatacgggcattatctccctgccaccatggagccatctctgtattatgagggaagaaaaactgttttccccgatcaccgttcttatcctgataaaaaatccgggcataaccaaagggattcgacacttcatttgttatatgagctgcaaaacgcattgcactctcagcaatatttaaagctctgtcacggcaatttttatttttctcaatctgataataattcagcaatgccaccaccggcgtaccctcatcggttgcagaaaaatacggacgtcctttcccatccacactgaagtaccccattccatcttctaccaagacaaaatgtgacataacccgctccgccaattccctggcccgatttaaaaatccaacttccagagaagctttatagagttcaactgtcgcctccagtgcacaaaattcatccaatagattccatgccccgtcattcgtatagtgctcattgttcttttccaggtaaaaataggactctctggcagcgtttagatattcgatccctgtaaattcacaggacgggtatggataacgagaagccgctgcaagagctgcgatcgcatatcctccgccggaccggaaagaagtctcgtaatattcatctccaacattctccgtctgtgcagtctcggcagtaccgaactgagggctggaatgcttgtattcgaatccgatctcacgagtgatatctgttggatcataagcataattccggcatggacccactttaaaaaagcttcctgaaggtgccctccgccgcatcagccaatttgcaccataagatgcctcatccaacaaacgacggcaaaaaacagaataacatggattctcatttttttgcagtaaatctaataaccggtagaatactgcagctgagaatgacgcctgctgaggattaaaataagtcgtatgtgactgatgagtcatatgtacacctacatcaccggtggcatcaaaccagccaccatgaacatcaaatgttccctcacgtggtcccttaaacccaatattatggtccttaacctcccactctcccgtagcacgctgagatttgaaatagtacacaatgctagatagtgtggaatactctacaacggatccataaatctcaaatggggatgaaactacttctcctgcactggtttccacatccagcagataaaaactgctgtaattcttatgagcgtttggggcaaactcagtaaaatccatcacccagtaatcccccttgttccagcgggctacgggactgcttttttctgcttctccacagtagacttctatccctgacttttcctcgagaattttaaatccaagtacctgtatctcttcatctgactgaaagacagcttttttactaaaatcagaatcatagcctatttgattcattaaaattcgtttcacgaataaatctcctttcactaatacaataattgtgagatactgtgttaacctttgacagagccagccgtcagacctttgactacctgctcctgcagcacaacgtataataccagtagcggcagcattgtaaagaaaatagcggccatcatggcaccgtaatccgtaccgatcatactgctaaccatagacagtattacgctgactggctgcatcttccggttcgacaagtaggtaagggaagtaagtaaatcattgtatgaccagatgaataccatagttgctatggttgaatacatcggtacactcaagggacatataattctccagtaaatctgcatgggacccgcgccgtcaataattgctgcttcatcaagttctttgggaaccgaattcatatagccagtcagcagcaacgtagaaaagctcatattactggcaatcagaggcaatataactgccatatacgttcctctgaacggagacgcactgattgtcacaaaatttggtatcagagtagaaaacgatggtaccagcaaaacagcattaaatacaatgctgattactgcggtaaatctattagcaaaacgtgtaatgctatatgctgcaaaacctgcacaaagcactactcctatgactacaccccccgaaataatcacactgtttcgaaatgcacgcagaagattcatatcgggataattggccattgtaatataattttccagtgtccagtgagacggaagcataatggaattctttaagatttcgtttgattccttaaaggagttgataaatacccaaaccatgggaataattgcagcgcacgcccacataattaatattccataaagcagaacggctctgaccgccgccataaaacgatcctgcggtgtttcataatgatatttcatcctctcacctccttaagtatcgccttgaatcttattagtaaaaacttttacaacacctgtaatgcttaagccaagtaccatcataataattgcaattgcactggcatatccggtattgtagtcggcaaatgccttataatacatgtaggaactcaacaattggctgctgtttaaaggtccccctccagtgatgatataaaccatatcaaatacccggaaacatccggagatcacaagaaccacattggcaaccagactgcttttcagcatgggaaccgtaatatagattgctttctgccatggctttacaccgtctaacaccgccgattcatatatatcaatagggatattggctatggctgttaaatacacgacaaaatagaatcctacaaactgccagcagaccggtatcaaaagcatataaatggaccgctctttcgtcagccatacctgtggttctcctccaaatgcctgaatgatataattcaaaagaccataatcatatttgtaaatcaaagaaaacatcagaccgattgctgtagccgaaataacgatcgggaaaaaatacaccgtgcggaaaaaacgaaatccatggtgagcggaatccacacagatagccagaatcaaagccactccaacctggaaaataagtgcaaacacgatcaaaagcattgtattacgcaaagcaattccgacaactgaatcagtaaagaactgtttatagttggccaatccaataaaagttttcgtctgtgagaaattaaaccaggaagtaaagctgtaataaacagttttaaacaatggtataattaaaaatatcaaaacaaaaatcaatgccggcacaagcaataaaacagaatacatcaagttttttttgtctcttcgtgtcataagccatccccccgcctgacgatcatttagttcgctttaatattactcaatgctgtccggcattcttctaaaagttcgtccgcagtcatttcaccttcgcatacataaatcaattttttagcaaggttgttaaacacttcccttggtatcatggtatcgatcggcggattcatagcagttgcatttgccgtcatctcatttgcactgactaaaagagcctccgcttcttccggcatctcaatattcatagctggcgtaccgcctacttcaataaaacgggcaaggatttccggtgaacacatatatttcacaaaattcaacgcggcatcactgcgttcagcggcggccttggacatataccaaccggaaccaaagactgagataatggctccctcctgtccctgagccccttccggaaccggaacagcaatcatgcgcatatcctgattttctttcagcgtatttaaaacccaggagccggtaaatgtcatagccgcacgtccgtcctggaaaataatgcgggagtctgcatccgaaatagttgccgcatcagctggaaatgcgcctaaatcatacagcgtcttaaactggtcaatcgcacccgcccaggaagcatccaatggtttcttttgattttccggtcctacctgcgccaataacatggtttccagttgacatgtcggactcagtaaagaattactgatgggaatgatatccgtgtctgccagtacctcacacgcctttataatattatcccatgtggtcggatattccagaccgtactcatcaaatatcttctggttatagcacaatccctcaaaggatccaatatatggaatattaaattgttcgttattaatctggccggaaggcattacggtagaacggaaacttgacgcccattcggaatcctcttccagatattgatcccaactcacgtacagtccggactcatagagcggctctgcatcggaaccattaaaatataatgcaacatcgaccggagttccggctgcaatatcggcattcatctttggacggaacatatcgttattaccagcagtaggaaccgattcatccgaaatcgtaatgttgggatttgcctccatatattccttaatgacttcctgccaagtaggggcccactgatccgaacctgcaaagaatgtgattacacgcagattttctttctttacacttttttcccctgctgcacctgactggttttccgaagccggtgtttccgttttcgaagaacagccacttatggatgccgcccccagcataactgccattgttatccatgccatacattttttcttcatgataaaaatctcccttctccaaatcatatttataataggtaccctttcatccatactgggatcctgcagtatggtaaaatttgaaatagaaaacaatctatccttctttcttctctatcagatggtaacagactgagaaaatacccgcaccaataaatgccgctgctcccgcaagacgaagcatggtaggcactccgaatatatcgcttagatatccgatcaacacacctccgatcacccgtgataaaatcgtagttaccatattattcatgctttgccccgtcgctctcaaatctctaggaacatgcacatttatataagtgactatgcaatagtttaatgttacaaaacaaaaaccatgagttaagttaatgcatatggcagcaagtggattcatagctatgctgagtgtcgtccaccgcaatcccgttactacagccgcaaccaccatcatttttttatagccgaagcgttctgtcagtctcccggcaatcagccaaaatggaacttccgacaccgcggtaacgaacatcaggattcctactttttggctatccccgccgattgttgtaaaataaagcggataataggaataataaatcactgtacctaatgaaaaaataaagttcataaaaataaagcaaaaaatttttttgtcactcagtagttctttaaatgatgatttttttgctttctgacgatatcccataacaggtggtacaaactgaagacaaataaatgcacacagaagaagaagactgatcatataaaacattcgtcgatattgattctgcattagctgcccagctgtcagtacaccgatcgcataaccaactgttcctcccaaccggatatgtccgaagtcaaatatacttttgctgctctccagcgtctccagagaaagattatcgaggagaggcggcaccggattataaaaaacacagaacaggcaattgaccaccataatccaccaataatttatatttaaataaaaacccaatattgtagttgccccagcaatcaacagtaaatttaaaatacggttttttgtttttgagcgatcacttacatatccccatagcggttgcacaattaagacaagcagtgttgacaatgaagtaaacatacccatctgcgttttagaaaatccaacatcattcaaatacagattgagataagttccgaatattgcctgtgccgaataaaaacccaaataaggtaaaaatagattaattggaaatttttgctttttcatatggcagcactgcctccgttcttactatagatgtaattaattaactaagtttgttatttaattatgattatagcccgagacagtcattttgtcaacctatttttatattttgcactattgcaactaataattagtgtttttatagtgcaacttgcacatatatttttttttgctatttccctttttccatcagttgtttgccatgctgctttttactgcgaatacacactaacgatccatcacatttttttcacattttcatcaaatattcttcacattctttgggtatattaatactcgtaaacaaggtaaacaccttttcaacataaaactttttttcatactcaaagccggcaggatccccctcttgccggcttcctcccttttgggagaacttttcatcaaataaaagatctttgaaagtaacacagcttcaaagcactgttgacaggcttatgcccggttaatgagacagtttccattaagccactccttctcacttattgtctttttcatctgcgtttgataaaatactattatcaaatatagagtagagggtatgattatgaagaagaccattttggttttgagtgctgctttccttgcatctgtatggctggctgcgtgcaattctgggaataagccatttccggagccgcctgaagcaactgagatcaaggaaacggagacaacagccgaagggaaaaaaacaactgaattttcaaccggttcctgggatggttatacatttaccagcccctggttgaatctcacttttacgtttcctgaggactgtacgatttccacagaagaggatattaagaaagcgctgggaactggccaggagatcctggtcaacaatggggtttccaatgaagtgcagtataaagttgcggagtttacaaccgcctatgactttatggtaatcctgccggatcagtcctcaaactttcagatggtgcatgaaaatatttcagttgcaacccttggaaaaggtatgtctgctgaacagtatttggactctgtgaaggagcagttagggactttggaggattatggctatgagtttaacgattatgaggatgttaatatagggggacagacctttacgaaactttcgctttctgcgcttggaggagccttgcttcaggattattactgtatttccaaagggaaatatatttcttccataattgccagctatatccctgattcggccgaaacagttgaagctgttatggcaggggttacagctgcgaaatagaaagcaaatatactcatattaacttgtttgtaaaaaatacaaaaatgccggaatccttgattttacaaggaattccggcattcattctttattccagatatttcttcacatactgccccgtataagatgcaggattagcagccacttcctccggggttccctgggcaatcaccgtgccgcccttgtctcccccttccgggccgatatcgataatataatctgctgtcttgatcacatctaaattatgctcaataacgaccacggtattgccgccttccgacagcttccgcagtatctcaatcagcttgtggacgtcggcaaaatgcagccctgtcgtcggctcgtcaagcagatagatcgtcttgcctgtgccgcgcttgcttaactccgtcgctagcttaatacgctgtgcctctccgccggaaagttccgtggaaggctgtcccagcctgatgtaggaaagccccacatcgtacagggtcgctatctttcttgagatggagggcacattctcaaagaacttcagcgcctcctccaccgtcatgttcagcacgtcatatatactcttgcccttatactttacatccagagtctcgcggttgtaccgttttcctccgcagacttcacatggaacgtaaacgtccggcaggaaatgcatctcaatcttaataataccgtcgccgctgcacgcctcacaccggccgcccttcacgttaaagctgaaccggcctttggaatatcccttcgccttcgcatctgaggtcgatgcaaacaggtcacggatcagatcgaatacgccggtatatgtggccggattcgaacgcggggttcttccgatcggggactggtcgatggcgatgatcttatccagctgttccacaccttcaatgcatttgtgcttgcccggaatggtccttgcccggtttaactttttcgccagcgatttatacaggatctcgttcaccagagagctctttcccgatccggagacaccggttacacacgtcatcacaccaagcgggaatgtgacgtcgatattctttaaattattctcctttgccccgcggacggtcagatagccggtcggctttctgcgctcctccggaaccggaatcctgattctgccgcttaagtacgcgcctgtgatggaatccttacacttcatgatctggtttgccgttccgacagctaccacattgccgccgtgctcgcctgcccctggtccgatatcgatgatacagtccgccgcgcgcatggtatcctcatcatgctctaccaccagcacactgttgcctaaatcccttaaatgaagcagcgtcttcagcagcttgtcattatctctctgatgaaggccgatactcggctcatccagaatataagccacccctaccaggcctgatccaatctgcgttgcgagacggatacgctgtgcttcaccgccggataaacttccggtggcacgggtgagcgtcagataatcgagaccgacatcgatcaggaacgtcactctggcccggatctcctttaaaatcaggtcgccgatggaatgctgcatcggagtcagtaccagctgatccagaaactcccggaacttgatgatcgacatattggttgcttcgtagatattcttatctcccaccgttacggccagagactcctttttcagcctcattccgcggcaggcaggacacggggtgatccgcataaaggtttcatactccgccttggatgcctccgagtacgtctcacggtaccttcgggccacattctgaaccagaccttcaaaggccacatcgtatacgccttctccgcgctgtcccttgtagtgcaccttgatttcttttccgttggttccattaatcagaacgtcgtgaaccggcttcggatactcttcgaatggtgtgtcaaggctgaacttgtattcactgctcagcgcctccaatatggcgcgtgtaaagcttcccttatctgtacaggactgccagcccagtacagtgatggccccctggttgatgctcagactcttgtccggaatcatcagatcctcatcgaactccatcttatatcccagaccgaaacaatccgggcaggcgccgaaggggttattaaaggaaaagcttctcggttccacctcatcgatactgattccacagtccggacaggaaaagctctggctgaaggtaatcggctggccgtcaatcacatccacggtcatcagcccgtcggacagctccatcaccgtctcgatggaatctgcaagacgcttctcgattcctgccttcaccacgagacggtctaccacgatatcaatgttgtgcttaatattcttctccagcttgatctcctctgacagctcgtacatattgccgtcaatacggattctgacgtaaccgcttctccttgcgtgatccaggaccttcgcatgttcgcccttccgtcctctcaccaccggagcgagaagctggatcttcgttttttccggaagccccatgatgtgatccaccatctgatccactgtctgcttcttaatctcccgtccgcacttcgggcagtggggaatcccgattctcgcatagagaagtctcatataatcataaatctccgtcaccgttcccaccgtggaacgggggttgcggttcgtcgacttctgatcgatggagatggccggggacagtccctcgatgctttccacatccggcttttccatctgacccaggaactggcgggcgtaagaagacagcgattccatatagcgtctctgcccttccgcgtatattgtgtcaaacgccagggaagatttgccggaaccactgagacccgttaataccaccagttcgtttcttggaatgtccagagaaatgttttttagattgtgctcgttggcacctctgattttaatatactgctttgccatacatatgactcctgtcttttcgtatgaatataataactgtatgatctgtgctgcatccagcactcattctaatggtctgccatctcataatatcacagctttttcatttttgcaaacatttgttcgtgttttccatgattttctgttttgctcttttgggggctcttttcagggccggcagacctctgattccgaaagaaaatcgaagggattcttctctgtttagtcaacagcggtataaaaagaaatccggaccccagggcccatttaaacttacatgccctgagattcggatttctttttacactgctgtttctgctctgcatttccctttaactggcggaaatccttcagtcccgctcacataaaccataccctctgattcgtcaccgatatcgcaaccgctcccgcattcagcgcattcatcacgtcctccttatcggagatcaggccccccgcgatgatgggcacattcacggtgctgcacagtttcttaataatcttcggcatcagccccggcagaatctccaccgcatcaggcaccagggaagcgcactgtttttcgatatttccaaatgccatggaatcgatcacaaaaatcctcagaattccgaacagccccagctccttcgcccgcttcaccagctgcggcttcgtggatatgatcccgtccactccggtatgctcccggataaagtcgacggccacctctttatttcccagcccgttaatcagatccatatgcacaaacaccatctttccggcgcttttggcaatctccacataccggcccacactgcagatatcgccaaacagcaaaaatataatctgactctcggagtacaggcattctttcagtcccgtctcgtccttcactgcggcgattaccgggcagtcctccaggattattctaaatttcctcttcttatcatcaatcatcatcttccccctcatccagttccttcatcagctgcggaaagctttcccgctcaaattcctgaatcgatatggacttcttattcggattggcgaatacgaatgtcttatccacattctccacgtaattctgaatcttatcattggtagcactgataatcgcctggaatccaaggccgcggatcagctcaatacagctggctaccttctccgcatccatcttggaaaacgcctcatcaagcaccaccagacggatcgtcggattcctccggatgctctccggcatactgatgcggtacgcctgtgcaaagctggccagaagcgccacataaagcggattctgtccctcacctccggaatttttcttgatcattttgcttaagcggatcttaatcacttcatcctcattctgaatcagctgctgcatatcaaaggataagtaggtccggtagtcggcatacttgtccatattgcgtttcgcctcttccatctgttccggcgatgcgttatccggcgggatgaagacgtgaatcaattcctcgatcagttctccatactggctctcatgctccattgtgaacagattcatctggttgtccacggtatcatttaaatcgttgggatttacttccagggaatcatccatgaacatatcgtaaaaacggccgtctgcccccttgttctttccgatgacaaactggtatttatccttgccgaaatcgaggcggctgatgatgcggttcagttcatcctttcgctgcagcgcctcccggatggcactccggatcttgaacatgaaatcgtccttaaaatgctccaccgccgaccgcgcctgttctgccgcgatctgacggtattcctccagatgatcacactccaggatctccatcagtttctcatattcccggttatccttcgccgtgatggaaaaattccggttgggatacttcctcgcgtactctcccctggcgtccatcagcgtctggaatgcctgatccctggcctccgctaccgcgttcagccttccggtaaaatagtccctaagcttctcatacctcggctgctccttcccggccatatactctgtaaattcggcctccaggatatcgtcctgcttaaattcccgctcttttgccagcagctcctgttccaccgctgtgactgcctgggtcatctgggagattttcgtatgaagctcgtagatccggcggctgaccgcgtcccgttctcttctcttgccgtcggcaagggctaaaagagtgctccgctctttctcccactggtccacgttctcttccttcagctttagcagcttctgttccagttttttcttttccttctgccgctccttcaagtcccccatatccttctgccattccagatacaggccggtctcctcgtttagtccttccagacttagcacggcctcgcattccctgaccgtcttttcttccggagcccgcttattctccatttccgccagagatttttccagaaggcggatcctctgtctcacactgtccttcccgatataggcggatttggtgtactgctccggattcatctgctgcagacggaacgtatgataaaccatacagtccggcgtcacaccgatgcggcagccgcgcagctcgtcgatacttctgcacttcaccacctgtcccagaagccgctccagataaggctttaagtacgattctcttacgtcaagttcctcacagagcgcgccttccagaacggttggcgtatcttttccggccttttccgtatcgagaacagccacgcggaaatactcatttttgtccagttcactgtatatccgcagcgcatcctccgcatacgccgggggcaccacgagagccagcttgttgcctcctaaatatccctcgactgcgtttcgccattcctcattgcggatatccagcagatcggccatgacgtgaacctccacagcctttcccgtctcctccagcagccttctctggatataggaacgggcgtgctccagaaccttgggatatgccttacttccggcctttaactgggccagttcctctttcagctggcgctcctggcgttttaaatcacgaagaaccgctgacgcctcgctctttaggtcctccgcttccttccgcatctccgcaagcgactttttcagacgttccagcttctctccatcgatggtgttcttctcaaattcctcgatatcccagatcgtctgattcgatgtggtctcctggtcgatccatgcgtttaaccgctcagcggtctgatgccatttcacctcactcttgtttaaatgctccatcagctcatttaaggattccaaacgcgtctttaaatcttcgtatccggtggaagagattcgtttcagcagttcctctccctgagtggtcaggtccgcaatctgctcatccagaccgtcctttaagcgttcctgattctgcagatcatctctggaaagcgccgccttatccgtcagttctcctgcccgttccatcagctccagaatctcaagttttcccgtaaagtaatcgttcttttggatcgtttcttccttttccagaacgagaccgtatttctcctgcatttccttcaggatagaaatctctgtgtaagtatcttcaatcttttttctcatgcgtccgtactgcatgacgctctcctgcatgtcgtcgatatggatatcctgctccatgcagatgtattccttcacaaagtcttccagacggatgttcatacggaacggaatggcccgtttaaacagcagcggaaatttctcggaatccagaccgcctaagtacacatcgtaaagctgcctgcggaaacgctcattgtgggaggtggcgaagtactcttctttgccgtaatggctctgcagccagccttccaactccagggtagacatggtgcgtctggccgtccggtaaccgttttccagaagcggtccgcggtgccagaagaagcgtctcgatatctcgttggtcgatgtgtccacatcgaatacgattcccacacactggtattcctctgtatctgtgcgctgcagctccagaacaatggtactggagaaattctggttccttaggtaggcgaactcattgttctccccgatgttcaccattccgcggagatactcgattaagttgcggtcagaatcgtccgcagccgccttattgaaaaatccgcggccatcggtgttggcatagagcacaatctgcatggcgtcaatcaccgtggactttccgctgccggaatgcccggtaaaaaagttaatctcccggttaaaggacagcgttttgcggttgatatagtgccagttatttaaacagatccgggacagggcctcaaatctctgattcgtcatcgttatcttctccttcgccaaatgattccagcagcacccgcacatcgtcaccgaacagcaccacattgatgcacggatagataatcagcctgctgtcgccatttaaatcttccagcagatctaaaggctccacaacctgatattttttcagcagggtgaccgctcttctgatatcggtgggcgacggctgttttttaaagagccggtaatttcccagcttttcatgtatttctcccagtgatgtatagatattgacactggtggataccgtggccatctgttcgtcatagatcagctttaatatcagtaaataaagggtagccagcttcggaagcttgtcacccaccagcgtttcgccctgaatgtagataactcccatctggctgttctccaccaccgagacgccgctgacggcaaaatattttcttagaaattccagatgcttgttgcagatccggaactcccggttattcgtaaagcggccggaacgcttttcgtatttccgctccagcacaaatgtctgcctgagaagaagcttaaccgcttctgttacttcctgctgctcttccggcaaaaggctgtcgtaataggggatccccatggttcctgtcgcctgttcctcgtaccccattatgatttcctccttgtaaatgtcagcttcggataacggtatcctccgctctctatcatttccggttccccatccgcatcttccacccggtacagactctttcgcctggtggaatagtcgtaggccagtatcagcttctcgaagtcttccccggagcggatcatatcgccggtgacctccatccgtccatcctccatattctcctcgatgaagctctcaatttcttttttactgtagcggtttttcagcttattcaagttcaggatttcttccctggaaagttcctccgcctcttcctccggctccagattaccggtgaagtctgcctttggccttctccgcttatacagggatttctcagacaaaatggtcatctgggacagattcatacgctctcccacctgccggatccggtcctcctgcttatctccctcggacaaatgattcagaagctgaatcaccatccccttcatgttatcatcctgattgagtaagtaattaagccttgttactgtagcgcggatatatctggaatgctcccggtccatgttggcaatccggtgttcaatgctgtcgaagcctctctcgatctggtccagcttctccgcgatatcggcggcagataccttcccaccgcttcgcctgctcatctgttcgatccattccgtatcatcccgcatggccgctatccatctcttaatgtcggttttataaaggtaaaaattgtcggaggtctttaaaatgtggtatttcttcttcacaatttcctccacatatccctctaaatgatccttgagcaggtcttcatacgtcttctgttccaacaggcttgcaaagaatttatccatattgtggagcatgtcctgcagtgtcttattcaatcgcttcgtattgacaagcgccgtatttaaaaggctgatgctggctctcggatcgttctttaaggagaacagtatggcatagacattttgaatatagatctgcgtctcgtcctcatcctcgctgtcaagccgcaaaaaagcctctgtcatgacggcggcgtagtccggaatcacaatatacaccgtcatagaggcataatcatccacttttctgagccagccggtcttcaaaagccagcttaacaccctcgtggccggcggttccagcgtatccagttcatcctccagctcgtcctgccagatcacgtaccgtttctttgcaaaatactcgcttaatatctggatgcagacctcacggctcaaaaagtagttgctgtattcatattcctcgttgattctcaatagtgcttctatgtagatagaccggttcaccgagcggaacagcccccagaaccggtccggtatttcttccatcagtttcttattctgtttcattctttatgcctccgcagccacattccggcggttcggaacgcagttcttcctgtttccgtttccgcttcatctgctgctttttctcatacatggtaaaatcggcgcggcgaaaggccagatcgattccgcactcatcctcttcggcccagccgactgcgactgagacaggaaaccccagctcattctccgcctctcccagtttctcctccagcctctcttcaaaggccttcgcctcttttccggagatccggtcagacagtatacaaaattcgtccccgccgatacggtaaagtcccgaacagtcttccagagaagattttaatgccgctgccacgaaaatcagggcggcgtctcccttctgatgtccccactggtcgttgatcctttttaattcatttaaatcggcgaccaccaccatggtaccggggcccgattcaccgcggagcagtgccatctgcttctcaaacgcattccggttgggaagcgctgtcagcatatccgtataagccatgtgctctaaaagctcccgtttcatgccctcatcacgctccagtacaagctgccgcactgcgtaatagatcagaacgctgaaaaatattaccacacctatctggctgaaataggccgagctgatgtccgttcctcccacatagaatctcacaatatcgaggcaggcaaacagggcaaaggacagacacgccgccatgagctgaatatccttcaccggatctctgcgcaaaatccgcataataaagcggaagagaagttccgccatgacaagaagcaggattacatgagctccgatcaggctctctataaaatcactgattccggttatctgaagaatcgaaaccactatgaagtttaaattggcgagccagaaaagcaggttcatccatctgtcttctgagaagctctcatacgtcagaataaactggatacaggcaggcggtatcaggtaaaacagaagaaagagcgcattggatacgagaggcgcctttccccacagaatctggtatccgccggattccagtataagccacatgcaggtcacaagggaaaagatacagagacagcgcagctgatacgtgatgtattttttctgaaagctgaaactgtatatcagcagaagaagcgcagccagtataattgctgaattgaagatcagcgtcggcatgcattcatggataacctgaaataccagcgcatttttcgtaccgatatagaccctgcccaactggccggataaaccattgtagtattttaccgtctcgatggataatgtctttccctgccagttttccggaagtctggcaatcacccaggcattatatggcgcattcccgaagggagtctcctgattgtatccgaattcttcaatgagttctccttccagatagattctcacatactggtgaacggcacggagcatgacggaattccccttaattccataatccccaagttctgtggaatagcggatgagttcctccttctgcggagaaaacggtccgggaagctcagactgcacttcctgcccctgatattcaatcttccactcaccggtgactgctgccgactgttcgctgtcaaaacggacatccggcgccttacctgtgataaaaatccataaaaaagacagaaagaaaacgccatcacaaaatacatgacagcggaccgacagctcctgtcacttcctgctctcttcttttccatgcctgtgcaccccattttctttaaaggttacagcaatattatagcaagaacaaacacatgtgacaatcacattctttaaaatggttcaattgacacaccgatgatgccggttttaaaagaattgtgtatgaaagaaaatacggccggaacagcacctctggaaaacgaagtacagtcctgccgtattttgtttcattatttatggaaatcagttcttatctttttttcatataccggacgcaatatcgttcctgattcgatcaatcgcagcagccataccatattttttcccagcgtccgcatggtttgaagtccttcctgatccaacagcaaatcgctccttctgtttccatttccatgaatctggttccaatattgtgaagtaactaccggcatatttctgatctgaaaatatttgttgatctgatcgtatgcagtgctggctcctccccttctgcagctcacaaccgcagcagccggttttccggaaaaatcgccacagtaaaacacacgatccataaagcacttcagctgtcccgtaatacccgcaaaatatacaggcgaaccgaacagaaagccgtctgcagtatctgccttatccagaaattcattcaccaaatcctgcttacagcaccgtcctgttgactgacagtgcttacaggcaatacagccagccaccggttccatcccaatccagaaccattctgtttcaataccgtcattgataagcattgaagccacttcttccagagctccccgcgtacagccattttcatggggacttccatttacaattaacaccctcatgcttttctttccctctcactctataaatgtttcggaaaccgtccatagatgcggtcaatatagaaaaaagtgacaaatgcctcacttccccggtctttcatataccgttccagcatcttcgcctcctggcctgacaatgccgcatatattacctggtacggcttcccgctgtacccgccccggccttccagaacagtagctgaacggttacagtttgtgatgatccattgtatggattcctcgttatctgaaaccagaatggctcccatacttctgttctgtaaatggaccatatcagtaatggcagacgacacacatacatacaccagtgaataaataacagtttccaggctgtaatggaacgcacaccatgcgtagacagccagattaatcataaaagcaattttccctacgctcatacgattatggtacttcattataacaagtcccagtacatcctgtcccccaccggaaccgccttccctcaaagtcagccccacaccccagccgcatatcactcctcctactgcagcactggcaaatggagcatctggaagtaacggaaatgaaacgggaatcacagtcagaaaaaacgtctgtacagccacacagactatagtcttacagaaaaaccggcttccaatattcagccaggccagacagaagagtggaagattcagaaagaaaaagatgataccggctatgtcacgctctccgacaggcatatgaaatacttcctcaagaattgtcctcataatctggcagattcccaaaaggccgccgctatacagaccggaggggacaataaaacagttcattccaaatgcaaacagaaaagttcctgccatcgcttttaataggtgcagtccatcatcccgtttcatcacaattcttccaaacctctgcttcttctgaccatgttaatgcttgccagcaatccctgttccatcgtatgggagggtttgtatccgatttcctgctcaagtgccgatgtatcaaaatggaacggtatgtccatatctccccccagaggctggatatccgtttcaggcagaactgaccgaataaactctatcgcatccttcaccggccggtactcccctcttgtattaaaaataccactctgtgttggtggtgctaaaagagcatcacggaagatatctgccatgtctccgacatattgaaaatcaaacatggtatctgaatatggtactctgctggcagctcctactgcaggctgatcaataatagaagagaaaaacggttggaaagaggacataatatacgggccataggaaagattaacccgcagagcaatggaatcaagaccatattccttccggtagaattcactcagcccctcgttgaagacttttgtataggaatacagacttcccgggcagagaggcgtgcgctcatccatactctcctcattgccgtccccatacctccgctttctatcactttggactccatatacagcggaagaactggcccataccaggcgtcttaatttttccattttacatatttcgagaagattctggaacgcaacaatattcgtctgcactccatcggtcggattcgcccttgtcttctggtttagcctggaagccaggtgggcaaccgagtcacagccataatcgacgatcagttttctgattctctctgcgtctgtcatatctccctgttccaataccaggagttccctttcctcctctgtcagcatctcatccagccatctgctggtacttttgctgtgatacagcgccaccacttctattccagcctctaccagacttttcactacataggaaccgataaagcctgttcctcctgtcacaaaacatctcatctccccagtctccttcctgtattacttccccttcccgcctgacaaattcattttctgcatttcatacgttaccagacgtaccatggcattcacttccgcctctgtcagcacttttcctttatctttcgtaccggctttcgcatcgcccatcacaccggtggacgtcacctcatcccagtaagtcggcgtactgtcaaaatcttccggaaacttcggataatcacagattgcccgttccatatagacacgatcaggacagcattccagcgcctgggatgtctcgacctcacatgcatgccagaataccggatgggcgaacggtgaggtacagacttccttcgctttgtccctcatgctctgccgctcctccagaatgaccatcttcatatcccggaattcgtcatagcattcccggactgcctgctttactgcaggtacatttccataatggtggctgtgaataaaaacaagctcaaagcctcgttttctgaagctgtacaacatgtccttaatcaccgcaatcaaggtatggtaggacagggtcaaggttcccggaaaacgatttaaagaccatacctgccccacaggaatcgtcggcatcaaaataattcccgtctccgcacaaactctcctgcattgttcctcacaaatatgattatccacatcaagcttcatgtgggggccatgggcctcaattgcaccaagcggcagaaggcagacaggcatctcctccacggcctccttcgcctccggccaggttaaatttctccactccttcataaataatccctccgtgttcaggcttcaaagcttaagtactgccttggattattgcatatcaaatcgtctctgatatccatagcctgttcttcctgcattccctgttctgtcagctgcctgaccagcctgggcaaaaatacttttaaaatatatccaaagcccggtccgccgccaaacgatgttaaataactctgtctggccatatcgccgcacaaaagtatctttttccggtatcccagacgaatcagttcacagattaaatcaattcttgtctgttctgtacaatactttatcttgctgatctgatccaatccgatgaaaacaccattctttagtaattccctgtaataccacagatccggattcctgtccatgtgaccaatgcagacctgctctaaattagccccttcctccttcagcaaagcgatctgctccagtcccatggttccgatccctgtatgagtaaacaggggcattgacagacttttctgagccctcgccaccgccctggcacaccggttctctgactctgagataaatccgtaacttgtaccgaattttaactggccaggcttcaaatgatttcttccatatccattttcagcagcctccatcacccgctcataaagttgttccgtagtactgtttctgacctgctcactgtgatgctctttctgaccaaagccgacggttcccactatgggaattccacttttttcggatatttccagccttaagtgggaattctccccaaagtcggctatagaagcatctaccagaagagttcctcctgcttctttaaacagttttacctcactcaccattctgtcaatgtcgcacagctccagatcaggttctttttctctggaaacaggagatctggcaatcacatgttcatggtaatacactgctccggctctttccggtatcatatctcctgtaagcgtcctgattatctccaatttcttctccccctaaatcggcttttccttcaacatcttctccagtgtccggcacgcctcatcttcatcctctccggtaatctcaatatgaaaggcttctcccttcttgatccccagcttcagcacagaaatcatactttttaaatctcctgttttttctttgtatttgatttccattgatgaacggtaattttgtgatacctctgccagtcggctggctggcctggcatgcataccgtaatcatcctccaatgcatatataatctgcttcataaaatctctccgtatcctgtcttgtttttttgcttaaaggtcatacatctctgtggattctcataaaaaaacttgtaaaaaagcttctctccctccagtcccgatttctctgccatttccttaaactgtatctggaaccaatcaaatacatatccaagccccaatccaaactgataatgacggtaatatgattttctcgccatatctccggaaataagaatctgatcttcatacccttccttcaccagtgtcagaatatgggtaatcagactgctctccgtatgatatttagtttttccaataccgtcgaaacagagatacgctcccgtgtctgcaatcctgcggtgataccatagatccatgttcctgtccatatgaccaaagctgacattctcaagcgatactcccacggctttcagcagttcgatctgctccagacccatagttccggcttccgtatgggaatgaatcggcgcccccgttgcaaaatggactgctgcaaccacttccattgtttttttctccagcggagagatggaattataacctgtgccgaatttcacctgccccgctttgcagctggttccctccagacccacttccacctcccggcagacgaaatccgcgagttctgagacggaacttttttctatccactctttaaaggtagagtatcccccgatcagcccgcgtcttctctcatccagtggggcctcccataaaaatcctttattaaagcccgcggttccaatgacatggaggccacttcttttcgaaaggtctgcaaccgcttctacctcccggccataatcaatagctgttgcatccacgatagctgctcctcccattcttttgtagtccatcatgtctgccagcgttttctcgggatcgtcaagaagcagatcgtcgtcatttttccacacccagtatggcggacggcataccagatgttcatgggacagtgtaaaccccatctcttccggcctgatatctccaagcagtgttcttataaatcccatgaacagcacctccgttcttttaaccgaacagtctgccaaacagggcaaaaatccagaacagtaagaattcatctgtctctcccgcccacataatagtatccgggatagtggctggtaccagaaacttgatgaataccagctgcccaagcgcaactatagtcgaaataataaatccgcccagcagtgcccccttgattcctccagtagagtttccgaagattccggccgtcgctccatgaaaaaacagaacaatcattgtgggaaccaccacaaaaccgatagacagccccaaggtcagcatccagaagataatacctgcaaacatcccgacaaaaccaaggataaccgagttcggagaataggtaaacagcaccgggcaatcgagagccgggattgcattcggaacaagtttatctgcaatccccttaaaggacggaataatctctcctacgaataaccgtacccctacaagaatcactgcaatgcctgcggcaaaagtgagcgactgtacaacagcgtaaacaataaaattctgtgttcccgcattcgccattaacgcctgtccattttctgtattcttcaccataacgatcactgcgccgattaaatagaatatcatcataacaagagcggtgatcacgttgttgtcccgcaaaaaagacagccgtttagaaaacacaattgtttctgcatcctttttatttttcgcaaatactttccccgcatttgctgcaataaagcttcccactccggaaggatgcgccagagcaaaatcattgcctccagtgatatttcttacgtatttctggcagatagccggctgtaatgtaaagtaaagtcccagaacaggagccagaatacaaaccatcttccaggtggccatttccggtgcgaaattaatcagtacaccgctggacaccactgtaacccaccagagttcgtgccctgttaaaaaaatatatttaaatggtgtaatccttgccagtatcacattgatcaggaacgaggttgccataacgatggcaatcacgcttccaaattttcctacgaatgcgtcataacccatacaattggtaagtacagccgacggcagcccgaatacctcagaccacagcggttcaaaaacctttaaggcaccggtgacaatattgcttccggagctgatgacgagaaagccgatcccagctttcagcgttcctgatacggtcttctcaaacggtgatttctgcagcagatgaccgatgagtacaacaagcatcagcaggaaagccggtgtgttaaaaaagttattagaaagccatgttgcgattgtacctaaagtccccataattcttcccctttcttttccccattttctttttacttctgttcgttctccaacgcctgtaacacctccgcaatctctttttctataattcctttattgatataattggtaatacagacaattttcgccctcggattcgtaatactgtctgcaatctcctgtgatgtaatgataaaatcacaccgctcgctgcaggcacacgacgcatccgtatgttctaactccgcctgaagccctttacggtttaaaatatcctggacactcatctttaaaatcaggcttgacccctgtcctgttccacatacacataatattgtcatgttcatccctcctttgtactttaatccgtttcgtatcggtgaatcagttccaccacttcttccactgtctgcgcctccatgaatttctctaaagtctcttcctccccgaacatattggacaaatgaaccagcgcgttaatgtggctgtgtccgtctacacttgacagaataattaaaagattggcatatttttcttcgttaaaataaattctttccctggagcacagcatggccattgccagttttttcgctccttccgaaggtcgggcatgtggcagggctactcccggtgttaaaacaatataaggccctgtcgtctcaatcgaatcaatcatagcccgcacatagttctgtgtaatgcttccatcttcaataagcggggctgacgccagtcggatcgcctccctccagtcaagtttgtcatccgtaaactgtattctgtccgccgtcaaaagatctttcaacatatagttttttgctcctttaaatatgatttcgtaatcaccgctgttataaagctgttccagtctaattcctgcttcatccctctgtcctgacggaagaaaatccttcaaaatatacatggtttccttcaaaagaatttttgttgaatcagccgcccgatcccctttttccgccagcatcctgctgatatttcccttgtcctgtgccgtcagaaaaggattcacccgcacgcagggaatgttctcatcaatctttaaaagcatcggcgccacaagcaaatccagcttgttatagaaggtccagtaattaatttcataggaaggaatcagtatggttctcacaccggagaacgtactctgtatctgtttttccacgagagcccctatcccgatattattggcacagacgatccccaccagtggtatcttctgcttctgttttgcctcttccccctggataaaccaaccgatgagctgcgcggttatataggcagctccgttctccgatatttccgcctcctgcagtcccctgatcgtattcatctttcgcgtaacatcaaaaatgtatttataattgctcctgatcgtctctacgaatggatcataaatctgaaatccacagctcatacgcagcagtacaccgcttaaagactggcttaatttttcgatcaccacctccttctgtgtacatccaagtcctattcgctcttcaaattcagtgataatctcctcagcaaactgctccagtgaagtctcatgcatcacaaactgttccaaattatcttcctggacacttcccatgcatacaatcgtttgggagagcagttccttctccattgtcaggatctctttccagtcgtccacctctgctgatgcggttttagaagcagtttttatttcctgccagatccccgactttaagatcagatattcaatgcagtttctggtatatgcctctctgctctctttactgactgcccctcgctctacataatgcccctgtctgattctccgggcaatcagttccacagccagggaaatatttaccgccgactgaagcgacagcttatgtcccagttcttttgatgccgtctccagtctgtcagcccgttttctaatctgtacgtcatcaaaaccatataaatggaagagaatttcttcgtctatatgatacaagggtgcctcttcttctgatgaaaagatggggatcagagatatgtaataaggaatcagccttcgaatttccgactctttccctgccagcatatacccttttttattcgacgtaatccttaactgaaacccattgtttttcagaaaccggctgatcgcagtcatatccgcaatacaggtattccgactgatttcaaacatctcacagatttggtaattcgtgataaaatggtttgtgagaagtttaaaaacaatatactttcttctttcaaaaaacgaataataatactctttttctgaaatattttttaacaattccctcaattgctccagcccttcaggtggaacggacacagtccttttctccctttcatccttaagcaccaccccccttttctccagccaataaatacagtcctctattatttgttttgcctgcgtcctcgaaactctcataacctgagaaagctgatgtacagtcagacatcccatattatctgataaaagctggaaggcgatgagaatatcccttgctatcttcatatttttcactccctgatttcattatatagaatattattttccaccaacagtccaaatagtttaattttcctttctataaaaatatactatataagtgtacggaacaccatgacggcttatttgtgtaaatatgctttatctgtgcatatttatataacttcactgtttatttcctgtataactccagcttttttcaatagcctgctcaattaattctgatacagagaaattataattattaatggcagccatattattatccatatattaccaaagaataaagagtccgcctcctgcacggagggctttttatgtaataggagcactttcctattacataaaaaaacagcctagagcatatcaatctgccctagagctgttaactgttattcttcctttcttctatcagcaattccgcgccacctcagccgcctccctggcaatctccagttcttcgttcgtcttaatgaccagcacattgaccttcgatgtccactccgaaatccggaacgcctccgcctggtctctgttgctcacctcatctatggtgattcccaggtattccaaatagctgcatatctccatacggatatcggaatcattttcaccgacgcccgcagtgaatacaatattatccactccattcatggcggccgcgtagctgccgatgtactttgcgactttataggaaaatatctcgcgcgcgagtgccgcgtggtcattatatttgacctccgcgtccttcagttcccggaaatcactggaaaaattcttggaaataccgagaactcctgattcctgatttaaaattgccatcacctggagaaaatccagatgttcctttttggccagaaattccagggctcccggatctacgtccccgcatctggttcccatgacgagcccctccaacggagtaaatcccatggaattgtccacgacctgtccatattttaccgcgcagatactggctccatttcccaaatgacagacaatcgtcttcacccgtttcagatcctgtctcataaattcagccgctctcctggaaacatatctatggctgattccgtggaatccgtaacggcgtattttgtacttctcgtagtaccggtaaggaaggccgtagagaaaggccttcggctccatagtctgattaaacgccgtatcaaacacacctaccatcagagtgtccggcatcagtctgcggcacgcttccacccccactaaatttgccggattatgaagcggagcgagatcgttgcactccgtcatggcctcaattacctcgtcattaatcaccacggaaccggtgaacttctctccgccatgaaccagacggtggccaatgacgctgatttcctgaaaatcctttaagacacccttttccgcatctgccagcatatctaaaagcgtatggaccgcctgtgtatgattctccatcggaaccgattccttcagggaaacgcccgtatgcgtcctgtatgtgaatattccatctatcccgatccgctcgcatacccccttcgcaagcacttcctcggtctccggatctataacctggaatttcagcgacgaactgccgctgttgatcaccaatattgtcatgcgccctctccctctccttatatttcttccccgacagactgcaccaatcaaatctgtatcgttttttctattatactttacggaatcaccaaaggcaatgaaaaccggcatcatcgagaccacggactgtctgccgtttcgatgatgccggttcccctgatccgttatagtttcttcatctgattatccggatcctatacattttcctctgtaaatactacactgaccatccccatactgcatgaaaccttataaaaattggaatcccccgcgttcatcgtctggcttccgccgattccgctcagtctgttttctccgattctgacctcccccattcccacggaagttctgtaaccatagtgctccggctctcttaagtataaccggacagcgcccatgccgcagtccacggtacatttcccatacagtccgccccggaccacaatctcacccattccacacgtaatctttgaaccattgctgaaaaaatccttcatggtaacctggcccgcccccacgcttaaaacacacgattccgtaataatacccgctccggtcagcgttcccgcaccgatattaagattgacagaatcaaaatgataccccttcggaatggtaagaatcatctttctctttgaaagtgtgttcctcccgatccgcagtatatttttatctgcaatgtcacgtaccgtccaggttccatccgatacctcactgatgatttcaccgtcctgatacccctccgtctccaggccgaaatcactgccgtattgaatcactgcggcacaggctccggcactaacggtaaattcacggatagcacgggttccatcctcagcagccggaaccaccagcaggctctggaatctgttcggttcccggattggagaaccatccgccgtccccttcgcttctgcattcgattctgtaataggttccgtattcgattctgcgtgttctcctgcttccattgtaccggatgcctcaaatccgccggtacccatgccgccctgaacgcccagaagttcatccgtactaactcccagtacctgtgacagcggaaccagtgtcataatatccgggcaggaaagccctgactcccatttactaacggcctgcgcagagattcccagttgttccgcaagctgcgcctgtgtcatttttttgcgttttcttaaataagtaattctctcccccatggcaccagggataaatatctttctgtctgcgtttttctctatatccgtgccggactgatcctctgacatatatttttctgaatcctgtggcatactgttctccttccgtctcagcgtctcatttcaccgcggttttctgcgctgtacaactttaagatatcctcatttcaccccaaaaatcaagcaaccagcggttgagctgcgcgttttttcagaataacaaccaatggttgatttttaaagccagtatatcatgattttcataaaccgtcagcagaaatgaaagatttttcagtcagacagaatcgccatttacacccataagaaacggagatttgatgctataagcagcaccaaatccccgccgatatccatctatacgccgcccccggcttctactgtctccgattcaggacaaatacataagttccttcttttaaagaaatctcaaatatctcactcactgtaaacccgttggccggcgccatcttcttcacatgacccgcgttatgggaatatagaatcatgattccgtcatcctttaaaaccttcttcgcggaagagaaaaatgcttcgtacaggttctcgatctcctcctccgtctttctgccaattttaaacggcatattcgtaataatctcatcaaacagatactcgtgtttaaagtcaaagaaatcccgattgatatagtgaataatctggcctgccgccgcggtattttcccgtgctttttcaatggcttcctccagaatatccagtccgtacatcgtaccggcctttaccgccttgtggcgttcgatcagcatggttcccacgccgcagaacgggtccagcacctgtgccccctctttcatataaggctgtgccagcttaacggtcagagccgcatttaccgccttgatactggttgggattacttccttccggtatgaaaagcgttcatctttcaaggtaaacagcttaatcagcacattgcagcttccctctttgttttcgataagccgtatctcgaactcgtaattggatgtggtattaatcagcttcctgccggacagcttttcgattttggaggaaaggcggcgcgtaaaggcactcttcttgctgtgatccatcttacattttaattctacccggaagtagtacgggggatttccctcgtgacttctggccaggaacttgaaaagatcggattttacaatcatttccgccgctttttctgcatccatgggacaagacgggagcccctttacagcgaacaaaagctcctgatacgtcctgatctcctccagccagtttaaattctccactctggccatcacacctgccccgaacaccttagtcttcgcatgaggctccagtttccgcagctcctccctggtaatctcctggaaattgcggttggttaagagcacaatatcgaaggtctcctcccacccacagaacggatgcagcagaacaccttctctgctgatgatcatggacgataattcacggatttcctccgtaatatgcttctcggtctccggagtcagcttgatctgcgccagttcgtccagccgttttttaaaaaatgccagatgctccccatagtcaaaattcttaaccgcgtttaaataagagctcttcacaaacagctgctcctctgaccggtatgccttcaaaacgggttctaaatactcctggttacctaagtctcccatgagtagcgccgcgttctttctaatcttggcatcctcactctccaataacaaaatcagcttctcttcttctcctgaaatgcaggaacatgcggcttccctgcctctgccctctttcatctcctgccttaatttacttaaattctgccggacatcctgattctgcacaatctcattccacgtttcttttatcatagttctccttttgtaagccattgctttcctatgagtatactataaattccctgacaattctacaaaataaaggatttttcgaattgatcatgtgttttttcaaaacagctgccagatatacagtccgcccgccactgccgttaagcttgtttatggcatttgcacccttttaagcgatcacagccagtcatggaaaacaccggacttattcatccagaagctctgccagccttccataagctttcttataagccgcgattccgtcctgctcttttcgctctttcgctctcttttccagtttttccagcccgtcaaaggatacaagatgtggttccaggctcaaatatccctgatagcctgcaccgtccagcatggtcagaatctccttcacacaaccgtccccgtctcccgggagcacaacctcaccgctccctttcaccgcatccttaatgtggatataggcgatataaggcttcagcatctcataggcctccatcgtatcctggccgcactggacaaaattagcaaaatcaaagacacatttaaaatgatccccgtaaaatgccttcatcagctctaagcatctgccggcggcatcgccgtagatctctttttcattttcatggagaagaaccacatcctgttctgctgcgtagtccaccatacgttttatcctggaaaacacctcttctctgtacttttccggcgcctctccttccggcatgaaaaagctgaacatacggatattaggcaccgaccagagctttgccagctccacaacatggcggaacacttcgaaatgcggctcgaaatcatcggtaatcatgatttttcctatgggagatcctacagatgagacggacactcccgcggccgccatccgttcccccagttccgcggccgtctcacaggtcaaatccgctacgctggttccatcggcgcttcgaagctccacgtatttctgtcctaactccttcaacaccgccatctgcacatcaaaatccctgttgatctcatctgcaaatcctgaaattctgcaattctttaacatgtctgcgccctccctgcagtctcataagccgtaagcatcagctctactgtatcttcaatctgttttaagcccaccgaaaatggccggtcctgttctatactttcgtaaaagctgcggatacagtccctatgaccggatccccagtaacttttccccaaatgttcacttcctgaataatcgactgtctgagtctgaccatccgcggtcatgacagtcacccgcaggtcctcgatccggaccctggccttatcgcactccagctctatcatcggcggtacatcagccacatagccggttgtcgcataaaagcaggcggtctgttcgccataggaaatgtaggcctccatggtgtcctccacttcaatgattcccttcagatgatgattggagacattggcttccatgaagaccggctttttcccaatcagatactggatcagatcgagtgtatggacagactggttgatcagtgccccgccgccttctttttccttcgtccctctccagccgctttccgtatagtacttttcacctctgcaccacgtcaccaggcctctggcgcccagaatcttcccgaattcgccggctgtaatccgctctttcaccgccgccacgctgggattaaaccgattctgaaagcagacgcccaattttgcaccgtctttagcggccttttccgcctgcttcagcttttcccactgttcccggctgataaccggcggcttttccataaaggtatgaatgcccattcttaacgaagcctccgccatgggagtatgcagataatggggtgtgcagatatggacgacatcaatctcctctttttccagcatggtcccccagtctgtgtagggaaccgcgccgtattcccgggccatggcctctgcccgctccggtatcacatccgccacagcggtcagtttacagccgcccagccctgtgattgattttgcgtgtaccgcggcaatactgccgcagccgatgatcgcacttttcattgacgctcctttttcccgcttattttttttaattgtctctctaatacgtccctttcgtgttaaaggtcacctcttccactttctccttcttcctggaaccggccctcttcttattcagctcctccagaaataattcctcatcgaacgggatctccaccgggcgcttcagccagctggataaatgcatggcattggaaagcgttaacccgttgattccttcctctccgcccgcaatcagcggctctcctcttaaaatggctcctgcaaaggcccttaagattcccacatgctgaagattttccccgtctgtctccatgtcgatccatcttccctcaggcttcttaaagccctccacagcggtatagcagtactcccgctcattgacatccagctcgtaaaccttgatctcttcattttcgcagacgatcttcgccttttccaaatccacctcaaaccggttggttcccggcgcatcccccgtagtcgtcacaaagacaccggtcgctccgttcggaaactccagatacgcggttacatcgtcctccacctcgatgtcgtgccatttgccttcgtggcagaacgcctgaaccgtctttggcataccacagatccactggatcagatccaggttatggggacactggtttaaaaggacgcctccgccctctccctcccaggtagcgcgccagccgcccgaattatagtaggcctgcgtccggtaccagtcagtgataatccagttgacccgtttgaccgccccatactgtcctccggtcacaagctcatgcatcttccggtagatatggttcgttctctgattgaacatcatgccgaataccagatcgtgtttgtttgcctcctcgttcatctcccgaacctgcttcgtgtagactcctgccggcttctcacacatgacgtggaagcctctccttaaagcctggatcacatacctgggatgatcgtaatgggggaccgctacaagcacggcatccagatcactgtcgtccagcagttcctccgctgtctcaaaaatctttacggtttccggtaccgtttccctggcccactgacgtcttacttcccgctgatcggcaaccgccgccagctcgatctccggcacttttccatctaaaatactctccacatggccgcttcccatgtttccgattccgataattccaagtctcactttactcatgctgatttcctttctgtctcctttactgcatttttatcatccagcctctgttaatatctaccggtaccccagctctgtgagatttctccagctcttttccagacatacaaacggattctcctggcacgtgtcctgctccaccagggcatactcgcagtccgttttttccagagcttttaaaatggcagaaaaattcatatttccttccattacaggggccataacctcctggccgttcacaatccctctgtcctttaaatggacacatggaatccggtctgccagacgctcgatccactggcatacatccccgcccgcagtctgcacccagtaagtgtccagcgtaattcccagttcatccggcgcaaagtcatccaataagtaatccagcaaatatcggccgtcagttttctcgaattcaaacgcatggttgtggtacatgagacgcattcccgcatcctttatcatgcgggccggctccttaaaatcggccgcaaaccgtttaatccagtcgggatttctgtatttctccggcatcgatccgattccgatgtatttacaccccattgtctcatgatcgcggatcagctgttccgtatccgttaatattctgtttaaatcgctgtgggtcagcacaatttcaagtcccgtctcgtcggctgtctcccgggcaatctgcggagtaaccgcgccgccgattgcagacagctgtactgttctgtaaccgatttccgctacccgtctcattgtctcctgaaaatccggcactgtctgcgtaaacagcctgactgtataaagctgtgctcctgtcttcataaattcttacctcctgtatttctttcctgttgtctctatcatagcgctcttcatgcaaaaaatggattggtaatgatgaaataaagtttgcaaatatagccctccatgatatacaataaagacagctgactgctgcctgctggtcataccactgcttacggttcacattacggaggaactgcccatgatttatgaatctgccccggcccctgtgtcgggaaaagtaaattttaccaccagccatataaaaagcgatacctttgaagtgcattaccattcctgctatgaaatctattactttgtgaaaggcgacgccgattatgtggtggagggaagagaataccatctgactcctcacagcctgattctgctttctccctacgtttttcacggagtgagggtaaattctacgacggactatgtccgctgttcggttcatttctcgccggaatccgtcatcgcggagcggcgcgtccttctgctgtcgtcatttccgggaaataagaagagcgggcccggcgaggtgttttacgaaaagacagaggactatgggctctatgcctattttgagcacctcatctggtctcaaaaacagcccgatgccttaagcagttcctactatgccatgtttttagaagcgctcctggccgaaatttccctgatgtgccagactctgcgtccctctacacctgacagcagcgcctccggcacaattacagacatgatccgttatttaaatgaacacttaacagagccggtcactctcgacgacttatccagccgctttttcataagcaaatactatatgaaccgcgcattcaaaaaggccaccggcaccactgtcatggattacttaatctacaagcgcgtcgtcatggccaggcagctgatgctcaatggttttacggcctccgatgcggccaatgagacaggattcggagactactccaccttttaccgggcatataaaaaggttatgggatgccgtcccggagctgaccggcctggaaaaacctctccgtatacagacaataaaatggaaaaagcacagggaaccaaagcttaaatggttcttctgtgctttctttttacaagcgttttgccgatactgcgcagatcgtatccgattcccctgtgaacggccttccacacacatcgtcaaaaaacgcaaccgtttcaaagccggcttcccgcagttctctctccagtgactccgcggtaaaaagctgattccagttattataacactgacatgcatcgtccgtaacgatcacgtactgttcgacgtaattattcgtttccggatactgataattgcgctgaatacatacatggggttctcccgaccaaaagccctgatccagatactccacggatttcatttctttcaatttcgtaccatatttcatggaatctccatccacaatgaatattccattattctttaaggctttatatattttttgcagtagtacctttctgttctccggaggaagcacgccaaaatcacagtaaataagaacagccgcatcaaaaacgtcctggtaatccatatccagatagttccggttttcatattcgacaggaagcttctccgcttccgcatgttccatggcgtacttgatggagcgcctggaaaaatcgaggcccgtaacggaaaagcccagcctgctgaatttttctgcgtagagcccgggaccacaccccaaatccagcagtctcattccgggcctgacattacaatactgtgcgatccattccgccgactgttcgatgaagccatggcgcctggaagccgcatccagctccgggtcgaggtgagccttcagcatatgcttcgaaatatgttcatcatcccagaacggggccgagcttggcgcgtagagagccggtttttcctttaaataattgataaattgactgtacatagaacctccgtatcatatttttacttcgatgtattttactaagtatactctttattctctatgggacgcaaccctgtaaaatattttattttcctgtcacacacgtacatctctgttgtctaactttacaggaggtgaatttgaaacagcataaataatcaaaataaaggaagagggattaaaattgaaagaacttttactgactctgctgatcggcattgcggccggagtaattgacgtactgcccatgatcaaaatgaaactcgacaaatattcggagatatccgcgtttgtccattatcttatcgctccgtttatcatatttaacacggagctcttcggtatggcatggtggcttaagggcggtgtgatcaatctggcgcttgccattccggttgtcatacttgcggcaaaggacgataaaacttccgcgcctccgatgattgtcatgtccgttgttttagggactgtgattggtgttgtggggcattttacgttttcgtgatcaatgcgccttaagccaaggcgtcacaacaggcaggaccatacgctttatgcgtacatcctgcctgccatctctatccttacatcttacaaactactgtcgaaaccccttttatggatttacacacttaccattctcatcaaaccgatagtcttttccctgataagtgatcccatcttttaccatacttcccgtctgatcaaagtaataccagctgtccttataatactgccactgattggccagcatactgccgtcttccttcaaataataccagctgccgttatccaggaaccatgcttcgctcaccatggctcccgaactgcccagcagataccagctgtcatttaagaaaatccagccagtctccatatagccgttatcgttaaaatagtaccattggccgttaatctttccccactggtttctggcatatccgcccgaatattgggagaaccaccagccgtactgatcctgtttccactggccgtagattgtattctctgatgccctgactacttttctggaggagccgcttccactgccggaacctcccgtacttccgccgtggctgccggagccgcctccgtctccggtatcgccttcatctccgcttccgccttcatctccgcttccaccttcatctccgcttccgccttcgtttccgcttccgccttcatctccgcttccgccttcgtctccgcttccaccttcatctccgcttccaccttcgtctccacttccgtcttcgtcttcatccgccacttcattcacaaacgccagatgtcccatatccgtcagcaccacggtcagcatttcatcctcaagttctgtctccaaaactttcggggaaccgtttttccagtacagaacgtatatttcccgctccgcgtccagtccctggggcagtgccatggttatcatgacaggggccagcggcgccgcagagtttttaattcgttttccctcttccgttctgatctgtaatgcagcttccgttacaaccgcgttctttttatccagcttcacagtttttccatttaccgttacggtgtccggaatggctgcggaagacttcttccactgaagcaccgcgttggaaggacttgcagtcttcgatggaacgctcagcgcggctcccaccacactcatggaagtgtccatcacgccctccagagcttcaggcatctctgcttccgtatccaggacatgttcaaaatactcctgataccgttcttccagctcctcctctacctccaggaatcccttagagaccagttccgcattggaagcggtagccaccgctgcaactgcctttttcacttctcttctggctgcctcttcatcctctgcgagaccgctgtccggagaattgatctgttccagcagttcacggatgaaggagatgatctttcccgtctccgagaaatccggttctttcttaagaccttccatggcctccttaagtctctctgcggctccctccacgtctgcgtcaatctttttcgactctaatacgtttctggcctcttccatggctttctcaaaggcctttcggctctcctccgtacagccctctgttttcagggaagacgcctcttcctccagttttaccagttcttccttatccatggcgacaaccagacggaagctgtcaatcatgaccacatccgattctcctaaaggagcctcaaaccgaagctcatcgccctccttcagttccagggcaaccggccgttccgcacagacgataccgtctcccgtgtttccaaacatcatgttttccacgacaatttcaccgttgacgctgatgttcaggcagcgttctttagaaagctggttggcatagcgcagaatcagtccgtccgcgtcgtgctccaccgtataggaccagtaagcttcctgcgtttcgccggtactccagtttttggaattaagccatatcagcgtctcacctgccgcactcttcgtagttcctgccacgtatccgttgataccagcctccccgtcttccgcctggaattcaagttccgccggcaaagctgacaccgtgactctgcacgtatcgctgatatcgctgtccccggctgtcaccctgaccgtggtcgttccgattccggttgggatcaccacgccgtcttccacgcgcgctaccttttcatccctgctgctccacacgagatcacctgctgctgcatgctccggttccatcactgcttccagcacttccttcgcctgcccgacaaactgcagcgtctccggttcgatggtgataccgcttaatatcatgtctgcatcaattcttgtagatacgtaatcaatcatggcgacttcggattctcccgccggggctcttaaggacagccggtctcccttcttcagcgcaatctgcagttccacctccgcaaatgtaaaacggtcgcctgtcggttcaaatacaacgccttccatgaccggttttccatttacgtaaatatccagatagcggttcgtctgcttctcattggcatggcagatcgtgatatgagtggcatcactcttaatattgaaagtcagtccggaattctgatttcccgaatcattgatccagacaaagcttccgcctgaggcaccctcatcactgattgtccccgtataaccacttcgttccgctgcttccgcctcgtaacagggtgtaattgacagatagtcgagatacagcccgtcaacaccgtttccttccaggagaatagtccccgcatttggaatctcggtctccgcttccagagttttatactcatcgcacggctcaaaatcaatggtctgaatctcctggccattgagggtcagtgtgaggctctggctcctctctcccggattcttatagcagacggtcaggcggtttccgccgttcatatattctgcttccagagacgcctcttctccctcaaacagaacagccttctttcctgacgccttactgtctgacacgatttttgccgtcccgcttaacttacagctctctgcctccgcaaagacccgttcctcctctttcctgtccgggtcaagaggcggattttccgtgacagaatcattgagatccagagtcaggttgtcaaaggtcacatctgcctgatttcccgtaatcgcaaacttattttcaaagatcaggatataatcatcggcagctcctgttcggaacgagattttctcctccttcacctgtccctcataaccttttaaataccggttgaccagcacttctcccgtactctcggaaagtatcgtatacttccagccattggccggcccgcagctggacttgtaaaggaaagaaagatcgtatcccgtgtcgggcttaaaccttaaggttcccggctgtgtcttgattttgctggcattccggcctcccattaagaggctcatggagccctccagagttacggcttcattgacaccgttatttgaatacgcaagtcttgccatctccccattttcatggacaaacggtcccatggaatgactggtctcgaaattttcaaaatactcgtggccttccgctccattaggatcttcctcctcatagatacggatatcatcaaagtaaactgctccgcttccgctcaaaccggccagagaaacgtcagcttccccgctgtcagccgtaaaatagacacggatctggctccagttgtcaaacgcatttcccataaccgtcttcgtatcgtaatcggcggaatactggctctttttgacgcctccgcagtcgatttccagcattcctggccgttttccgctcgttttcaccatagcggaaaccacgtaaccgcggccctgctccagaccggtaatgtgctgtgttactctgctttctccagccactgccagataatagttgctgctgccgtcatccttgcggatctccgcctgtgatgagttctcgggaacccaataccggaaactgccgctgttaaaattgctatccttaaccggcaggccgtctccccataccacttccttctctgatacggcttctctgtaaaggacgtagccgcagcccgcctcatactcaatggtcaccctgccttctgtaaccggaacctctttcaccaatacttttccattggtttcgtccatgcggtacagccagagactgcttaatcccttccagctatccggcagttcccactgacggcttccgcccgtactccggtatgtatagattttttcttcctgttccggatcccatggcataaaaatatcctgcctgctgtcattgagctctgcaaacacgattccatttctggatatcgtccgcctggaaccgtcaaactcagattttactccgccctcaaattcagcggttctgccgacgccgtccgctgcttcccgaatggacagaagggggaaattctttaaatacttatcagccagggtgtgctgccagaattctgccaccatgccgtccaccgttttctgagattccgaccagcccaaaaatccgtatgtcttctgatacccgggccccagtacctcctgggagtaatccgtcccggcctcatagatcgcctggtcattgatgataaaacggcgaatatcggaatttccgtgattgcctccgccgttctcttccccgtaataatacgtatggcaccaggtaacgtacttggggcttaaggccgcggtagtggtgtcattgagcgtatattccacatagcccttatacatctccgtgaaatacgtccagtccatctctttgaatttctgcagcgtcttataggtcgtccacctgtcttcttttctgtcccatctcgccgcggatacatccagatactggaatttcatatcagggaattcatttttatgcgcctcgtagcggctgtccagcaggccgctctcccaatattcgatatcatccaccgcagtgccgccgcggtctacgaagtcccacacacctccgttatatttcggagtctcctcatagaacggggattccggatacgcctccacggaatttgtgtggcttcccacggtaatattatactttgccgcctcctcgataagccagcggaactgatcatttccacccagcatggggttggtatccccataggatggccacccatcaccatactggcggtgagagccttttaccagcataatctgtggaaatgaatccgtggccagtgcctggcgcttcacatagtcaagcccgttctcccatgtccacggcagtcggccccagtaatttaacaggatattgaccgctatggtctgccgtcccagattttctccaatcatgggatccatgatcttccggtaagcgacggcgccgtcctgccagtttaccacaccgtctccgttgcagtcgtctgtaatggtgattttacaccagggcagattcgtgacagaaccgtccgggccgcggtacatgaaatcaatgttggaaaccgacgtctccttcactccgcccagatccctggtctgcagataattatactggcaggtcatatcggattccagcgttgccgccagctcctccgtgttaaaaaacacgtgtcctacctttttcctcgatgcatccgccggtttttccgacgccttataaaaatggtctccattgacgaaattgtcattatagactacctctccccccgcctgatcgccgcggaccgagagcagcccctgatccgggaattctaaatacctgactttttcctgcggatcgctgatttccgtcgcttccatcgtaagaacacttccgtcaagcgtaaatgccatggttatggtgacgccgtcaagctccgtcccggaaaaatccagttcatattccatggtctttccgctctgatccggccttccggtgacagccggttcatagtcgattccgttgatccttaccttcgtcagttctctcggctgtccgtagaataccttgtctccatcgttccatttgtattcaatcacccggggaaatcccatatccatttccacattcattttatccccggttaacgttaccgtgtccgccgcccggctggccagccccggcgttccgcatgataataccatagctgccgcccccaaaaccagccctttccaatacgttttcctattcatctcttcctcctcttacaattcgttccagtgtcagctctgcggtcgacgtaagctccagatccggccgtaccgtccggacctccactccgatccccaccgcgaacattctccccgccttaattgcttcgatccctgcctgggcatcctcgattcccacacactgttttggcaaaatccccagatgtccggcgcatgtaagaaatatctccggatcaggctttcccctctttatttcctttgccctcgccacatagtcaaacctgttccgtatttcgagacgctccagcaccgtatccgcattctcactggcagatgccaccgccatcttaattcccgcattctgaagctgatctaaaaatgcagctattcccggcaggatatcctggcgggtcaaatctttcagaagtctttgatacgcttcattcttccagccggccagaaaggccatcttatccggagtataagttccttcccttccattttcccgaaggatgatttccagagagtgcatccggctgacgcctttcagctgctggttcatggaccggtcaaaatacaggttttcccgttgtgccatctgcttccacgcctcatagtggcatgcagccgtatcagtcaggaccccgtctaaatcaaagattacagcctgcggccacatggctttctcctcctcgttccaccgttatcatatcctgatcctcttcaagaaccgcgtgttttccttcaacccacacgttcagtccggcaccggccgtaccctggcctcccggccgttccttcccgccgccgtctgttttcctgctttctgccccgatccgcttcaccgtcacccgggttccggtaatctcaatgcgagccgtcacgcccccgaaggaaccggcaatctccaaaccgctccactgcaccggcagatgcgggttgatcatcagagcgccattctcgaagcggacgcctgcgaacccgaagtaaaccgcctgccatgtacctccaaaatttgcaaaatgaagcccgctgaccgtatttaactgcgtatcctcgatgtccagacatgccgaacggcaaaaataccggtaagcctcatctgtccttccaatctgcgccgccagaatactgtggggcgcatagcttaaagaactgtcgtgtgccgttctcggctcatagaaatcataggccgtccgcttctgcttattcgtaaatctggatggatacatggccatcatcagcaccacatccgcctgcttcgtcacctgatagagcggcagcgcctcatatggaagtgtcgaatcaatgattctctttccggtgggcttcgcccgcttcatatccagctcccgtcgtttgaaatacgcatcatcctcttcatagagatcccgttctttacagtatggaagtttcagcccttcggcgattttcttccactgctccgcctctcccggcctgatgaaaaatcgcttttcagcctcctcctcccgttcccttaccgcccggtaagcagccatcagattttcagcagccgataaattggtgtaagcgttgttattcacatagacgtcgtactcattcggtccgcggaccgcccggatctcataaacgccttcttccccgttccaatcgcatctgctggcgaaaaaacgggccgtctcgatcagaatctccattccataccgctcgtagaattcccggtctcccgtcacccggccgtactccagaaccgcgtgtgcaatatctgaaacgatatgaacggcataaaacgcccccacgttgtatggagtctgctccacaccctcctcactggcctgccagggatacatggccccgtcaaaccagttgcgccctgcatggcgcctggccgcgtcaagcgtatgatagcggaacttaagcagccccgccgccgctcccggattggtatagataaaaaacggaagcttgaagatctcattatcccagaagacacagccctcatacatctctccgcttaagccgcgcgctccgatgcttaaacggtccgtatgttccggacagacagccatcagctggaacagattatagcgaagaaccgcctggtcctttaaggcatcgggattctccgcctggccaacccttatgtctgacagaatccatttcttcgcccacgcctctctgtgagcctcctccgcctcatgataaccgggcagttcggcctgcgggcagctctccttccccgtcgtcacacggatcattttttccagacggaagctctctcccttttccaggcggcattgaaacaggattcccgcctccgcctccccgttggtaagacttcccgtaagctctctcccggccgcaaacgccctggccttctgacacatatggatttccgtctccttataatccagcatgacatgcaggctctgttccccggtctcccatctggtgatgtgatttctccccggctggaccggcagcggctcacagctttccagatttaaatttgtcacccgcccgtcgatcgcagcttccacctccagctccagcccatcttcctccgcccggatctcgatttcctggccaatcacgtttttccatcgttcatccatgactgcgaagcgccggaaggcgagagcagcttttgcaccttcctccgtgtaaggataccttctctcataaatcccctgcttcatatcgagtttctgaaagaagcccgcctccccgttttcctgcagaccgttttcccccggcccctctgccggccggccgtttatcttaatcctggtccgcagtgcatttggcagattacacagctcccggctgtccccttcccaggccccatagcttcctttcccaaagactcccgccgaatagattcctcccagggcagagatccccctgccatcctcttcaaaaaatccacggataccaaagtacccgttgccaatggtaaacagcgcatcccggctctgccgctttgcctgatccatttcctcattcacaatcgaccatgcttcgtatctcatcgttcacctatcccttaattccgtctgaagcgatcccctgaataaactgcttctgcagaacgagaaacaggatcagcacgggaagtgagatcaccacaacccccgccatggtcagattcaaacggttgaaaaatgtgtcctttaatgtattgagccctacgaccagcgtatacttctcctgactgctgacaaacgtggacggcactaagtacgcgttccaggactgtgtaaagttaaatatggtgatcgtcgtgatcaccggtttggaaagcggaagtccaatcgaaaagaagattctcccgtgtcccagcccgtcaattctggccgcctctatcaagtcgtcgggcagtgtaacgaaaaactgccttgccataaatacatagagcgaattgagcataaagggaataatcaggccgatcagcctgtcatgccatcccagctttgccaccataatataaagcggggtaagcagcacctgaaacggaatcatcagcgttaccagcacacagttaaacgcgattcctcttcccggaaaacgcagcttcgccaaagcgtatcccgccaggagcgccgtcgtaagctggctcaaaagggtcacacctgccaccacgagagtattgataaaccatgtaaaaatggggcggttgacgaaaagctccacgtaattatccagagtgaactccgaaggcggcaccagcgtattgaccttatccagaggcagcagggaattatagagcgcatacatcaggggacagataaaaaccagcgccagaagaaccagcagaatgtaaaaggcagctttctttaaatatttcaccaaatctcccccctattccatggcatcgccgccggtcagcttcttctgaaccagcgataccattaaaattaacagaaacagtacgaccgcgatggcgcttccgtatcccaccttatagtacttaaaagaattgagatagaagtacgtcaaaagtgtattggtcgctcccgccggagaccccagaccgccgcttgcgctggtcaccgctgagatctggtcgaaaatctggaacgcctgaatgatactgtatgtaacgaccagatacgtcgtcggcttcagcaggggaaaggtaacgtagcggaactgcttccagccatccgcgccgtcaatggccgccgcctcatacacctgattcgatatggtctgaaggccggacaggtaatagatcatataaaatcccacctgctgccagataaacatggttccgataaagggcatggcgtatttaacatccgcataccaggtcgtatttttaaaccccagcccggcgagcgcagaggtcaccgctccgtccttcacaaaaaggtacataaagacggtcgccaccgccacgggagccagcgtgtaggggacaaaataaatcgtccgaaacgcccctctcgcccgaaatttctgatttaagatcacggccagaagcagcgaaaacacagtcataaccggcaccgtgacagccacgaataaaatcgtatttttcaaagataaaaagaacttggggtcctgaaacatctgcaggtagttttgaatgccgataaatgccttttcgtcgggtttcgtatatgaataatcaaaaaagctgatatacacggactgtacaaacggaactacaaaccagagaatccagcacaccgccgccggcagcatgaacagccagccggtaatcatttcattccgggggattttttccctccgtttttctgttttcttactcacaatcgcgcctcttttcctaaaaaagggtataaatatagagtaccgcacggtttcaccgcacaccatgcagtactctcatcctgtttttactgatttccgtatttttcagccagcgtatctaaaatctcctgggctgtggtcgtatctcccgcgtacacatgagactctaacgccgtggaaaaatcggttttgaattcctgatccgccggatacccgaaaccggttgcctggccgatgtactcatcaataacggcaagagccgggttcttctcacggaaggagacaagggcggattcgatggagggacggtctcccgtaatctccgctctggcgatctgcgcttcctctctggataagtagtaagcggctttcgcagccagctccgcgttctcggcatccttcaccacggcaatgccgtaggagtgaagcgttacgccggaatttccattgccgccgggcatcgggataaaggaatagttcacatccggagcggattccgccatcattcccacataccatggaccgcctgtggacatggcgcacttctcgccggcaaacacctcgccatcccatgtcattcccgcatccttggcggttacagccaggccttcatcaaacattttaaagatatattccagggctgccacattctcggaagagttgatggcttttccgtccttccagccgccgccgaaggagttcatgtactgtgtcggatggaagatatttccgatatcgaggcagagtccggtcacaccgtcctttgtcaggactttggccgcgtcatacacctcttcccatgtctcaggatattcctcaagccccgctgccttccacagatcgtcattcaccgcaaatgtcgcggccgtagaggtaatcgggatggcatactgcttatcctcgtagctccatgcctccaccgcgttctgggcatagctgctcaagtcaaatccgtactgatccagcggaagcagcagcccgtccacgataagcttcagatgctgttcattggtggcgataatcagatccggcgccgtgcctgccgcaatctgtcccggcagcttctgataaaaatcatcggcgcccggatactgctccatcttaatttccgcaactccgggaaccgcctccttaattccctccgccgcagcctgtactgccttgtcctctcctgatgatccccagaatccgactgtcagcgtaattcctttgccgtcttcactgccggactctgcctggctgctttcacccgccgattttgtatcctctgcctttgctgcctctgtctttaccgcgtcctcattaccggctttggaacatccgctcatggctgacgccgcaagcatgactgacagtcccacaccaacagccgtcttaaaacctcttctattcatctgaatcttcctccttgcatttgatacgcttattttacctcaccggagcctgattctcattactggatcttgtcgattcttaagcttgctttaccactttttcttctgatgcttccgccatttttaaggcctgctccggatttttacatatcttaaactttctttacctcacggtcgttccgaaactggttgggcgtcatgccgcagacttttttgaacatattattgaaatggaccggggaatgaaagccgcacatctccgcaatctcgtaaaacttcaaattagtcgtaagaatcagattcttcgccttctcgattcttttcccgatgatataggaagagaaggtctggttcatctccttcgaaaacacccggctgaaataactgggactgacgcccagcttctccgccaccccctccagcatgatctccctggataagttctccgttaccagatcgatggcctgatgaatcagatggctgtgggagccggcgttttttgccgtctcaatctccccatccagctcctccagcttgttatacaccattgcaatggattcacactcttcaaaatggaaccgggagtccagtttatattcccgctcccgaatgctgaccgcgctgcttaacagataaccaaaccgctccctgtctattaacagccgttccttcctgcaggacaccacatactctttcacaacagagagtaaatctccctcccctccggcagcttccaggcgggcctccagctcacacgcctccgccgtcttccactgatcctgaaaccagaactggctcttatccggctgaaaaaatgactggcttaatatcagctgtgtctcctcaaacagacggttaatctcgccgatatccccatgcccccggttcaccgccaccgccaggtccagatccaggaagttctccatctgaaaacagatccggtttacgattccccgcacctcattctctgtcttcatctggctcggttcatgggaaaatgtgagaagaaccacgtaagaatccccgatccagaagttttcatgctccggatatccttttaagctttccccgaccagattatccacactgttaagaagaatccgggaatcctgattctggtagcgcatcttcaccgcttcaaatcgtttgatctcaaacagaatcatgtagattccatcacacttgatccggattccataacgcttatgtacctgaagaaactggcttttatcgatcccgccgattttcaaaagattattcagaaaatttagtttaaaaaatgcctgttcctttgccttttccagcgcctcctccaaatcggctccctcatgcttccgttccttcggtattttttccagatattcaagcatccgctctccggtcatctcattcttaagcacataatcatccgccccgattcgcatggccttctgaatcagccggaaatcctcatgacaggtcagcatggcgatatacccgcggtatccctcctgcctcgcctctgaaagcgtatccagtccgtttttttccggcatggtaatatccagaaagacaatatccggattcaggctcctgatcttttccagcgcctcgatcccattttcagcctctccggccaccacatatccgtacttctcccagtccagagacgatcggatccccatccggacaaaatgctcatcatctacaatcagtatactggtcattgtctttccccccgttttcttcctgatacacttccctcggaatctcaatcttaaccagcgtatacgttccatattcgctctcgatggaaatcccgtattcctctccgaaaatcagcttgatccttctgtcaatattgtaaatcccgatatgattgactccgctctccgccttcttctccccctgaagcacggcccttatgcgttccgccgtcatgccctttccgttatcccaaatctcatagatcactctgccgccgctctcatatatcttcacacggatgagtccctgcccctccatctcgtcaaacccatgaaacacgctgttttccacaatcgtctgaagcatatatttcagcgtgcagttattgtaaagcccctcgtccacctcatactcaatatcgaatttgttgcagtaacgcagggtcagaatctggatataggactccatctgccgcagttccagggaaatgggaatcttctctctccgctcccgtacggcgaaggtcagaatattggccagacagtccagcgctttttctatggagcggtttccctgaaggcaggccagccacttgatggtattgagggtgttgagggtaaaatgaggagaaatctgagcctggagcgcctgatactccatctcccgcttttccgcctgctcccggtagatcttgtcgatcagctcctttgtcgtcttcaccatactgttaaaggatccgcagatctcctcaaagtctccggcgccctccacggtggaccgtacctccagattcccgccgcgcacttccttcatcagcccgttcagctcggcaatgggcttcattatgcctttcgtgagaacattggcagcgataaatgccagcgcaatgcaaaaaagtcctgccatgacaatcaggaaaatggtccggtaggcatccgcataaataatatgctccgggaccatcgtgatcatggtaaccccatatttggatgactgcgtgcggatagccagccgcttttcacgatccagtgtgacggtccccaccatgctttccccgccacgggcggagagttctccgtctttatactcctgcttcgccagcttttccgctggaagagagctgtaaagcagccggtcattttcgtcaagaacgatgaattcgctttcctttgcaaaattcttccggttccagattttctccaaatccttcaccgctatgtcgatccgcagcactcccagcccctgatccgtgatgtgattgatcaacagccgccccacagagataatcggctcttcccccaggtaaaggtcatccttcatctgaggcagcagcaccggctccttgccattggtgtgaataagggtctgaaaccagtctctcccgctggcatcatcgtagcgggccgtcttgcagaaacgctgtttggaatagacgacatcggtattaaaagggatcagcgtaacggaatacacatactcgttcctgtaaaacatctccgcatacagttttccatcgatcgtatccatatcgcggtaaaggtaaaaccgcctcaccttgtcctcatagtccttctcgtaatccttattgagaatctcatagatttcgcggtccatgagaggaagctgtgacatggtgccgaaggaatccagaagattgtcgaaggtaatcagggtctgctgattgactgactggatagactggactgcattttccttcagagaccccgatatatacgcggtaatgattccggtgttcaagaccaccaccagagctaccagaaaaaatacggtcagcttcactcttgtcttcagtttcataccttccccctgtccgcgcagcggccttctgtggcagaaagccctttcccgcctgtaattattattaagtatatccggctttccgcggccggacattaaaatatcttattaattcttaaagtatttttacctccttccatcttaccacctgcccccggaaaacgcaaagctgttcctcactgataagagtattctcctgtttcaccaaaaaagagagcacacggctggccatttactggatagccatccgtttgctctctcttaatccgtaaaccgcatctctgacggtttaccagtctttccttatctcttcacttcaccaaaatccggattcccgaacatatctccaaatccgtctcctgcgtctttcttttcttccgaaacggcagatacctcaccggccgccggattctccagggtaccggaattccccgtaccgccgtcattccccgggcttcctgcctctccgccgttcttatctccaaacgtatccttatggcttaccacgtcatccatcttatcggcgtcggatttctccttctcctccggctccggaatccccttcatctctctgaaaatcttcatgaattctttgccggtgatggtttccttctcgatcaggaactcggcgatcttatccatcacatcacggttctctgacagcagggacttggcttcctcataagcttcctttaacatcttcatgacttcggcatcgacctcggcagccgtggcgtcaccgcagttcataacagtacggccggttaaatactgatcctcctgagtagctaagcccatcagaccgaacttatcggacataccgtactgagtaatcatggcgcgggccactctggtggcctgttcaatatcgttggcagcgcctgtggtcacagtatcaaataccagctcctccgctgcacggccggccagggctccaaccagcatggcgtgaagctcttttttcgtatttaaatatttctcttcttccggcacatgcattacatagccgagagcacccatggttctcggaacgatggtgatcttctgaaccggctccgcatccttttgaagggcgcttacaagagcatggccaacctcgtggtaagacacgatgcggcgctcttccttattcatgattctgtctttcttctctttccccacaagcacgacttcgaccgcttcaaacaagtctttctgggcaacggcctgcctgccgctcttaaccgccagaatcgccgcctcattgatcatgttggcaaggtcagaaccaaccgcgcctgaagtggccagcgcaatcgcgtcgagatcgacgctctcatccatcagtacatctctggaatgaacctttaagatatccacacggccttttaaatccggcttatccacgataatacggcggtcaaaacggcctggacgcagcagcgccgggtctaagatctccgggcggtttgtcgcggccagaaccagaagtcccttggaggaatcaaatccatccatctcggacagcagctggtttaatgtctgttcccgctcatcgttgccgcctccgaatctggaatcacggctcttaccgatggcatccacctcgtcaatgaaaatgatacacggcgcggattcctgtgcctgtttaaataagtcacgcacacgggaagcgccgacaccgacgaacatctcaacgaaatcggaaccggataacgaatagaacggaaccttggcctcaccggccactgccttggccagcagcgtcttacccgtaccgggagggcccacaagcagggctcccttcggcagcttggcgccgatcttcgtatattttccgggattatggaggaagtcaacgatctccgtcagcgactcctttgcctcgtcttcaccggctacatcgcggaacgtaactccggtctctttctgcacgtataccttggcgttgctctttcccacgcccatgataccgccgcctccgccgacacggcgcatcataaagttaagtaaaattcccatcaggccaaacagcagcagatagctgacaatggtctggataataaagtttccgtctttccggatcctgtgcgtatcaacgccggctgcccggagtctctccgccagagtcaggtcattatccattcgcacggtataatatgtcttcccgggcatgtagccttcccaggtcttcttcggctcaattgtaattctggaatcctccacgcttacagcctctacctgcttctcatccaccatgttcataaatgtatcatagctgagctcttccgtagttctggcggagagtgcgttgtgcaaataggacagccctgccaccgcaattaaaaaggtaatcacccatgcaataatcacctgtgcgttctttggcatcttactgttattattctgattgttgttgttatccatatgtgtaaattctccaatccggatattctatacccattctatatcattatagtgtcagtctctccataaatcaagaaaagaattataaaatccttataaagagatctgcattccatgccattttaagacaaattttacacttaataatcgaaagttttttcatgaaacggtggatttctgaaataattagttgtataatatcgtttttattgaatgacacatccccaaaaacactcaaggaggtaccatttttatgccagtgaaatacgtatttgtcaccggtggcgtcgtgtccggtcttggcaaaggcatcaccgcagcatcccttggccgcctgttaaaagcacgcggctatcacgtcaccatgcagaaattcgatccctacatcaacatcgaccccggcacgatgaatccggtccagcacggtgaggtgtttgtcacggaggatggcgtggaaacggacctggatttaggtcactatgaacggtttatcgatgaaaatctgacaaaaaattccaatgtcaccaccggaaaggtatactggaccgttctgacaaaggaacgccgcggagacttcggcggaggcacggttcaggtgatcccccacatcaccgacgaaatcaagagccgctttcaccgcagcggagaacggactcttccggatggcgaaccagcctcatggggcatgggacagaacggctccggcaaggagggctcccaggaatcggatgacatggagatcgccatcatcgaggtcggcggcaccgtcggtgacatcgagagccagccgtttttggaggcaatccgtcagttccagcacgatgtaggccgtgaaaacgccattttgatccacgtgacattagtcccttatttaaaagtatccgaagaattaaagacaaagcccacccaggccagtgtcaaggatttgcagggtatgggaatccagccggacatcatagtctgccgttccgagcttcccctcgacgacggaatccgcagcaagatcgcccagttctgcaacgttccgaaaaatcacgtactccagaatctggatgtagaggtgctctatgagctcccattagtaatggaacaggagcatctggccgaggttgcctgtgaaagccttcggattccatgtcccgaaccagatttaaccgaatggagctccatgattgaaagctggaaacacccgcaaaagcaggtaacggtcgctcttgtcggcaagtacatctccttacatgacgcctacatctccgttgtggaagcgctgaagcacggcggggtagcaaaccatgccagcgtatcgatccgctgggttgactctgagacggtaaacgacaggaacgccgccgaaatcttcgacggtatcaacggcatcctcgtacccggcggctttggaagcagagggattgaagggaaaatctccgcaatccgctgggctcgcacccatggaatcccgttcctcggcctgtgtctcggaatgcagatggccattgtggaatttgcccgcgatgtcgttggttaccgtgacgcccacaccgcggaactggatcctgacaccagccacccggtcatccatctgatgccggaccagaacggcgtcgaggatatcggcggaaccctgcgtctcggttcttatccctgcatcctggacaaaacctccaaagcctatgggctgtacggacaggaaacgattcacgaacgtcaccgtcaccgctatgaggtcaacaacgattaccgccaggccttgacggaacacggtatgaagctgtccggcatctccccggacggacggatcgtcgagatgattgagattccggatcatccctggttcgtcgccacacaggcccacccggaatttaaatccaggccaaaccgcccgcatccgttattttcaggattcatcgaagctgctttaaggaatcaggaaaaataaatttttcagtgatcctgccgcccgcataaaatacgaatattggttatactatcaatatgattaattatgggggcagacggaatcgtgactacagatcaagcagtgattcttttaagggcatacgccgcctgtatgctaagtgaaaattgctctgactgtccatatcagggaaagtgttccggctggacagaggagcagttgctccaggcattgcatcatttaaatacagaatccgcagaagagtaaaaaattcaaaataacggacaggaaaagctgatacccagtttttcctgtccgttttctgcccgatttatggaagcctcctccagccatggccacgactcctctgcgtcctctccggctacgggatcactctccgtatggtcaccggctgcctgtaattccaggctgatatcttaatgccgcttctccggttggccgcatggacgatttttccgcctccgatgtacatggcgacatgatcgatggtgctgccgctggcataaaacagtaaatcacccggctgcatggctttggaagagactgccatcccctccgccgactgttccctggaggttctgtctaaatgaatgccggcggcgtgttccatgacatactgcacgaaaccggaacagtctgctcccgtattggggtttgtccctccccaccggtaaggattgccgacgaatcgcacggcgtagttcaccacctgccggcgaagggaattctctgttttttccgcctccggtatggtataggccaccaccgcattgcccggcacacaggcgtaaccctcctgttccccgtagcggatcttaatccagccgcctcccgctctggaaaggtaatcatacgtctctccctcgtgaatccgtcccagaatctcagaatccgtatccggagcgctccggaccctcagggtatccgtatttacacggagcatgagcttcatatcacaataggccgatgctctggcagcctgtcccacggcgagatacttacccgagacgtaaccggtcacctggcccgatcttatcttataccagccatgttccatccccagcacgctgcatccggcgtggctttccatctttccaacaatctccgcgtcattctttggttcttttctgatgtttaaggaatcctccaccatggctacgccaaggttcttaaaaatatcacgaaaggttccaaacaccactttttcctgcgtaagagcggcaggcgccgcctgacttcccttttcctccacagacttaagatgcctgtccatggccgtcccgaatcccgcaacagaggttccggacgtgtaggaaggttccggctttgccgcctgtacatctgctgtccccaggaccacggcactgccgcaggccaggcaaaagcccagcattttccatgctttgtcagtcattatgcacattccttcgcaagttattattctgttttgctgtatctgtttatgataaatgagtaatctgctgatccgacaggttcttcaaatacgccagagcgtaatccctgtctcttcctatctgcgccttcagctgctcaagtccgtcgaatttcttctccgggcgtataaaactaagcagctgtacctctatattcttcccataaatatcctggtctataccatacagaaacgtctccgctcccacaggggattctccgctcaccgtcggcttccttccgatgttcgtcactcccccgtaataagtaccctctacatagacctttgacacgtatacgccaaacgccggcagatgcttttcaggcggcggcagaatattggcagtcggaaatcccaggacgcttcccccgatatgatttccatgcactaccgttccgtggatggcatacggctcgccgagaagctcgttcgccttcacgatatttccggcatccagctcttccctcacataggtactgctgatatcccggttgtcgtcccgttccttgcggatgacgatcagctcatacccgtacttcgccttccacgcctcgaggcagtctgcattgcccgcccccttatagccaaaagagcagtccgttccgacgacaatgaccctggcgtgcatacgcgaaaccaggatgtcccgcacaaagtcctccggcgccatatgggccgtctcctccgtaaacggatactccactaaatagtctatgccgattttttccagattattccgtctttctaaattggtggtgatgactgtctgctgttttcccgccaccaggcttcccggcgtcatgtcaaaagtaaatacggccgtcttgagaccgcgctccgcctttacctccagcatctgctttaacagcttctgatgccctctgtggcgtccgtcaaactttccgatggtcacgactgagggctcctgaatctgaaaatccgttgtttcggttatatattccatcatttgtttcctcccagaaaaaccttctgaggcttcagtacatgtttctctctgtccatggcatagatcccgataaaacgcccctggctgtcgtagactctgactgggctgccctgcacagggaagtccccttccgcctgactgcggcggaacgcattgccgttatggaccagcctgtcaaactcttctttcatcgtaagagccggataatcctgaaacactgcgtcgacagaaagaatgtgatccgcaagtccgccgctgtctctctgcctttcaatctcggatagcgtcaggctgtccttcaattcaaactgtccgactctcgtccttaagagagattccatacagccgccgcagcccagctttcgtccgatatcataacagagtgtgcggatataggttcccttcgtgcaggacaccgtcatggttacacggggcagggcggtctcctccacgcagatatccaggatcttcaccggcctcgccttccgttccacttctttcccggcgcgggccagctcatagagcttcttcccgtccaccttcaacgcggagtacatgggcggtacctgttcgtaatcgccctgaaagcttaagactgccgctctcacctcttcctccgtcacgcttaccggatactcagcgagcgtcacccctgtcgtgtcctgtgtatcggtctcaagacccagcagcagcacggcgcggtacgtcttcgtccggtcagtcagcatatcgcagagctttgtgccgtttccaagacagaccgggagcaccccctccgcattggggtccagcgtaccggtatgtccgatttttttctgttttaaaatacctctcattttcgcaacaacgtcatgagaggtatagcctttttccttgtatacattgatgataccgtctgccatctttaagtatctccatttatttgtgctgaaatccgtgcggataagttgttgacgacatcgtgaacacttccggccatcgtacagcccgccgccttcacatggccgccgccgccgaaatacacggcgatcttactcacatccagatcgttggtggaacgcagactcaccttgtattcacggcaggccgtctcgtacatgaaaattgcacactccacaccctccgtaatcctcagctgatcgataattccatccatatcggcgctggtcacgccgtagaactccatgtccctcttgtgaatgacgctgaagatacagcggccatccaggaacgtaatactctccaaaagcgcacgccccagaatctgattctggatgtacgttttccggtaaaagctgttgtcgatgatatgggggaaatcgattcccttcgccatcatctttcctgctatttccatggtctttgcagaggtacagtcgtatttaaacacaccggtgtcatggatgataccggtgtaaatacactccgccaccgccttgcttatcttctcttcatccagcagaccgaagagaacctcgcaggtggagctggcccctgcctccacgatattctgtcccgcaaaccctgtattggtcacatgatggtccacgcagacactctttttggcgctgtttaagtaccgcaccgcctcaccgaagcggagcacgtcgctgcagtctaagcagaggcagagatcaaactccgcctccactgaaaaatcactgcagatacggccgatattctttaaataaccgaattttatggagggttcctctaaaaagacggtcactcggacatcaggataatgttcttccaggtaattgtacgctgccagacaggatccgatacagtccccgtcggggcgaatatggcccatgatggccatcgtctcaacaccctcaagcatggtatcaaaaaagctcatggaaacacctcctactctttgatatctttcgttacctcgtcaatcagcttcgacatatttaccccatattcgatggactggtccagaataaatttgatctccggagtattccgtaaatttactcttctggccagctcgcggcggatatagccctccgcgctctttaatccctcgatggtcgccttgccggcctcctcgtcgcctaaaatactgatatatgccttgcagaattttaagtccggagtcaccgagacggcaaccaccgtcgtcatggggtgaattctggggtccttgatctccaggcggataatctcgctcagttctctctgaacctccatattgattcttgtattctttatactgtttttacgcatgttattcctttcgttttgccgctccgccgtccggcgggattccccggcttccgcttaagacctagcggggaacctctaccattgcgtatgcttcaatcatgtcgtcttcctggatgtcgttaaacttctcaaatacaagaccgcactcgtaacctgtcgccacttccttcacatcgtccttaaatctctttaaggatgccagcggtccctcatagatctgctctccggcacgtgtaatacgtacgctgcagcctctctggaacttgccgtccatgacgtaggaacctgcgatcgtaccaacgccggaagccttgaaggtctgacgcacaatggcgtggccgatgatctgctcttcgaatactggatccagcatgcccttcatggccgcttccacatcctcgattgcctgatagattaccttgtaaagtctcatatccactttctcgcgctccgctatggacttcgccgtcacatccggtcttacgttaaagccgatgatgatggcgttggaagcggaagccagagatacgtcggattcgttgatggcgccgacaccgccgtggattacttttaccataacctcttcattggacagcttcacaagactctgcttcactgcttccacagaaccctgtacgtcagctttaacgatgatcggcagttccttgatgttgccggccttgatctggctgaataagtcatccagtgataacttagcttttgtatcttccagtaatttattcttgccttcagagataaatgtctctgcgaagtttctcgcttccttctcgttcacagtacctaccagaacttcgcctgcgtttggaacatcgttaagtccaagaatttccaccggtgtggatggaccggcctctttgactctgcggcccttgtcatccatcatggcgcggacttttccgtagcaggaaccggcagcgacggtatctcccacgtggagaacgcccttctgtaccagaacggtggcaaccgggccttttcccttgtcaagctctgcctcgatgatcaaacctcttgcatttctgttcggattggctttcagttccttcacctctgcggttaaaaggatcatttccagaagctccggaattccttccttcgtatgcgcggataccggtacgaataccgtgctgccgccccagtcctccggaatcagttcgtattcggataattcctgttttactctgtcgatgttggcactcggcttatcgatcttattgattgccacgatgatctctacgcctgccgccttcgcatggttgatcgcctctacggtctgcggcatcacgccgtcgtccgccgcaactaccaggattgcgatatcagtagactgtgcgcccctcatacgcatggccgtaaatgcctcatggcccggggtgtctaagaaggtgatcttctgtccattgatttccaccatgtaggcaccgatatgctgagtgatgccgccggcttctctggatgtcacattggtctgacgaatcgcatcaagaagagaggttttaccgtggtctacgtgacccattacgcagactaccggaggtctggcgaccatatcggcctcgttctcctcttcctcttttaagagttcttcaataacgtctatcttcacttctttttcgcagagaacttcgtattccatggcgatctcttcggcctgatcaaaatcaatctcctgattcagggttacgatctttccctgcaggaacagcttcttaacgattgctgaaggctgaagcttcatcttctccgctaattccttgattgttaaaatctcaggaaggacgattgtcttaacgacctctaccttgggttcctcgtgtaccggcggctggatcggcgctttaaacttgccgcccttacccagctgcttctttgcatcgtcatccttgtctctcttatcaaatctgtcgttcttatatgcgtttttattgcctctgttgctcgttggctttgcctgaatcggcgtgtcaaaggattttgctccgccgtctcttcctgctcccggacgtcctcccggtccctgcggtctgcctccgcgattatcgcggtttccctgataaccgccctggccctgcggccttccgtcacggtttccctgatagcctccctggccctgcggtcttccgtcacggtttccctgatagcctccctggccctgcggtcttccgtcacggtttccctggtagccctggccctgcggtcttccgtcgcggtttccctggtaaccctggccctgcggtcttccgtcacggtttccctgatagccctggccctgcggccttccgtcgcggtttccctggtaaccctggccctgcggtcttccgtcacggtttccctggtagccctgaccctgcggtcttccgtcacggtttccctggtagccctggccctgcggtcttccgtcgcggtttccctggtagccctggccctgcggtcttccgtcacggtttccctggtagccctggccctgcggtcttccgtcgcggtttccctggtagccctggccctgcggtcttccgtcacggtttccctgatagccctggccctgcggtcttccgtcgcggtttccctggtagccctggccctgcggtcttccgtcacggttcccctggtagccctgaccctgcggtcttccgtcgcggttcccctggtagccctggccctgcggtcttccgtcacggtttccctgatagccctggctctgcggtcttgcagatgaatcctggccggtacgtgcgtctgtctgcggaggctgagcctgcggtgacggactagcagaagccggcgcctgaggagtctggccctggcccggtaaaaccggtgtcgtctggctctgcgctgcctgtgtctgctgcggttttaccgcgttgtctgctgcctcacgcggctggacactctgaccggatacggtggtgtttcccgcggttctctgctcattgatgccgctctgattctgcggtcttccgtcacggtttccctgactctgcggtcttccgtcgcggcttccctggccctgcggccttccgtcgcggcttccctgaccctgcggtcttccatcgcggtttccctgaccctgtggacgctgcggcttcatctgcgcgttctggggacggaaaactgctgctattttcttcttgtgcggctctcccgaaccttctgttttagctgaatcttcacctgccggttttgccggggccggtgcgttctgccttccctcgctgctttttgcagcgccgcccatcgcttttctgacgatagacgcctggtcatccgttatattggatgaactctttaaatttatatcgtgcttttccaggatatccagtatctctttactgctgtcttttcccagttcttttgccagatcatatactctcatacttactacctccatttgtattcaatagtttcacgactgcttttgcgaaccccgcgtccatcatgacaagggaagctctcatttcctttcccatcgcatggccaagctcgctcttttttccgaaaaagtagattggaactttatagtaagtacacatattggtgaacatctttctggtattgtcagaagcctcctccgacacgatcaccagaaatgcctttccactcttcacggatttctccgtcatgaattctccgcttgcagtcttcccggcctttgtagccagaccaatcagattaagaactttctgtctgtcatccaagctgttccatctccttttccaacgtttcgtatacttcctttggaatcgccgtcttaaaggagcgttccagacccttgttcttaactgccttcttaaaacagtccatggagggacataaatatgctccgcgcccgttctttcgtccggttgcgtccagtacaatctcgtcctccgacgtcttaagcacacgaatcatctcttttttacttttcatctcaccacagccgatacactgtctgagcggtatcttctttgtactcacgtttcaatcacttcccgttctatttttcctggctgtcagcctctaagccgtcgtcctggtaatcctcctggtagtcgtcctggtagtcctcctggtactctgcctcgccgtcttcctgataatcgctttcgtaatcgtcataacctccgtcttcctgataatcgagacccagttcttcaaataatcccatctctctggcctgtgtctcactcttgatatcaatcttataacctgtcagccttgccgccagccttgcattctggccttccttgccgattgccagagaaagctggtaatccggtacgataacctgtgcttctctggattcctcgtcagccactacgcagattacctttgcagggcttaacgcattttcaattaagtatgccggattgtcatcccagttgatgatatcgatcttctcgccgcgaagctcgttcacaatggagttcaccctcgcgccgttgagacctacacatgcacctaccggatccacattctggtcgttggatttcacggcgatcttcgttctggaccccgcttctctggcgatggccttgatctctaccgtaccgtcctttacctctgccacttccgattcaaataaacgcttcaccagatccggatgagttctcgatacggaaattctcggtcccttcggtgtatcctttacttccagaacgtaaaccttgattctctccgtggccttgaacacctcgcccttaaccatctctgtctcatttaaaatggcatcgactttacctaagttaatgctgacattcttccctaaatatctctgtacaataccggtaaccacttccttctcctggcagtaccagtcattatacagggcttttcttccctcttcccgaatcttctgaaggattacatttttcgcattctgtgtggcaatacgtccaaacttcttggaatcgatcggacactgtacaatatctccaatatcatatttgggatccgtcatcttggcttccgccaggctgatctgaagcagcgggtcttccacttcctccaccacttccttctctgcgtaaacggaaaaatcgcaggtctcgtggttcatactcaccttgacgttgtctgccttgccaaaatgattcttgcacgctgtaagaagagaattctcgatcgcctccagcagggtatctttgctgatattattctctttttccagaatattcagtgcttctaacagttccttattcatttttttatcctcctactctcatccatcatactgtttagaaatcaaatgccagccggattaatgcgatctccgggcggttcaacacaagctcggtcccgtcttccaccgtgactgtcacggtatctttatcatatgcttttaaagtacccgtataatccttctgtttattcatcggtttgtacaatttaatatccacatcttttccaatgcttctgtcgaagtccttatctttcttaagcggccttcccagccccggtgaactcacttccagaatatagctgtcctcgataaaatccttctcgtccagccagtctcccagtcttctgctgacgacctcacagtcgtcgaccgtgattccgccttccttatctatataagcacgcagataccagtttcccgcttcttttacatattccacatcaaccagttcaaaatgatattcttccatcaatggaagcaggtagtcttccgttttcttttcgtaggtctctctttttgtcatgttcttcccacctttctgcacaaaattgaaagagtggactctcgcccactctttatcagtcttctatcatgttatcgctacgattatagcactgttttccagtcaatgcaaggtatttttaacttttccccataaaaccgtcgtatttacgccatttccgtctcatatccccttcactgtgtgcaacttttcctggatttctactcactccgaagcgcatcaatgggatttaagctcgccgcccgtctcgccggcatatatccaaagaccagaccgattgccgcagaaacgccaaacgacacaagaattgcaggcagcgtggccgcagccttcatctgcatcaggctccccgcagccggagtgatcacacagcccagtacgatgcccaccagtcctccgatcgagctggtaaccgccgcctcaatgacaaactgctggagaatcacggattttttcgctcccagggactttctgatcccgatttcccgagtcctctccgtcacggacaccagcatgatgttcatcacgccgacgcctgccaccagcagagaaatcccggcaattcctccaagggcggccgacatcatggacatggtggactccatggactttaacatctcgctcatggaactgatatagaaatagtccggcgacttatagcggccctggagaaacacggtcagaaggattctggccgcggcaatctcctccaccttatccaccgttatgatataatcggaaacatcggcgttctgattcattaagagtgccgtggtatacggcagcagggcgcggtcatccggtcctccctgctttaactcatctttatcccggcgcttaagcactccaaccaccttgaccacatttccgtcaaaccgcacgctctcccccaccgccgcttccgctctcccaaacaggcgcgtggcggtaaagtacccaagcacacagactgactgtctggatgcgatatccgaatactggatataccggcctgcttccagctttttcgcatcgatgccgtaaaactgctcactgacgccggaaattctggttctggtcagcttatcggtcttatgcttgatcgtcgccttcacagaaacctgcggagacatttccttaaagtatgctctgttcttatcgtaaaacgcatataaatcctgaggggagaccgacctggttggagtattggtcagctgcacctgcagctggttggttcccatgtctgagaagctggctcttatgtagttcatctgcccttccaccagtcccaccagaataatgaccgaagcaaccccgatgatgattcccagcatggtcaggaaagaacgcatcttgttgctcataatatttttgattgccatcttaaatgactgccgcatagtcgctcacatccccgtcaaaattaatcttgccatcgtggatccggattacccgctttgcctccagggcaatggagttatcgtgggtgatcatcacgatggtgtttccttcttcgttcagctgctttaaaaaatccaggacctcccggctcgttctggaatccagggctcctgtcggctcatcggccaggatcagggaagggctgcctgccagagccctggcgatagagacacgctgctgctggcctccggacagctggcccggcagatttttatacttatccgccagacccacccgtttcagtgacgccattgcgcgttccctccgttcttccccgtcaattccggcgtaaataagcggcagctccacattttccagaagcgtactgcgcgtcagcagattgtactgctgaaagatgaatccgatcagccggttgcggatatccgccagctggttgtctgtcatctcccccacgttctcgccttccagatggtacgtcccgctggtaggcacatccagcgctccgataatgttcatcagcgtggattttccgcttcccgactttcccacaatggctgtcatctcgcccctttcaatcgagagggatatgccatcgttggcccgtacctcctcatcccccatttcgtatattttatagatgttctgcaattcaatcaaagagcccatagccgctcctcctttcctgttataggtccatcgtcattccttctcccatattttcacttcccgcagtactttcggcacccggaaccagatagacctcatcgccttccgccaggcctgatgtgacctccacctgctcatcgttcatgattcctgtttccaccgttacctctctgaatccggctggtacctccccctgcgccgctttcaccgagggatcctttacatacaccacatttcctctcatcaggctggcagccgggatgaccagcgcgttcttcgattcctccagaaggattttcccgttgacgttcattcccggcagaagtcccttcggatcttttactgtcacagagacaggatacgtggtaattccgttattattggcgctttccaggcttacattttccacaatcccccggaaggacgcatcaccggctgcttccgccgtaatctgtactgtctgccccgttttcaccttcgatatgtccagctcgtctatggacatggaaaacgtgatggatgaaaggtcgtagatcaccgccatcaccccgtctccgcttcctttgctcgtaattttgtcaccagccttcatgtttttgcggatgacggttcctgatatcggtgctgtaatcgtgtagttattcatactgcttttcgtactctcgatcttactgttggcggagtccatggcatccttcgcactgtccagcttctcccggaagcttctcatcagcttatctgccgattcccggtcgaaccggaaaatgggcgctccttttgcagcgtagtcaccttctgagacaagaagctgttctacagtcacactatccggtaaatctgcacttaatatcgtctcgactaccggactgaaggttccttccaggctgctgctgtaatcgccaaccgacgcggccgctgactgttccgtggtcagaccacccggattggccgcctctatggtcacatagcgcacaatccggcctcctgtcagcgtctcgtcctttgaactgaccgctgtcacggtacccggtatctgttctcccgtggatgaaagggtaacaagggccgtacttcccgttccgatggctgccgcttccgcagaaaggaaaggaaccttcagccgcatgatggaatcatcctcgatatcagcgatcttcgttccgctggacaccgtctcgcctgcttttatgtagatctttttgatatatccgctgtcaccggagcggaaaataccgtcgttaaaccggccctgggctctggaatagtccttctgggcctcttctaagtttctcgccgcccgttccgcggaattctgcgcagccttcatctcctcttccatgctgctcacatcgatccggtaaagcacctgtcccttttccacctgatcccccacctcgaaatcggcactggtgatctcgccctctgccagagaggatacctgataggagttccttggcttcagcactcccgaggaggagagtctggaactgatatcctgccgcgtcaccggcgcagtcatcaccgctgtccccttacccgttcctgcacttcgcccgctgctccttaaggccgcggttcctgcggccgccaaaagcacaaatgccgctgccgcgatgattaccgttttcttctttttcctgtttttcatggccgttctcctgtcagtcttctaaataatccaataccgtatacgtttctgttccgtcctctttcacggtcttttcatagaccagcgtgaccgtgtccccgactctgacattcccgtacatggagaacgcaaactgcatctccgaactggcaagctgatactgatctccgctttcctccagcgttacggcgctgggtgacatcacgtccacggaggtataatagatgttggaaaccgtcccccggacgattccgcgcctgctgtccgatgaatcctccgtgtaagcccagatactctttgatccgggatgataatagagcagcaccgcaccgccgctctccaccgcgtctttcaatgtcgaaaccgtggaggactccccgttgataaacacattggccttatccagcttaaacggaatatagctggataaacttctcttgcttcgaaccagcctgggacccttcaaaccgttgtccgccattttcaggggattgatctctccgtcagaggtcagctcacagccaaacagtttgccgtagatatcaccgccgtctttctgcttcgtctttaacagattataaaacagattgatacaatcccctctcgacaggagctccgccgcttcccggttcacattcctgtcaagcttcaaaaaacggtactgggatatccttcctcccgcctggctgcctgcaaaatcttcatccttatatcccagcagtgccagaatgcctctgactgcctcctggagtgtgacgttctggtccggtttaaacacgccgcccagataacccgtcatatatcccttttccactgccgtttttatgtaggatgcgcaggcgtgatcctttccgacatccgcgaagacggaactgctgccttccggcggcaccgaactgccatagtgggaggccagcaccaccatcctggcatattctgccctggtaacatttttttccgtgttggtcacgttcatgatcccggccatgccgactactttctttttcaaatccatattaacggcagccagggaggtcgtcggatataccgctgcaaccatgatgcaggccgctgtcgaagctgcaaataatcgtctgttcatcaattaaaatccctcatttctcatcataaattcatccgcattataacgtgtaaggcagcgtttttccataaatccggcctcttattcagttttcttcagaatttaaaatacgccggctgaaatgacttttcagccatttcagccggcgtttctcttcctttagcgcaccgttcccggcaggaacagcgtcgcggtaaatctgtcttcatcttctgtcgtctcaaaagagccttcgtgttcctccatgatcttcctgcacgtcttaagaccgattccggagctctccaccagggccccatccgtccttttccggttgcggatcgttatccgggctccttccttcgtctgtacacaggtaattacaacaggaaattctctggcggcgtacttcgccaagttggaaaaaaggttatccactaccctgcggaataaatccacggaaacgtagtaaatccctttcatctcctccatttgaaaatccaccgtaaatcccaggccttccagtgcaaaagcgctctctcccaccgtctgctggaacagagctgccccgttcaccggctccatggccggtttttcctctctgccgtacacaagaaaatattcaaacagacggtctgacatctccttgatctgcatggccttcttcctgctggtggcgataaaatgcttctgctgggcagcatcctccgtctcctcctcgtccaggaattccagatatcccagcaaagacgtgagaggggaacgcaggtcgtgagacatggcagttaccagttcctgattggcctgtctggcctctgcctccttctgttcccgctccaggatagaaatccgcatccggttgatcccctctgccagttcccccagttcatcgcttcccttaacggaaacagcgtactccatctgaccgccctccaagatctgaagctccttttttaagagttcaatataagaagtctttttctgtattaagtgcagaaatacagtaataaagagcaaaaatccacagatcacagaaatacggtctgcccactggtaatagcggtattcatagaacggcatcaaaagtactgacgcagttccgtctgcaaaggtaaatgtatacgtgctgtcgtctgacaccggcatgacctcagtctcagctgcttcctcttctgaaatggttacattttccacatcatagggatatgaggaatagattacacgcccggagcggtaaatgaccattgccacatatgcttccctgtcgacccactcgtccaaagggctcaaatcagagagtgcgatgtccttatccctgatatactgccgcagcgattcttccgaccgcgtcagctgccgcgcataggcttcctgggtactctgtgtcctgtctatccagtcataggcagccgtatgaattcctatatagagacaaaatgccgccgccatggcgattgccaccgaggccattaactctgcccaaagtctgtttctccatgataatttctgttttccgaaaggcagcttaatcaattcggtacccctttccccacacattccggatgcagcgcggattctggggatcatcctccagtttttttctcagattccggatatggaccatcacggtattgttcgatgaaaataaaaacggctcattccagaccgcctcataaatatcctgtgtagtatacgtcttcttacggttctccgccaaaagaagcaggatccggtactcaatatcagtcagaagaacccgttccccattcttgatcacttcctccgtatctgcaaagatttccaggccaggaaggctgattacctccctctctgtccccttcttgcctttatatacacagtagcggcgaagcatggcattgactctggcctttaactccacactggaaaacggtttcaccagatagtcgtctccacccgccgcaaatccttcttccttgtcccgatccctggatttggccgtcaaaaacagaatgggagccgatgatttctttctgatctccccgcacgcctccacaccggaacaccccggcatcatcacatccagaatgatcaaatcaatcgtgtggtctgccttttcaaccgcctcgattccattgacggcctccaccacctcatagccgtctctcgccagtaatattcttacaacctctcttatctcgggatcgtcgtctgcaaatagtattttcttcattccggcacctccgatgtcattataacccggacgtcttttattttccatcactcggacgtatccttaagcattcttaagaaagcagtatataatcaggctccgattccaaacttccatcccgtacttgcaacttcccggactttgtacatatcataacactatatcagataaatctgttatacaaggaggacccatgaagccaaaactggaagtttgtggggtcagctactcctatcattccctcgagggtgagactctggccctttccaatatatcatttacggtagataacggggaattcattgccatcgtcggaccttccggctgtggaaaatccaccctgctgtccttattgtccggtctgatcgaaccggatgaaggagagattatcatagacggagtcccgcgtacacattccggtgcgggcatcggatacatgctgcagcgggaccatttattcgagtggcgcaccatcctgggcaacgccgaattaggactggaaattcagaaaaaactgaacgacggttccaaaaagaaattacatgagatgttgaatacttacggacttgaggcatttaaaaactcccgtccgtcagagctgtccggaggtatgaggcagcgtgcggctctcgtccgtacactggccctggaaccggaccttcttttattagacgaacccttttccgctctggattaccagacaagacttgcagtctgcgatgatatcagttccatcataaaaagtacccataagacagcgattctgatcacccacgatctatcggaggccatcagcgtcgccgacagggttatcattctgacaagcaggccgggaagaatgaagggcatcgtccctgtttccttcggagatggctatgtaaggccactggaacgccggaatactccggaattctccgcttattttaatcaggtatggaaggagctgcagaaccatgattgagacacatcctactctggcacaacaggaattcattgccaaagaaatgcttcaccgccggaatgtccggattctgcgcatcatgctgctggtgctctttctcgctctgtgggaactgtgcgcaagactgggcatcatcaatgatttcatcttcagttctccctccagaatgaccatatgcttcataagcatggtgaaggacggtacgatctttctccacactggtgttacagttatggaaacactggtaagttttgctctcgtcgtcgtggtcggtcttgcaaccgcgatcctgttatggtccagccgcagcgtttccgaggttttagagccttatctcgtcatgctcaacagtcttccgaaatcggctttggccccgatcctgattgtatggctgggcaacaacataaagactatcattgtggccgctatctctgtggccgtctttggctgtatcatgacgcttcacaccggcttcatgcagacagatccggataaaatcaaactcatctattccctcggcggaacgaaaaaagatgtactcactaaggtcctgctgcccggctccgtaccgctgattatcagcaatatgaaggtaaacatcggactctgccttgttggtgttattattggagagtttttggcggcgaataagggacttggatatttgatcatttatggaagtcaggtctttaagatggatttagtcgtcatgtcgatcgttattctttgtattgtttcagcaattttatatcaggggattacgattctggaaaagaaaatgaaataaacaaaagaagcgccattattctataagattgatggcgcttctttttgactgtactgtcgaaatagaatcaagctcttcctgaatccttcttccaataatctctacacaactgtcgtcatcgtccccgctctcgcaaagtcgatctcgcagtccagattttccccgttcaggaaccgttccatgtcatcaagcacatagctggtaactgcgtaccttctgtctgccgtaggccccgctgcgtgaggcatcaaaaggactctctcgcaatcccgaagcggagaatccatgggaagcggctctgtttcatatacatcaagcgccgcccataccggtctctccttcagcacagagaccagagcctcctcatcgatcaacgcaccgcgtgccgtattgaccagcagagccccgtctttcatgctgtttaacagctctgtccctatgctgtgcttcgtcctcattgtcagactgttgtggagcgagacgatatcacaggttcggaagatttcttccgctgacgccgcctcaattcccgccgccgcaagttcttcctcagaaatatgacgggatgaaaccaggatcctgcatccgaagggctttagaaacttcacgagatactccgcgatcatcccatatcccaccagacccacgctgcggcccaaaagtcctctcgttccgatgagggaaggccattcaccggccgccatgcgggcctcatactctccaattttcctcagggaacagagcatataagtgagaactccttctgccacactctccgcgaagacccggttgccgctgcagacccggatccccctctcaaatgccgcgtctcccaccatgggacgcacggatccgccgatatgggcgatcagcttcagtttgtccgcatatttcaatgtcttctcataaaaaggcgtatttccccagccgctgatacagatatcgactccgctcagtttttctgccagttcttcttcgctgaactgctccgtattcgtattccactccacacagcccaattgctccagacgtgcactcagcgcctccgaaaaaaagctgtcccgcatctctccggccggtatagagaccaggatttttattggttttaatttgtctctcacggcgtctctctcctttctatccgaaaccggtaccgcaggctgttctccccacctgcaatttctatcttaccatctccgtcccgccgtatcaccacttttctcattccctcattttcataccgaaaagaagtaaagtcgtcttcatacagggtatactccccctccttccatccataggaacgaatcgtcatctcaaacaccgtatcttctctgacgcaaagaaccggttctgccgtgggaactatggcgccgtctctcacaaatacgggaatctcctcctcctttgcctgtacggtaaatctccggccgccctcatagggctgaccatcaaaaaagccataccacagcccgccaggcagatatacctctctcgaatctccatcttccagagtcagcggacacaccagaaggtcctttccaaagaaatactgatcatcgatgttacgtgcctcataatccttcgggtcctcaatcgccatggcccggacaggcggtattccaagctcgtgatattccacaaaagcgctgtataagtacggaagcagtgacattcgcagctcgaacagcttccggcaggcagccatgtaaaacccccgttcttccatcgcctcattttgcagattcttctctatacagacctgttcccacggcggattcgggattctccagcagtttaataacgcctggggagaaaatacgatcgtctcgattcttcttaacagatcttttccatttgcacagtccctcacctcgggtgcccacagcatccctgaaaaagaggcagtaaccattcctctgataaattcccggtgtccgtataaatcagaatacaggacaaacggaagcggtgccgcgagcgccccggaagagcggacggaagacagtgtccggatgcctctgttcttaaacgcccggaaaatcagttcctgatacagcacccctaccgcattgtgcatctgttccccatccatgccggaaggaaattttgtggaatccgggaaggaccagttagagggattaaaatccgaattatcacattcgtccagcttaaatccggctattccatttcggataaactgctcttcgtgccagcctgcaaatatattctgtgcctcttccgtcgcaaaatccggcaccagaccgttccacacctcataatccccgctgtaatccagcagcttctcataaaacggtgcagccggatagacaaaaatatgttcccaaagattcacgtgatacccatcctggttcagggtatccaccatttcctgatgattgggaaacagatatccccactcatacgtacaggaatacgagtgtgaatgccatcccggttcgatcccgatcacgtccaccggcattttatcctctctgaagccttttgccagcttcttcacatggttctcatcactgcccccgtatacgcggtaccacataccgagaccccacatgggcggcagacagccgcctcccgaaaacaggttgtaccgcatcacggcttccttcacgtctccggcaaagaaatacagatcgataccgcctgccgccggaatctcaatgatgaccttccgttcttccttcgcccgcttgaatgcgtacagcgcagattcactgaattcccgatgcggtatgttcacctcccgtttgcccgcagatgtccctttttccgtattcgtccccatataaaaagtggcataccggtacgtatccaccaacagcccgtatcccgccgtcgagacgtaaaacggagccggtgcatggctctctcccgtatccatcctgggatcagaattcaccttaacgtatcgttttctgcctgctgcattgagactcaacagctgaagaccaaacccgtagatgtcctcgtccgtcttcatgggcagcgtcaccgtaatcccgcgcgctgtctgctcaaactgaatttctgtctcttcaaacggcagggctgcggctccgtctttccttcccttccccagccgttcaagcgcgccgtcagccatctcacatttcctcatggaaacgggcgtaaatggttccggtttctgatacgttaacttataaatgccttccgcaattttttccatctgcttttcctctcctgttaccacagaaatacatcctgcccctttagcttaagcattgcctctataaagaaataatctccgtaaataatgggcatttcatgatccttttcattatgataggaacctgtgcattttgtcaggaagcagtcgctgtccatactgaaatcacagtgttcccggcataatgcatgcagaagcttaagggcggccctctcgtacagctctttttctaagtctcccacttcttttgcaatctccagcaggccgcaggccgcgatcgcagcggccgtatcgtcataccacaaaggcgttgccggctgcctgaaatccaccggaatcagggcgtcttcgggtatattggcgataaaataatgggcaatccgtttcgcggtatctaagtattcctgctttccggtatggcggtagctcatgaggaagccgtacagtccccacgtctgtcctctcgtccaggaagatccctggccatatccctggccgccgtaatcccgcaccatttcccctgtaaacggatcgaattccacaatgtggcgtaccgagccatccggtctcacaaacgtttccataaccgtatctgcgtgcattttggctatctgctcaaaccttggatccttcgtttcttcactggcccagtacagcagcggaatattaaataagcagtcaataatcgcccagcccctcgtatcatcctggctgcccggaatgtcattccaggcgcggataaatttccccaccggattgaaccggcctgccagaagattggcagcgtgcagcccccgtttcctcgaatccgggttccctgtcagacggtaatccgccactgcgctcggcaggaacatgaagccgacgtcatgatgcagcccgtaataatcgctgaaacaccggtccagcttctcctccgaaatccgggcgatttccgcatacttctcatttcccgccgcatggtacatctgccagagcatacccgcccagaatccgttacaccaccaattcattccgtcatccatcgaaaatgtctgatcctccctgcttctgtcatcatgaacaccgtttttggccgtgtagggaatcttattccttgaccgctcactgaccagatccattttttttacaattttttctaccgcctcatcgatccaggcgttatcctgcagacttaccatactattctctcctgttctcatcctgttttgcggctccggcccaaaacctccgccgggagttcaccgcttttgtgtaacattgggttcatcattaaaatagcagaaggaggaggaaaatgaaactgcattttttaacgattgagtacactttttatacatcttttccttcattcttcactggttacagctcactggcaggctctaatgacgacttttgtcctcctattgcgttttctatcctcctaaagtaaaataaggatataggaaggaaaggaaaaccgccatgacagaaccaagtattgaacagatcagaattttcaggctccgctcccatcacctggatgctgtgtacccgaaatcggaggcagacaggctggccggcgcgtgcggtatgcagaacacgccgcccggagcatgggaaaccgcactctttaaccgggtgccggactgcaccttatcggatatggaacacctgctgtatgaacagaaaacgctcctgcaggcatggagctaccggggcacgccggtcgtgtttccggtttcggagagcagtgcttttctgtctgcgctcataccggatgaaccggagccatggatttatacgcagggaatcactctggcccttgactacctgcagatggattctgacagcctgctcgaaatgctgaaacaggtaattccacagctggacgatcacgtcatcgtcagcaagagcgccctcgatcagactctggccgggtggatgacgcctctgattcccgtccaaaaacgggagctatggaatcagccctccatgtacggcagccccgatatccagactgtcggcggagccgttgtctcctttctgcttcggccgtgtgcgtttcacgggctcgttgtattcggaaaacgggacgggatcagcccgacgtttacctcatttaaaaactggacaggcagccctctccccccggatcgtgatgctaaaaagaagctggtccgaaaatacctgcattgctatggaccggcgaccgccgatatgtttgcaagctggctgggctgctccggcaaacaggcgcggcgtatgtggaacaccatttcagaagaattggagcctgtcacattcttcggaaaaaaggcatttatcctgtcagaggacagggaacgcctctttgctccggcctcttttaccgggaagcacccgggagatctgcagaggaacctcctgctgctcggagggcacgatccttacctggaccagcgtgaccgcgcggttcttcaacccgataaaacacttcagaaacagatctggaagcttgtgaccaaccccggagcagttgtataccgcggggaggtgatcggaatctggacaacgaaaaagaaggccaaaggaatggatatcaaaatgaccctgtggaccgatgccgccgggaaaacgccacttcagaatcttgcagaggaatacgcagcgttccggcagcaggcgctgatgaacctggaaatcgctcaactttagaccatgccatagaaataacaacagccaacacaattttttcaatcgagtaggagggagtgattaactcccgtcctctcacaccaccgtgcataccgttcggtacacggcggtttcaacagttgacgtgcacggactgataggctgtggctaaatcataatagccactgtttatcagtctttcttttgtcattgccatatttaccgctaccgtttgtgtggtaaaccaatagcctcttcggctgttccctgccttccatgccaattctttcggcactcccattttcagcaggttcttcaccttcgttttcggtttcttccattgtttccatatacacattcggattctgtgatatagccattggttcagtccctctattcggttcttcatatctgctactccataataattcagccagccccgcatatacacctttatcttttctaacgatgggcgtatgctctgaacagaccttcgggaactaaggtctttcagttttgacttcattttcttccatgacttcccatgaacccggacataaatgccctttccgttctttcccaatgtgaagccaaggaacttaaaatttcggattgcaaatacacttactacacggcttttcttctggttcacctgcaatttcagcgtcccttccagatatttcgtgcttgtttccagaagtctctttgcggctctctcacttttagctaacaatactatatcatctgcgtaacgtacaaaagccactcctcgtttctcgtactcctggtcgaactcgttcagatagacatttgccagcagcggggatagatttcctccttgcggcgatccttcctctgtctccatgactataccgttttccatgacaccactctttaggtatctctttatccattggataaccctttcgtcctttacatctctgcgcaggatatttaatagcatttcttggttcagagtatcaaagtatttcgacaggtccaatgcaacggcatgggtgtatccctgttctgcatactcttttacctttaaaatggcgtccctggcgcttcttcccggccgatacccatagctgttctccgagaacagcgcctcatagactggcattaactgctgtcctatggcttgctggaagatacggtctttcacggttggaatgcccaactttcgcactcctctctctggcttgggaatctctactcgtcttactgggtcgggggtgtattttccccttttgattctctctatcagttccttttgattttccctcaggcagtcacctgtttcctctacggtcattccgtcgattcccggcgctcccttattcgcctttactctcttaaaagctctgtttaagttgtccttattcagtatcttctctaagagttccggctgtgcactgtctctttccttccatatccggcggaaagaacggtgcgctctcacatacccttcacgttccgcgctgtctctttgtgagcagctatctttgttttctgtacccaatgttctttcctcctttcccggttgtactaaagactcctgttgattcggtccttcatctctcgactactacgacctcggctgacttctgtacgttcagcactatctcacgatagtggttatccctttcaggacattccgcacagacctccccgggtaccacacgtttctttctctccatctatctgccacatttaccatacatgattctgtgtagttattgggctttgacttgttgtgcagtcttaccctcatgtatagcctgatgtgatttctgttcgtcagaccagagatttgcccatgggttagtatgttccccatatccagcttccttcagattccacctcacgatggacacccttgccttcggctatatccttcccaccaccgggcggattccggacttgcaccggttagaaacgtgcgccgccgggcgcacacataaaactccgggactgaacagccgctcagtcccggagttttcataaccatcatttatatctctcttccaatcccaaactttctaaaatgccattgcggtacctttgtacatgccggtgactcttccgagtctgcaaaattcttcacgccctcatactgagccgagctgatcacatgccggtccccctccatgtggtgatgcgggccgtagctgttgaatgtacttgggactatttccgccgtaatcctgtgtattcccactgtaaggccggtaatcacccatgccggcccccaaatcacgccatactccctgttatccacccatattctggcgcagtccccatggatatgccccagctttatcctgccgtcttcacaggcagccgccatacattccacggttaccgccgaaccacagaacgggaaccccgccgtcagtaaatcatggcaggagatatcacccccgatttcctccagataaaatccgccatccgttatcatttgacggccgtctttttctgtatacgggctactgcatttcaccaggaaactgccctccagaaagacaaacggttctttttcatcgtccggtctgatggaaatacatagttccttccgctcaaatgcctccctcgccgcatcatccggaattcggtaataccagccgttctcgtcccggcgggatacaggtaaatctctgcccatgacccggacgtttttagcattatcgagcatcctcacctgcattccgcagattggattctgctgccgaagcggaattctgctgtccttattttccagaagcagctggttgatccccacacgtacaaccttccaggaaaattcatcctgccggtacagaataccactgtcgtttaattcccgaatcatctgctccttctcccagaagcagccctgcccctcgattacaatgtcatatcccacattcccaatgtgaagaacgccgtgttccacatttccgtacgtttccacgatccgctcttccgtcacatcatactgcattcccatctcaaagcattgttctacaaattcactaaacacggtgctgattctcccgctctctgctggcggagttccggctccgttgtgttcgttgatcaccatggcatcagccggattgaatgaggccataactccccgggccggtgccacgatcagtatatggttgtgtctgccgacaattccgttccagcgctgctttaaccgttcaaagacctttggagccgtctccctccaggtgagtcccatcggaatgtttggaggccagtccctcacggaggcgctgctccggttatacttccagagatgaaacaccatgttattgattccgcttcccgcctgccagtccacgtaattttccagattttcgggacttaagccccagccgcttcctccaagagcttccgcgagtgattctccatcgtaaaactgctttgccagagtggaagcaattaccggatagtagtggttgcccggataccgttccagcgcatcgactgccggaacattcacattcttcaaattccagcagacagaaccactgcacgaggtttgaaagaacagattttcttctgccttcaaatgagccgtataccgtttcccgtaccggacacaccagtcgttacaattctgataaaatgattctgccagaagatcagtaagaatctgccagtaacgatacctgaactgatggtatccctccttctccacaaaaaggagttccagtttttccataacgtcctcatgatagagcttttcatatcgcttccccgcctcctcgcaccatggaacgcccccattttttatagaaacgccgtgcccgtagagaaatcccacctcatcactgaaaaatccggtcacgtaatcaaacgcttccggacgcagccccagcctgtacccatcataaacagccccgacaaaatacttcatctcttctctgtcaaaggtattaaactgacggacctcatgccactccacacgcccgttttcatactgcatccaccggcaccggctgtccggaaaatgttccagcactctgccgtcggccgatccggacggccatccgttttcatcgtatatccagaactgcaggctgatctccttcgcgtataagatcagccgggacagaagatccagatacgcctcactcatatacgccggaatccccggataatatctgggatgaaagaccgtcccgtgaaatcccatttctttcatagcggacagctgtcccatcattcgctccggttccagacgatcattgaccgcccagaatgccagaaaattaagctcatttctcatatccgttcctcactttgctgcatattttactgtctgtctttcccttgtgtaattctgcccccatagcagattcagtccaaatcataaatctcttccttcagacatctgcatccttccaccagatacttcggccgttcatcctcatgcaccgtggaaaccatcacctgcgccagaatgagattcttcacattccggatatccagatgggtggtccggctccagtccggataatagttttcactcactgcggcttccgttttgcctgcatccgtccagatatccgatttattacccgctgcatagctggtcttattctttgacttatggtccgccttatactctgtcttatactccgccatatagtccggtacttccggatatccctccgggatatcagccagccgcactcctccgatcgccgtatagtcgatattctggaacaccagattttcaatcggatgatccttatttgcatccacccggattcctccgaattccggtctccccatgacatcgtcctggaaacggtaatgaatcttttccatttcttcgtcatcccttgcaatcagcccggaaatggttacccgcttaagtgttccgatttccggcatttccttcagttccacggaggaaccgatttcctccattcggttgttcagcaggatgaagacaggtctgctcacattgtgcatggtgtttccctgaatgcagatatccgagatatttccgccctcggtgcactcgatcttaatcccctcccgccatacattctggaaggtacagccggagaccgtcacatttctgatatccccgatggatttgaggccgatcctgattcccgcacagatggaggtaaaatggcagtccgaaatatggacgttttccacggggtactccctgctgcccgcctgaaggcagagattgtcatccgtaccggatatcctgcaccgtgccacaaagacatttctgcatccgtcgaaatcgaggccgtctccattgtatctcttgtcgttgcagatctccaaatcttccacccagatgttttcactgtccagaaatgcggttgtccatgccgcggcctgatggagctttatccccttcagcttcacattgcggcatcttaagaaacgaatcatcatggggcggtaaatacttccttcattcggaaaacattccgcatttccgtcgatagtcccctcccccatgattccgaaattctccgcctcctccgcgtagataaaacagcggtccatgtcatgctcattgacatagcggttgtaatgagtgtccgtcccatacgcggcaatggaaccgcttgctgtcagctttgccgacgccgtcacaatcaaatagacgcccgacttcatatacaatgtgccagagacgaattctcctttttccagaagaacgtatccgccgccctcccggctgcaccggtcaattgccgcctgaatcgcttccgtgtccagactctttccgtctcccgccgcgccaaaatcttttactgaataaaatgtttccatatcatctctcctttgactgtcttctctctttttactgtcagtataaaccatatcctgaaaatttgagtgccgctttttttaggtttccatgcacatttttcaggagtcttcctgtttctttctgttacaaaaactaatcctggcagccatcccctgtttttatactttcatcctccccaatcttcttttataatgaaactggcagtacgaacatcattttatgaaagcggggtatcattatgacttactcttacaaacatttttttcggcagttctatgaatccgcccctcccaaatacgcctgcaccgcatcggatgccccttcctttttaatctggaaggacaaatccagagaccgtctcagggaattgctgggtctttcacgtctggaacagtttgtcgccgattctgctccgtacagcagggaaccggagcttttaagcacctttcaggaggacggatatacccggtataaactgagcatccagacgcttcctgaggttttcatgcctttttacatgctggtaccagacagactttcgaattcccgtcctcacaaggccatgatcgccattcctgcccacggcgccagcaaggaaagtgtggccggtgttctcacttctcctggagtcagggaaaagctggaggctgctcccaaagagagttacggccttcagctggtcaaaaagggctatactgtattctgtccggatccgccgggatatggggagcgcctagagccggtctccatggaagatcgtgccttcctcggtgataccccgccgaagcctcttggctcttcctgtaaaaatctgaccatgaccgcggaagccctgggacttacctttgccggtctcgccctgtgggatctgatgaggctcgtcgattatatagagacacttcccacgattaattcagagagtctgggctgctgtggtttttccgggggcggcctctataccatgtggcttgccgccatggacgaccgaatccgccttgcagtgatcagcggttacttacacagcgcaaaagaaagtatactggaaacccatttatgtccctgcaatttcgttcccggactgtggcgtgattttgacctgtgtgacatcgcctctctcatcgctccccggcccgcgttctatgaaaatggtcttcgggatgtgctgaacggaccaaaaggtattgatgatcccgtcagccagttccagaaaatccagagaatctactccctgttcggcaaagccggctatgtgcgccaccgcactttcgacggaccgcatatgtggtatggactgggatatgatttcacagaagaatacctttcatcttctctgcagtaaaatggcggaagcgttaaaccggagaatcactgatcgtccccgtttcgcttccgccttttatctgtgtttccgttttgcccgaggcttacttcccaatcatcttatctgcttccgcctgcatgaattccaggatcttatcgagtcctgctgccttctggttctcgatatacttattaatggccgcatccacatcattgttttccacaatgcctgccaggagcagcttgccctgctcgtcgtacaactggtctctctgtgccagctctgtcttgatgctgctggtgtcagggttaaatcctgtcagcggagatacgacaaggctgtccttttcaagccattcattttccatctccagcgcctttggtgtgatcaatcctgacggcttatcaaactggcctctgacaaacggccagcagaaccatccgaggaatgtagaatttgttgcctcctgtccttccggatactggatggaaccgtcttcgcccttaacgtacgtttccccttcaattccatacatgaataaatcatatgcagcctcatccgtgtttaacagttccaggagcatcagaagacgttccggattagccgcattcttgttgactgcaaatgcgttgtttaacggagaatcatagcggtactttccgtccgtataaagttccgcataccctaattctgcattcggaatgttaaatacaactccctgcgtagcagtctcatgaagccctaccttcgcaaatgtcttgccgttctcaaacatcttcgtatcggtctcagaaagttcatttttcgatacgatgccttcgttataccacttattcatccaggtgactgcctctttaaacattggcgtctcctccacagcctccagcatcggcttttcgctgttcaaatcgaatgtcagagtgtggtaattcatgttgtccatttcatattttgcatggagaatcgccagcacatcgctgtatgtattgcctctcggaaaccctgattcgaatattgtgatatccggaacctttgccttggcatctgtcagcatggcgtccagatcctcgatcgtctcaagttttgaggtatcgactccgtactgatccgccaggtccttccgataaagaaggatggctttggagctcttctttttcgtccacggcatggctaccagctggccgtcgatgctgcatgcggtcatggaaccattttcctgatacgtcgcatagagtgacggcgcatactgctgcatgaaatcatttaacggcatcagaccgcccttgttggacatcttattatagagcatccagtcagaaacatacattccgtcaaaatcatctccgcctgcaaccagggatatcatcttatcctcgtaatcgccaaacggtacgtaattgaactctatcttctcaatattcaatttgtctttatacgtttcacagaattttgccagcacctcatcctgtgcctgatacttatcgctgcaggaccacagtttcagtgtcaccggttttaactccgcagaagcctctcccgcctctgtctttgccgcggtgcttccctgtgtctcctgtgttttggacccgcatcccgcaagtcccgtcatgcacagcgcagcggccagtgcaatcgataatgcctttgtacctgttctttttttcattgtacctctctccttttgattattatatatttttttgttgcgtattgcaaaaacatctgtatcatcttgcggtaatgctcctggcggagacattaccctttaacagcccctaccataataccttttacaaagtacttctgtacaaacggatagaccagaataatgggtccgatcgtagcgatacaggtcgccatcttgattccctccgacggaatactccccgccgcctgtgtaatcgcgttgacattggatgaagaactcaaaaactggatattggaggtaatcgtccggaggagcagctgcagcggctgtaaatccgtattatcgatcagcatgatccccagccaccagtcattccaatagttcaggctgataaataagctgattgtggcaataaccggtttcgccagcggcagaatgatctggaagaaaatccggtattctgacgctccgtcgattttcgcagactccaccagttcagcaggaatgctccgatagtagtttcttgtcaggaaaatataccaggcgttggccagatacggcagaatcagggcccatacggaatctttcaagtgaagcatattccggcagacgataaaccacggtaccatccctccgttaaacagcatggtaaacagtacaaagaaattaagagctctgtgatacttcacgcgatcctgtgagatggggtatgccgccagtgtaatcaccgcaacacttaaaaccgttcccaccacagtgacaaaaattgaaatcttatacccatttaatattcttcccgcgtccgccagaaggatcttatatgccgtaaaatcgatccgcctcggaatcagggaatacccgtatgatatgatatcggcctccggcgtcagcgagctgaccagcaccagccagaacggcacgatacagatgagtgcgctgaccgccagcaggatgctgatagggaaatttttccatgacagcttttttccttgtttcattattttttcctcccttgctatgtgcacttagcgcctgtcttttaggcgcttacctgcgttgcatgttcatctccacttggcgaggttttccacgaacctggcggagtggctcaaaacaacgctccgtcaggattgtgttttctcgccagacggttcataaaaagcaggattgccgtggacagcaccgattggtaaagaccggcggccgatgacattcccacgtctccgttaagccttaaattacggtagataaacgtatccagcacatctgtagtagaatagagctgtgcgttatttccgatcatggaataaaacattccaaaatctgcattcataatcttaccgcagttcagcagaagaagggtaatcgctgtcggtgccagaagcggcaggctgatactcttaatctgctgccatctcgacgccccgtcaatcttcgccgcttcgtagtaggtcgtatcaatcccccccagcgccgctatgtacatgatcattccgtaccccgtcatcttccatacccggaacaccaccagtatcacgatccacatcttcggattctcataccagttcattgcctccatcccgaataccttcagcagcgtgttcagactgccgtgctcgtaattgaataagttgtaggaaaacagtcctaccacgatccaggaaatgaaatagggaagaaagattccaaactgtacggcagatttaaatttcttcatcctcagttcattaaacatcagtgcaaatcccagttcaaataccagtccaaatacaataaacagcagatttaacatgatcgtattccatgtggcccttgtcgccgatcccgacgaaaacagatattcaaaatttttcgtcaacggtgaaatccaggggcttccgaatattccgtctgcaaagttaaaatccttaaacgccgttaccataccaaacattggcagataattaaacaggattaaaactgcggcggccggaagaaacatgctgtacagagccctgttcttataaagttctttaaaaaatccctttcctttcatatcacttttttactcctttcctgctccctgcatgatttcactatacgcttccaaacacgcctccgtaaactgcgaatactccgtaacagctttaaaaagcggggttttcagactttaaaatctaacactttactctcatttccagggatcctccctcatggcaattgattctaaggccgcttttcgctatactgaatacagagtccggtaatccggactcccgcgtctaaaaaacactcttgggaaatggtatgctcagagaactattacgattggggtaaaaagagatatgatgaagaaattgattggtggccagaattatttcagaaagatgctcagcatgtgcctgctggtcatctccgtcacaattttcatcctgacggtatttttttatcagagatacgcggattctctctctaaaaatctgtacgacggtcaggaaatgaatctggaaaagagcgcccgcaccatgaacgatctggtcagtgagatctcacagctctacaacacggtcatcctggattccagagtcgtcggtttcagctcactgaaggaattcgatccggcggagaattacgctacgtatctgattgtaaaaaaattctacaacatcaatccatacgtaaactccctttatatttacaacgccatggcagacgacgccataacctgcggctcctaccgtttcgacctcgattactgctgggagtatttaaaagaggcaaagaaggcttccatcttcccttcccctctgactggaacaccggaggaggtcctgaccttcgcctatccggtctatgcggataattttgatgagctgagcggaggcatctttatcaatctggatatggaaaagctgtcggaacacgtgctgggaaccggctcccaggcaggtatggttctgggggatcatggtatggttctgctctccgacttgacggaagattttacctcagatccggaagcctgcgaggcgtttctcgtctggcccggtctgacagagggcgaatccgccagcagcttaagaacctttcacggagacgattatttatgcgccttttacaaggatcccgcccggaattttacctttttaagcggtgtcccgtacagtgaaatcgtcggccccatgaaggctcagagaaacttgtctctggccgtggcggccgcgatcttcctgaccgcaattctgctgcagtatatcattacaaaacggctctaccggcctttggaggcaattaccgaagagttccgggattccaagtacgccggcggctcggacatggatgaattcaccctgatccgccacgtctatgaaaatgccatcgatgaaatcagggagctggaggaggaacatgcattctatcagccccgcatgaaatcggacttaatccgcggtctggttctggggaaccgcgatatcgcacagacgaaggagcttctggaaaagaacggctgggagattccctttgaagggatgtttttggcctgctttttcatagagaacagtgacagcagcgatgttctggctcccattgtacagaccaggatcagccagcatcttcacgaaaccttaagcccccacttctacacagaatgcgttcccgtcgcctctgaccaggtcatctgtctgattaataccatagaggacattcccatcaccttcgatgaactggtacggcttctggaggcggctaaggacgaacttcttacagacaaccatctggttttaactatcagtctcgatggcgtaaccagtggaatagaggatttaaaccgtgtgtaccggcgcgtattggagctcaagaattaccgtttcgtgctgggtaccaatcagattatctatccggggcgcgtgatggaactgatgccggaatacatgacgtatcccgataagctggccgatgagattcttgcctgcatgctgcacggaaaacaggaggaattcacggaaaatgttcaggagtttctttctattttaaagcagtattcttatcagcctgcctccctgctgtttaaccggctgtacttagacctcctgttccagatgcagaaattaaacgcccccggcaaggactcctatttatctgccgagacgctccacactcccgccacgctgaccgaaggagccggcgtcctcttaaccatctttgaatggtatcaggaacggaaggccgcagccgaacagttaaaggacaacaagcattttgaacggattgaggaaagcagaaagtacattgaagcgcactataatgattacaacttaagcgcgggaatggtagccgagtacttaggctattccaccaattacttttccagaatttttaagtccatcaccggcttttatatcaacgactacatacgtcagatccgcatcgttaaggctcaggagcttctgatgaacagcgatatgaccatcaccaccatcgccgaggcaaccggattctccaatccgaactacttttattccatattcaaaaaagagacaggactgacgccggccgcatatagaaatgcggggcagaggatcgtctgatggtttccttcggagataaccgcaggaggacatgcaacaggaatacacttgaagtgttgacattcgtgctggtgatctttgctgcactgacttatatagaaaatcctcataactataaattatgcaccgggtacttgttttttcaagtacccttttatatttttctcaatcagattcagaaaatattacccttcactccgcgtttcaaccgtctttcacccgtttccggtaattggaaggcgtttctccatatattctggaaaacagttccgaaaaagacctgctgtccctaaaccccacatccgccgctatttccgcagtttttttatcggtggataccagcagatcaatcgcatgcttcatccttaccttattcaaataatccttgaagttctcaccggaatttttcttaaaaaagctgctgaaatagtaaggattcatatgtatttctccggccagcacctccagcgtcaggttctcgctgtaatgcttctctatatactccctggcatggataatgtcctttttttcactgctcacaaccgctctttttatccggtccttatactccttaaagtatccttcaaacagatccgtgagactcccataagactcgctctgtcttgcctgctccaggatatccttgaacgccacaggcattccgtcaattcccatggtttcaaaccgttcctctataatacgaatcgtacttccatagtggaaacaggcgtcatctcttcgcccctccgagattaagcacaccagacggcgaaaacggacggccgcttccccaaacgccttttcgtcctgggctaccatcccttcgatcagctgttttctcacctcccggatctcctccagcgcagcgggcttcttaaacaccggttctcccacgcgcagaaccggcacctgaagctgactgctgaaatagaaatatcccagcatggaaaggcactcttcatacgccttcggaatttctcccatagagtcggccggattacccacgataaatccaaggcggcagtggagctgtgcctgagcctcctccatgatagaacagaggaccattcccgtcacctcctgctccggattcttaaacaccatgacaatatggccattctttaagaatacaatccccatctgccgctgttccagatactgctccagaaaactcacgaccgaaaactgaatcagcctgcgctcctgctttccggtctgttccccgtatagaatttccgtcagaaccggaagatatctgcactcctccatctccaccagcttatcatacgctgctgccgtccccacttcctcacgatcctccaggctctccccaccgctgccctcgccatccggttcctgtttcagcatggtaatgcatttctccagcgtctccaccagttcttcccgaatcaccggcttcagcagataattcacagcgccgtatgtcaaagcgtcctttgcatactggaaatcctgaaatccgctgacaaatatcacctttgtctcaattcccagtgccttcagttctttcaggatttcaatccccgtctttttcggcatatagatatcgagaagcgcaatatccggtttctccgtgagaattccgtcaaaggcggccttcccgtcttcgtattcccccacaatctcaatgccaaggcggctaaagtccacaagcttctgaattccctttatgatcacgggctcatcgtccgccagaatcatttttatcattccgtttctcccccttccaaccatggcataacaatccgaaccatggttccgactccaggtgtgctggtgatttctattccatatgcctctccatacagataccggatacggtcatgcacatttttcaggccaatgctctgccagttgtgctcatttttgatacccggctcacttccctccagaagcagcttcagctgctccagttccccggtactcataccgacgccattgtccataaccgagatttccatacggttttccacatgatccgcctcaatcatcacatgaccggacccagccttcggtttcattccatggacatacgcattctccacaatcggctgaagtatcagcttgggaacgcgtcgttcgctgagcccgtttaaatctgcagtaaaatgaacctttcccttgatccggcagtttaacagatatacatactgccgtgttatctccacctctttttccagcggcaccatgtcctgcatagggcctatcatataatgaatctggctggacagtgcctctatcatctccgaaaccacggtatcatccttgtccagtgccgtcatccgtataatttccagcgtattgtataaaaaatgaggataaatctgagatttcaatgccgtcatctctgcttccgcctgtttcatatgtgcaacgtaagactgattgatatagctctccagctccttcgacatctggttaaatctcctggacagcaccccgatctcatcgccggaggttacaggcagacgaacctggaaattacctgtctcaatctccgacatctgttccatcatattacgtatcggctttgtcaggcgcctggaaaaccacacggaaccacacagcagcgcagccagagaggcgccgataaatacgtacatcattttctgcatacgcctgattttttcgtaggccgtggccgttttcattgtaataataaccctgagtccgctggcgttatagtcggtatccacgacgaactcctccttcgtctcctcgaaccggatgccctcctcatccagatttctgccgatcacagacttatcactgctgtaataacagttattatccctgtcgcagacatagacctggtccttcgcgtttaaattcaggtttttaaatactgcctccatgcgttctaaatccacatcgataaacagtgttcccacatacttataatttcccacagtccccgttaaatcaaagtaattcctggccagggtaaagacccaggaatcctgcatacggaaataatcatttttatgtgtcagaatcagcatcagattcttactgctcttatccagcctgtcaagccccatcctggcgtcaaacaccgcctcctcctcagacggtatattccgccgcgaccggtgaaaggccagcttttccccccgaagaccgttcccgacaaaatgtgctccggaaatataactgtccaccgcctggacattccccaggaacaccatcatacttttataccggttcgcctccatagtttccggttcttctccaattccatagataatctgtctcagattatcatacgacatataattaaactgaaactccccctcactggaataattataataataaggcatcttcgacaccccgttatagttctccatcatatcgtccagcgactcactcacataagatgccgcctgaacgtaattactcctcagcgaattgccatactccttaaacatccggtttacgatcaccgtcgaaagaaaaagcatgggaattaaccccagtagaataataaccaggcagaatttctgatataaactcaaattccttttccaacgcttcttcatacctgtctcctcccattctccccaaaaacttttatctattataccacacctcccttttttcctcaatttccgccgctgtcttccgcctttatctcctcccaccgccagtacacaaacctaatgcctgcataaaagcccgggaacggcaggagcagaagaattcagcatcttccgctcctgccgtccccgggctctccgcaggcgttggggcgtacccccttgtcaccctatcccttcgctgctcccgccgtaattcctttcacgaaatacttctgcagcagtacgaatatgatgagtgccggaacgatggagcagacggttcctgcaaacacgatatcccatctggctgtatactggcctacaaaggaatacacctcgacggtaattgtctttgcccggtcggaaggaagaacgagatacggcatcaggaagtcattccagattcccagaccgtttaacaccaccatagaagccgtacacggtccaagaagcggaaacgttactctccagaaagtctgaaacgggttgcagccgtcgatctgagcggcttcctcaatctccagcggaacgccatttaaaaagctgcagtacagcagggaaccgaaggccaccgatccggatatgtaacaggcgacagggcctgccaggttcccgaacagtccgaacatcttcatttccttaaacagcggaaacatataaagatgaaagggaatcatcatgcccgccaggaaatacgtgtagatgagtctcgtcgtcctggtttttctccgctccatggcataggccgccatgggaacgataaaaacgatcagaacctccgacaccagcgtcagcacaatgctgtgaaaaatagccgtcacaaaatccgactgtgcaaataaatcctgaaagttttttaaatacagcgatgcaggcagtgacatgggatttttgagaatgtcactattgcttttaaatgcagagattattgcaaaaaacacgggtgccagaaacaagactgccaaaaagacagtcactgcaaacaggaggccgctgcccgggcggattcttcgtttgctggctttcattcctgctgttttcattatagctgcacctccctgcgttttaagatactctgctgaaccgcattaagaatcagaataataaacagaagcacgatgccaactgccgttccaaatccctgtctgccctcgttgaagcctaccttatagagcaggtatacgatcgtctctgtcgtaaatccgggaccgccgtccgtcataacagaaatctgatcaaacaccttcagtccattgattaaggaaagcgttaaattgatggtaaacgctccggatatcagaggcagcgtaatcgccttaaaccgttgaattggcgacgctccgtcaatggccgccgcttctaccacatccgtaggaacgctctggagcgaagccagataaataatcatgtaataaccggcgcccttccagatcagcaccacacctaccatgataagagccagcttcggatttcccagccagtcctgacaggcctctcccataccgatggagcggaaaatggaattgattgctccaaaattatagttgtacataattttccagataaaccctgatacgataccgctaatcagtaccgggacgtaaaaagcgctccggaagaaattcttcccccattttacgttatccacaattaaggcaagaatcagtgccatgctgttttccagaatcgatatgaatgcggtcagtatcaccgtattcctgagagcatttccaaagcgggcgctggtgaatatttctttataatttgccagccctacaaacttgacgaccggatttaagccatcccatgaggtaaaactgtaatagacgctggcgatcgttggaacgatgataaacaacgtaaaaaacaggaacgccggcgcgataaatcccattgtaacgaaatcaaatctgacttttttctttcccatcctctgttcccatctcctttccctttcttttttaaggggctgtcagggaaccggtcaggctccgtaacaaccccatttgcacatctgttctattgccttactttgcgtcggttaccggattaaagctctgcatggcaacctgccatgtcttgttcatctcctcacaggcagacggaatgtctctctggccctggatcacttcgatcactgtcttgtatgtaaagtttctgaaatccggaggaagctcattctctcctacacgtccgttccacattacgcttaaatcatccgcagtgttcgtcgcttcaattacttccatcatgacagggtcagccgctaaatccggagtctccacggttgatggaattgcgttcagcttgtcgcagtaaaccttatagttttccggcgtatagaagaaacggataaactcctctgctgctgccttcttgttgggatcctttgcggattcagcggagatcgcaaggcctcccgcaccgccgccgccaacaagacgggtttttccatccggactcggaactgcaaaccagcccacttcaaaattcggatctgcgtctttaatctgagagaacatatgggtgcctgaatacatcatggccgccatatcgcttaccaggaatgtggtaatctgggcatcaggtgtagatacccagccatcctgggcatactgaaagatagttttcatctcttcaaaggtcgccacgattgccggatccgagaagtccttggttccctcgtaacaatgcttgataaaatctatatcctgactcataacctggtcattgtacgccttatagaaccagaagcccacatgccagatatcctggccgcccactactaatggagccatgtctcccttatccttaatcttctggcaaagctcgataaactcatcatacgtcttcggctccgcaaacccattttcgtcaaaatacttcttattgtaaataattccattggtattttcaccgcctaatggcgctgtatacgtcttgccgtcaaacggaatcgtcgtcttaaacatggaaacgatatcatccggcagcggttccagcatcccggcacgcacgtatatcggcgtatctctcatctccatcacatccgggaactcaccaacgctctcctttgtctttaaaaattcactgtatgcgccaccattacccggctgaatctttaccgtaatatccggataagcctcgttaaaacggttcacgatctcattcatggatgccttggctccctcatctccatcggcgaagatgaaagtcagttccgtcggctctatcacgatggaagcttcggttcctgcagctgcctccgtcttttctgcttcgttttttgccgcctctgtctttgcctcagttcccgcgtcagacgcctgtgacgtacttcccgcagtatccttagagccgcatccggccagcagcgtacccgccatggccacacataatacagaagccagtaatctctttttcatgttgttttcctccttaacgccaatgttttctgtgtttttctttctgtcataactatatcaggaaatgcgttccggaaaaactgtgttttttaaggtattcatgcaatttttaaagataattgaccaaatatcatagacagcaggaacagataacgatacaataagacatcataagaccaggataacagaagatcatacattctttggaaaggatacctttgatatgaacttagaagctctcatagacgccggtttcagaggctgtattcaaatcgccgtacacggcagaaccgttttcgaaaaggcttgcggatatgctgatctgccaaaccggattcctaatgacagcagcacaaaatttgcaactgcctctgccggcaaagtatttgtggcagccggcattttacagctgatcgaaaagggaaaactgaattttaatgatacgatcggtgatatgctcgattttgacttaaaagccattgaccgcaatattaccataaaggagctgctgacgcatacctcaggaataccggactacttcgacgaaagcgttatggaagactatgaggacttgtggagagatttccccaattataaaatacgttcgaacagagatttacttccgctgtttcttgagaaacccatgatgtatccgcatggtagccgctttcagtacaacaataccggatttgtcgtgcttgccataattatggaatccatcacgggagctgtgttcgatgaatggctgcaggatcacatatttgccccctgcggcatgacctccaccggatactatgagctggaccgtcttcctgcaaaatgcgcatcgaactatatctgcagcgcccaggatcagacgtaccgcaccaacatcttcagcgtcgatgccaaaggcacaggggccggcggagcctttaccacagtcggcgatatcagacgattctgggatcatctcatgtcaggcagacttctctcaccggaaatgaccgcagacatgataaggaatcacagcggcggcgcgcagtgctacggatacggtgtctggctcaaaaaacaaaacggagtctactccccctatattcagggaagcgaccccggagtcagttttatctcttcttacaggaaagagaatgaaactgtcatcactctggtcagcaattacggagataacgtctggcagcttcacaaaatgctggcggcagaattagagaacaggggacagaattctgactaaatcagaattctgatcctttccccatcgtaatccacctggcagcttccgcctttcttcaggcgcccaaacagcatctcatccaccagaagcggcttgatctcctgtccgatgatccgtttaatctctctggctccatactcacggcttacgcctttcttcgccagatacttccggcctgccttcccgatcgtcagtactacgttcttctctgctgctttccgagccagactgcggaattccttctccacaatccggtctgccatggccgcatccagagggcggaaaataataacacggtcgaggcggtttctgaattccggtcggaacacccgcttcacttcatcggtaatcccttcctcattcagctgacgccccccaaatccgatggaggagcggtcggctttttcagcccccgcattcgaggtcatgatcagaatcacgttgcggaaatcagctttcctgccctggttgtcggtcagcgtcgcataatccatgatctgaagcagaatattataaatatccggatgcgccttctcgatctcatcaagcaggagtacgcagtggggattctttctgattgcttccgtcaagagtccgccctcctcgtatcccacgtatccggccggtgaaccgatcagctttgctacggtatgtttttctgcgtattcactcatgtcaaaccgcacgagccggattcccagcacctttgcggcagactttgcaagctctgtctttccaacgccggtgggaccgacaaacagaaggctgctcaccggtttgttctcttcattcaaccccgctttcgccagtttaatcgcattggtcagctgatccaccgcctcgtcctggccgaatatccggcctttcagctcccgctccagccttgccagcttctgccgttcctccgtctccactgtctgcttcggaatcctgcagatcttcgccagcacctcttccaccagctttttatccacaacctgaacctttttattcttcggatgcagctctaagtaagcccctgcctcatcgattaaatcgatggctttatccggaaggtaccgctcattgatatactggttggaaagaactgccgcatgttccatcgttcccttctgatagcggacatggtgaaatttttcataatacggctttaagccatttaaaatctccaccgtctcttccacggtcggttctttaatgtcaatattctggaaccgtctcaccaggctcttatcctttgaaaaatacttcttgtactcctcataggtcgttgcaccgataaacttaagcgttccatcagttaaatacggcttcagcagattggaggcatccatggaaccgccgtttactgcgcctgcccctaccagattatgaatctcgtcgatatagaggatgggattctcctcctccttcaactcctccatcacagccttcagccgtttctcaaagtctccccggaactgcgttcccgccaccatagagcccagatcgattccgtagattctggcatttttcagcttctccggcacccgcccctcattaattctggccgccagcccgtaggtgatggccgtttttcccacgcctggttctccgatgtggagcggattgttcttttgacgccggcataagacctgcatggtacgctccagctccgcttcacggccgatcaaaggacagcttattttcacttcctcattgatacagacggcatacttcatcaggaggcgttcccgctccgttccttcttctgattccgtatcttctgattccgcatctcctgcttccgttttgcctgcttccgttttgcctgtttccgtttttcccgattccccgccggatccatctgccgcacgttttccccttctgtctcccgttctcatttccatatcacggcttcccgttcccagctccactaagagatccacacattccaccccctggagctgaacgaaatacgcaccgtagctctcttccagttccatcatgctgtacagcagatgaggaagttctatgatatcgcggtccgaagaaaccgccttcctcgccgcctcttctatggcctggctcaatccgtagctgaccagtgttccgcctgcgtctttctccacagtgtccatctgccccagatactcttccagccgtgattttaactttttcacatcgccgccgcagcttttaaacgcggtccggaagacaggccggtccgtgagcacgtaccacacgtgttccggtgtcacatactcattccctctccggcccgcatttaaaactgcatcattcagcagctcctccacttcttttgctatcttcaactttccacctccacccggaacggatatccctgctctcttgcaatctttaccgccctggccgccttcgtcatggcaatgtcataggaatagacgccaaccaccgctctctgtcccttatgaaccgtcatcataatggccaccgcttcctcataattcttgcggaacacatcgatcagaatttccaccaccacatccatgggtgtaaaatcatcgttgtacatgaccactttatactgtttcggctgtttcagcctgatttctgttttctctgataatcccgtattcgccggcatactgtatcttccctcctgatccggatcgctaaacttcattttaatcgatcgtacatggaaatgcaatttttattttctctcttgaacccaaaaaatctttgtggtacgataacctcatcccattgacagaaaggcttacccatgacaaaagaaaaaataattcctttggcccgcaaaacggtccatatactttttaccctgtttcttctgacggttccatgcatttcctatttcttatttgaatatgtaaccggtaatctggcgacgatcccttcttatatggcagcattaaacatcggctggatttacaccctttatcttcttgtgtttgctgcaacaggacgaacaaggatcgccgttccggccgtatccattctcctctttatcctttccctggccgaggctttcgtggtatccttccgaagccgtcccatcatgttctgggatattctggcctttggaacggccatgaccgtctcccaaaattacgtattcaccataacaaagtccatgaaaatcgccggactgattctactcgtcatcaatgtcgctgcaatcgcatttccaaggcgtatctccggccgcagattcagactcgcctttgcgggcacggcagccggtgccatcgcagcttacggcgtgtggtttttttcatttctcatgccctcgtggggtctgggaatcaacatgtgggaggtcaacgaaacctacaaagaatacggttacatcctctccaccgcggtgtccttccgctacgcggtgaaagagaagcctgctggatacagcacttcccagatcaagcggatttatcatgaatacaaaccggaagatgtcgtcctggcctccgccgaggatgtttccctgggcgaggatactgcagccccggtcaatattatctgcatcatgaatgaaagtctgtccgatttacgcacaggcggctcatttgacacaaaccaggaatattttccatttctctacagcctgaaggaacataccatcagcggaagtctctgtattcccgtcttcggctccatgacatgcaattcggaattcgaatttctgaccggggattccatggccttcctgccttccaactgcagtgcctatcagttttacataaagcccggaacatacagccttgtcagtaccttaaaggagcagggctaccggaccgtcgccatgcatccttacccgggtgagaactggaaccgcgatacgtgttataagaacatgggattcgatgattttattgacgagacccgctatgaagaacgggattttcttcgaaactacgtaagcgaccagtcggattatgaaaacctgatcaggcaggtggaaaacaaggagaacccagacgaccgcctcttcctgttcaatgtgacgatgcagaatcacggcggctatgaggggatctacgacaacttcccgcaggaggtatggctgaccggctccttaaaggataagtatccaaaaactgaccagtatttatccctgatgaagcgctcggacgaagccctggaatatttaatccgttactttgagaacagcagcgaacccacgatgatagtgatgttcggcgatcaccagcccagtgtggaagatgaattttacgatgaaatcgccggaatgcccagcgccgacgtccccacaggcgatcatctgatgtggtatgagacgccgtttctcatctggacaaactatgaatccaagtcagaacagaaagggaaaatgagcgcgatctatctcgcttccgagcttttagatcaggcaggccttgatatgacgccgtaccagcgttttcttctgtccatggaagaggaactgcctgtgatccatccgctgggctgttatgacgcctccggaacctactattcctgggaggagaccggcaccgaccgttttccatactgggaaaccatcagagattatgagtatctcgtttacaatcatagcttcgatccaaaaaaatataaggacatgtatactgcaggccagtaatgccggacactgcaggatactgatatctcagaccagataaaggagcatccgtcattcttccggaagctcctttatctggttcatcatctcctcggacatggaatccagcagataatttttattcttttcccctgtctttttctcctgatactcctgatgaaccgtttcactcaggcggctgatctcttccttcagttccctggccgatatcagccggcatccctggccgtgtatgataatctgctccagatgatctgaggtagccaccgtcacatcgtattttctcccattttcatgggcgaacttctcaatatactggtccgccgtctccgcttccttcgtatagacgacgcggatattgtggtagtccaggcactccgtcacatggccctgcacccgataggcatcaaacacggcaatcagctggcatttcttcattccctggtaattgcacagaatatcgagcagttttcctctggcgccgtcgatggtatgttccgccagttccttaagctcatcccatgcaaaaataatattgtagccgtcaaccagaagatactcttccctgggggcttcctttttgtaggttctcaccacgggaacactgtaagatttctcccggtttttccaaccggacttagtccccgcggaattcccccgccggttggcgtaaaaggtgcgttccaggatggcatccacttcctccgtgccgatccacgcttcttcccgctccggcccatcgccccgtccgcctgtccgctgactttttctgtcggcagctccggccgccccggctattccatctgccctgtctttctgtgtttccagacagctctccagatgcatatactccgggacctggtcccagtccaccaggaatcctgccccatgggcacagaatacggagcctgatgggttcgccgtatctccatccgcttcatagccgatggcagccacaacctcctccgtattgtggcacggcccgtagccggaaaatgtaaacgacagccttcccgcacctcccgtataagcggtcacctctttctgatatccccccatacaggctgcgggagcgcttccggtcagaaccgcccggtctccttccataacaggaggcatcactttcccggccatgcgttccacgtcgctcattgcccgtccgacataacggtccggcagttcaagacgaaaatcgtaaaatggctccaaaagcatggactccgcctgcatcagtccctgacggacagcccggtagacagcctgacggaaatcgccgccctccgtatgctttatatgggcccgccctgacatcagcgtaatcttcatatccgtaatcggcgacccggtcagcacacctttgtgctccttctctgccaaatgtgtcagcaccagtctctgccagcttttaccgagaatatcctcgctgcaggcggaagcaaactgaagcccgctgcccggctcgccgggttccagcagaagatgtacctccgcatagtggcgaagcggttcaaaatgccccacgccttccaccgtgttcatgattgtctcccggtaaacaatactccgatcgccaaattctaccgcaatcccaaaacgttccgcaatcaggctctttaaaatctccatctgaatctcgcccataatctggacatggatttccttcttgctctcctcccacttgacatgcagctccgggtcttcctcttccagctcccggaatttcggcagtacggccgccgcatccagcccttccggcagcaggatccggtacgtcataaccggctccaaaaggggcatggccgaagctgactgggttccaagcccctgccccggaaccgctttcgtaagccccagcacggcacagacagtaccagccggtgcctcccgtaccgtctcgaacttatccccggaatagaggcggatctgatttaccttctcctcgttgatgatctctctcgtcgacagactgccgcccgtgattttcatatggctcatccggtttccctgtgcatccctcgatatcttaaaaatcttcgcaccgaattcctgcggataactgggcgtttccgtatacacctcaagccccctcatgaattcttccacgccatccagcttcagcgcagaaccgaaaaagcaggggaataaatgcctgttacgaatctgcatgcgtatcccgctctcccccacacggccagtctccagaaattcgtccagcacatcctcaccggacatggcaatctgctcataaaaatgatccgttccggcttccccgaagtccacaaaggtttctttcagaaccttcctcagttcatccaggagatcaccttttcccagctccgccaggtccatcttattgataaacaaaaatgtgggaacccggtatctggcgagaagacgccacagcgtcctcgtatgctcctgaaccccatccgtcccgctgaccaccaggatcgcataatccagaacctggagggtacgttccatttccgccgaaaaatccacgtggcccggcgtatcgagcagcgtcatctccatgtccttccatttcaatatcgcctgctttgaaaagatcgtgattccgcgtttcttctccagttcatacgtatcgagaaatgcatctccccggtccacccgtcccattttccggatgcttccgcctatgtagagcatcgcttcggacagtgtcgtttttcctgcatccacgtgggccaaaataccgactgccagtttcttcatcttcgtatcgttctccttctatgtgctgctgcagagctcatgcttttttcctaaaggtactgccattggacaatcctgatttttattcgttctgattccgcctcaataccgaaagcaagctgtctgcaaaaaacacagacagcctgccattcagatttctgctttctcttttatggatttatgaatattatatcattcacaggtcaaaagtgaaagctgtttttcggttccgcttttagtaaatcaaactaaccaaagcggcttatctctttcacagttcaaaaaaatcttccttatccccccaggagcagtgcctgcatgccggatttctcctattttccaccagattcctgaatttttcagcccgttctccccgaaacagtgcctcgagtggctgatcccgcacattccccatggaaaagtcggtaaaatcggtgcaaaacgatgtctccccgttccacataatatggagatgacgccatggggaaagacagggcctcacaatttctccggaacgaacatgcggcagataccggactttaaaagaatgcgtcccgggctcctccaagcggaatccggccttctccatctccgaatccgcctcaccactctgtctccacgattcaaccgcctccgcttcgagggaaaattcccgttccatcacggctttatattctccaatctcccggccgtttaaaacgatcatatcctgaagcagcacctcatctacgggaaaatccgacaattcagcaaaaaactccttcagctgccctttcagctcctccgtcaaaacggccatacagaccaccggcagcaaaggcgccgcactctttactgcaagcagattcttccggatcttccggaatgttcccgctccgcggatgctgtcatggagccgttctggtccgtcaacagacacgtaaatcttgtccaggcagtccgggacagtctccgcatgccggtccagcagggtcccgtttgtaacgattccgacccggtacccccgttcatgaagtgtgcgggcgatcccatcaaagcacgggctcatgagcggttccccgccccagagcatgaccgagggcttctttcctgcaaccgcatccagctcatttacgatcctaatccactcttccgttttcagtgccatgctctccttgccgttacgcagcgcgctgtttttcctctgtccgcaaaaccagcagtttaaattacactgcctggtcagctgtaaatgaatcatctccagtcgtcgttccatctcactcttcctcaaaatatcgcatttccatcagcctctcctcaatcaaaccaagctgggaactcataatattgggcgaatacagggaacggagtccggagattcccagttcctccatcgcctccgccacccggtcatttgcccggtacaatgcctccagcgcctctttcacattaaatctaccgggagaagtcggagcaggcggccatctcgcatccgacacccacccttcggtaaccgcccgaaaggccgcagccaatgcttcactctcatgccagtcgatctgcttataggcggcgattccctcaatcccctccagaatcattcggcagaccggatccagctgtagcgcctgatccgtattcagccatgcctttgccgttcccccgtgccacgcagccccattttcaattttcaaaatgaagggattctccagaagctctgcggattccatcacctccgaaggtgtcgccggaacaaatccgctttctatggacaggtccatgatttccttaaaccgtttcaagctgtcgccttcttcctcaaagaacctggcctgattaaactgtttgacatagaagtatgccgaacttcctatgtattccgcatcctcggcatacggcatgataaaggagcctgtctcctgtgcacgcgcgttccagcggcagaacatggactgaatctcctcatagcggaccgcctcgtttctcacgccctccgtcgcccccatcagataccagagcagcagatttgccatacaatcggaacggaagatcagcttcagcccgttatcacagatagagggattcgtcagatactttaaatactccggcttatcctttatatattcctcgataagaaacagctggtttttattgctgtgcccctgcacgtcatagcacagtccggtggcctttcttatctcgggaaatgagaggaagaaggaatcggcgtccataatgagtgtctcgattcccacctccttatagatgcccggaatctgtgcgttccagctgcattccggattccatccaaccttcgggcggattcccgtataacgctcccatgtatccaggctccttagcaaggtatgtaccgccacctcacgcggcacatttcccatcatcagatgtgtatacggggatgccaccggctccacctgaccgtccagaatcagcgccttcagcttttccatgacctcgggagccagcctctccatttcatccagcgtcttgccgctggcctcaaatcctattttatactgattgtcccgaaccaggtcaaacagcttttcatagcagtttttcacgacccattcccgccgttccattttcagctgggaatactggatgttcgcatgtggaagaaaaataactttaggcctcatattatttgctccaatcaaagattattttaaatacatcctcgcccttcgccatcttgtattcaaatgcctccgcacacttcgacaccggccaaatctccaccggaaggccgttcgtatcgaatttcccctcgctgatccaggtaagaatctgctccttacagccgggcgccagcgcacaggacatggaaattgtgcagttctttgtaaaccagcggtgatagctgtccatgatgattttctccggataatccccctgccagtgaatatggcccggcgcatcgtcggttccccagccgccgtcctttaaatatttatggagaatacctggcacctccgcattgccggagcactcgatgatctgatccgccatggcgcctccggtggccttcctgattaccagttccgcttcaaacggatcggtcacaagatccacatacttcttcgcaatgtcacgcctgaatttattcggctcaatggcaatgactctcaaattcggatttacgatctttaaaatctgcatggcgctgattcccaccatgcctgcgccgctcaccacgatcgtctgtctgccctccagattcagcatccggattccctttagggccacacatggaagataagcaagcacaccgtcaatataggagaggttttctggaatcttaaccatatagtcaaacgtgtcattcgtggtatcggaatcctttaccgtgtattcggagccgccgccccatgcggcacagacatcaccgtatttcctgcattcgttaatcataacccggtctcccggtttcaggcttccatcgctctcttcccctgccgcgactacctcaccggcggtttcataaccaggcaccagcggatagtagcactgttccggatgctgaagtcccttataggtcttcatatccgtcccgctggaaatactgctgtaatacgtccgcgcgatataggcatcctttttgggctccgtcagagtaatctcccttaagcggacttcatatggtctctcgatcacgacggcccttgtcttcttataatcgtaaatagtactcatagccagacctccttcaaaatagtctccaggtactgtttgctgcgcctggtcccttcttctatatcccgtggttcctcatattcgatcatcagggtatccgtccatttcaggaccatttccatggtgcgtttccagtctctcttctcatctccgatggctccaggttttaagtgaccgcccggcagcttcacaaaatccttgatatgggcataggcgatgcggctgccgacaagctccgccgtctcttccacatcgcatcccgcaatggcatagagattggccggatcgaagacgaatttcaagctgtcatccgtttcccggagaattctctttaaacccccggtctccgtggctgccgaatggaaatgaaccaccccatccggatacgccatcactcccccatgggtctccatggctgtcaccactccatgctcctttccataccgggctaccatgtttaacgcatctatcatacgtgaaaagcgcgtctcatccacttccctgtaaggcgtaaaaccagcaaatatccgcagcgtttccactcctaaaaaggaacagatatcgattaccatcttaatcttcccgatgtcctccgctgccgcgttcccgtcttcaagcgtaaagtcattgcccgtcgccgcggtatccagagaaatcccaaatgcttcatactccttctttatctgctcgagaagacgtacatctgcgtctgtctgcacatccgcaggcgaattggcgattcccagttccagggaaacgagccccaggcgtcttgccaagtcaagctgctgcggcattgtaagctcccgaaagccccacgcagccgctccgattctaatctccttcatgcctcactcatcctttcaccgctcccgcgatcagtccctgaatcaaatatttctggaaaatcagataaataataatgattggaatacacacgatcatggctccggcaaacgccgtcacataatccgtattcagatatccgtttaccaccgagtagagccctgcgataattgtcctcttctccggcctgctcacaatggtaaatgccagcacaaactcgttccacacccacataaactgatagagaagcacggtggccagagccggtttcgccagaggaattgcaatgttggcgaaaattttaaattcccctgctccgtctatctcccccgcctcgtaaagttcatacgggattcccgcaaaaaatccctgaaggacaaagactgcgaagggcaggccgcccgccgcataggtcaaaatcagtcccgcgtgggaactgccgaatcccagctttcttaagacaataacgatgggaaatatgatcattccagccgaaatcgtttgtcctgccagaagataaatcaaggtcacctgacttaaattccccttatacctggaaatggcaaaagccagcatcgttgcaaaaaccagcatcaataacagagagaaagcggtaatcgtcacgctgtttttcgtgagaacggcaaaatccgctttctgccacgcatcgctgtaattggaaaacaggaacttttccggaaggctccagggctttgtcatcaattcctttttggatttaaaggaagaaaagaaaacccagataatcgggatcatcgtgacgctgaataccatcgcaagtacgaaacctaaaaataacttttttattgtcttcatgctgtccgtctcccttctcaatccgcagtcctgttctgtattttcatctggataaaggaacagatgatcacaaacagtgtcagtgctgagatgatcgccatcccgtatccggcattggaattcgtaaatacagttttatacgaatacgtaagaatcatctccgtggtataataccccggccctccttttgtcattgtgtatatcagatcaaaaactctgaatatatctataaatactaaaacatagacaattgtgataattcgtttcatacacgggatggtgacatttctgatcacctgccacctgcctgctccgtccagcaccgcggcttcgatcagatcgatggacactgactggagacccgcaagaaacagaacgaaatagaccggaatcatcttccagagagaggtaaaggtcaccgcatacagggccgtcttcgtattggtaatccagcctgtagccagccctcccagtcccaccgcctttaatatctcgtttaaaataccgtactgcggattatagatccacttccagagaaacacggttacaatcgtcggtatcatagccggcaggtatgttacagtcctccagaaggactttttcctcgtgaaattctcaaccagataggcgacggcaaatgcggccaccggaacgacgatcagggtgataattccatatttaatgttgttgagaaccgatactcttaagatgctgtcatacaacagattcacataattcttaaatcccgtaaactgcgcgtccgccagattcacaatgccgttccagttggtaaagctgatatagaatcccaaaaatacgggaaatatccagaacacagtgtacacggccagcgcaggaagagaaaacattagaaaatattttcggttccttctctctttcataaagtgtacttgaagactcagctttagacatgagaggaattatgcccctctttactcctttgtgagctccttctcctttttaataattttcaattgctcaaatattcgcttgcattttactctattattcagtataatatactcatatttaaagttaagctaagaagaaaaccgttatgtaatcgcagagaaacacctgattacaaagacacttatctcgacccttccagtgcaatatatgttgtactggttttaagagaggagccggatgtatgaatccggcccctcaatttaactaagaaagtgaagattcccccacatctacaggcggaagggtaaatcgccaaaacaagtttaacggtagtggcgggcggagagaaatcggtatcccccactgacatgaggtcaaactacacatctctaaaaggtgtggccgcactctgtgaaattaccgaacgtggattgaaacaaacgctatttctgagcctgctcctcttcccagatcttctggacatgatccagcacaccggccggagtctgatttccctgaatcatctcctggatgcccttgatcatattatccagtaccttggaggacaccatgtccagaaggtagaaggaatctgcggttcccgcgccctttaactgctctgccgctgtaaggagagccggatgggtaagacctgcgttccattcgtccacattgactatttttcctaattctgttacatcactcttctgaaccttttcaccaaataagaatgccagtgcctcctcggctgcctcctgatttttcacgtttgccgggatacaccacatgctgccccaggtaaccgacacactcgtctttggattctctacaaaatccattttttcaatgatattgtactcgaaatcgtcttccttcgaagaatcgatagccgatgccatgcccgtgtgagccgtgtacatgccggcctttcccataacaaactcggcaatcgcgtcatcgtcggaaatatagtcggcgctggacttatcgattacgccgctcttaaccatctcatcgacaatcgtcattgcttccaccatggaaggatcgttgtatttcgcctcattattataggctttgatcagcaggtccgtccccacaagctgagcctgtaccttagccaggagatccggagcacaccagttccctccgccggtcacaatcgctttgtagccattgtcatttaaagtcttcgcggcatttgtaagttcctcgagatttgcaggctcttcaattcccagctccgcaaacagcttcgtattatagaagatacagcttgtatttgcaaaatccgggattccgtacacgccattttccggattattgagcgggcctgcccatgcaagcgcgcctttgttgtaattccagccctcttttccgaggaaaccggtcagttccatgagctgtccattggcggaatattcgttgaaggtcgtcttcatcagctgtacaatctccggcggattatcccccatcagctccgccttcaccttgtcgtcatagccctctgaaccgtaaaattccagattgatcttaaccggattgctgtcatctgcattgtactcgtccacaagaacgggccagttggaaatctggctctccgaccatttaatcagaactctcacttccggtctctccgccggcttctcactctctgcagccgcctctgttactgcctccgtttcttttttctctgcagccgtcgtcgtctcttccttcgcagcaggtgcagacccggtcgatccgcagccagtcagtgctgtaaatgccagtgctgctgtcataacaagtgccagtgtctttttcttcatttccttctcctcctgtaatcaacatttttaatatagttcatcaatacctttcacctcatctgtagccttttaaaacaaagaaaccgcggtttatagtgcactctgtttactttttattgatttacaaactcatttttgttaatattataatataataaacattcatcaaaaacaatatgttttgttgtattttatataaaaaatgttgtatgtcaggaggaacttatgcagagaaatatgatagaaatctttcgaaagaatatttccggggaatcttcatccctttcctttggttatgccggccgggaacagtgcatgggcagccactccttcggcccagccaggagggcccactacctgattcatttcattataaaaggaaagggcgttttctttgccgatgacaaaaaatacatacttaagcagagagacatgtttttaatccggccaggagagacaacattttactatgcggatgaggtggatccctgggaatacgcatgggtcgcattcgttggaagtgacgctgcacagattacggaaagctgcggctttgcttacagtcccgttgccacctatcccgattcccccgaactgattgaatccatcgacgatatcatccaccacatgcagaccggtgatgaaaacgactactaccttctttcccggctgtacaacattttttactatctttccaagccggttatcaacacacagaatacttataaaaatgagatcgtccgccgcacagtcaacctaatccggagcagctattttgagaaactcaccatccaatggctggccgaccaggtccgggttgacagaacttatctttaccgcctttttaaggaagaggtgggaatctgtccaaaagaatatctgacccagtacagaatccgcatggccacagtcatgctgtccaccacaaaccagtcaattaaggagatcagttacgcctgcggctttaccgacacctcccttttctctatctgctttaaaaaatatttaggatttaccccgcagcagttccggaagattgatggcatccaacagctttcttttcaaatgatggatgaaaaggcaaaatgaattaagagccggaaacgggcatcatcccccattcccggctccgcctttcgccgcataccgatcctgtaaaaatcttcttctgtacttaagctccgcataatctgtgatccgttttagatacacacagtccgacagtccacccgcaatcccgataatcggcagtccctgtacaaacttcatatacagaagttcctccgacagccggttcgccgccttccgcattaccacctgtttttcttccagactgccagttccctcgatccagcggttaattctctcattatcctcagccagttccccgccccgctccaacgcggtctttatgatctccagcagaaacacctgctcccgcccggactcataggcatacccgtagctgactgcaatctcatataaactcttcaggataacgcctgtaaacagcggaatatccggtattccgatcccgaagactccggtgccgatcccctcaacgccggagatcagcaggttcttcgccttcgttgcgcctgcctgcctcgaaaacgcttttaaattcttcctgctttccttcagttccgccgcataagcattcagtttctgccggtactctccgtcttccttccggtaagtcttctcaatcaccgtaccgcccttttcaaaaaccagctgaaacgccttataaaatgcagcatccagtgttccctttaactgatccggcacaacctggtccagcttctgattgatgggcgacggccccttttccttctgccgttccacgaaacgggcctcgctcctttcaagcgcagcccattccttttccagcgccgtcctctttttccccggccgctttcccggaaactccatgtttaatacacctcgcttccgaacggcatcagtgccagcttcgccagtttgaactgctgaagcccgaaaggaattccaatcaccgtaatgcacagcaccaccccgatgagcgccgattcgattgccaggggcagacctgatacgatgagccagattaaattcaaaagaaatgacccggctccgccaccgtaccgtacctcttttccaaacggaaagaaactgagcgcggcaaatttaaagcactgcatccccactggaatgccaatgatcgtaatacaccacaggcagccggtaagcgtccagctcagtccgcttaaaaagccgccgaatataaaccagagtaaatttccaagacaacccattcttatccctcatttcatgactgagcattctgttactggtcactctattacactgtaccatcccgccgcacactccgcaatccccggacaacagcttttagaaaaaaataagggttcgctaagaattctcttcgttttcctcacctgaccatacgaaataccactccatacagagttcatgccaggcggcagccgcttcctcatactggcggcagagttctacataagccggttccatttcccactggccaccggtccagaaatcttccgattccatccactcctgcttcatcgacaccatcgacgcatacagctctcccgccctctctccggccggaatcattgtttctgataccagacggagccgccagtcgatgtatgcctcttctgcagatatttccttaagcctgtggcgttccgcctttggaaccgcccttattccggcgatcagcgcctgttcctccgccttcacctgagccgccaggccgccttctccctccgatttccgttttctctccaggtaatgcccatatccaaagggataatacatcaccgaatgattttcaaagatcagaagcgcgtccgccacctcgcttaaaaaataccggtcgtgagagacgaacagcagtgtccctgtatatgcgcggaatgcggattccagcgtctccttcgcctggatatccatgtgattcgtcggctcatccagaaccagaaaattgggtctgctctgcaaaagttccgcaagcacaagcctcgccttctcccctcccgagagagaggaaaccgatttctgcgcttcacgccctccaaacagatacgcccccagaatgctgcgcgcctccttttccgtcagggacgggaataagtcatgaaaatgatccgccaccgttttttcagatgtcacctgagctgagagctggtcaaaataccccatggttatgttgactccaatcgccatttcgccgtccagcggcggaaggaagcctgcaaccgtctttaaaaatgtcgtttttcccgagccgtttggccccaggataccgattttctgcccacgccggattcgcaaagtgatctccagcagcgcacggtcataccctactttcaaatgttccgattcaaaaacccatttactgccggtaatgagcggcgtcagttccccggtaaatatatggatctcatcttcctccggcttttccacccggttcatccgttccatggctttcttcttcgctcgggcaaacgaagccttggacggcttgtgtttaaaccgttccaccacggaattcagccgctccagttcctctttctggctttcatacgcctttttctgaagccttatgcgtttcagtttctgctccctgtatgcagaataattgcccgcgtagcgggtaagcttccctcccgccagctcatagatcacatcagccgtccggtctaaaaagaagcggtcatgggataccattaccaccgccttgtcatactgcctcaaatactcctccagccactgtaccgtttctaaatccaaatgattcgtcggctcatcgagcagcagaatatccggtttttccagaagaagccggatcagtgcgatcttcgtctgctctcctcctgaaaaggaagacaccttctttttcttatcttccttagaaaacccaaaaccggtaaacaggatatcatactcccgctcgtactcgaaccgctccctgtcccattccgaaaaaacggcggaaccgttttggcccgttcccgctcttttcggacacccttttaagagttcttcctccaccgtctctgatggatcatcaaagggctgctgcctcatcatgccgacagtaagcttcctggatgtcacgattcccggtccgttccgcttatcgtcccggtccagggtcagctcgcctgccaaaagtcttaagagtgtcgtcttccccgctccattcttcccggcaaccgcaattttctccgttccccgtatttcaaaattaatatgagacagaattgtcactccgccggcactcaccgtcccatctgttatctggtataacatagcgtttcctttttccattttattatttacgcaggcagcgagtcaggcggacatgcttaacgatccgtctggcggctgcgtttctgcctcttcatcttaccacaccagctccccgggcgccatctctatttaaaaccgttccttttctcttacacaaaatcggagcccggaagaatcagtgattcctccaaagctccgattttctgactttttgcttttactcattgtccctgcggtcaatgacagccgtggcttccatggttcccatgatttctgtggtgtccactccggcttccgctttccgtgccgcaggtttcactgtgataggaacacgttccatcctggcaggttccgcgatagattactccatcgtgctcatggcaggccgctgtctcacagccttccacggcacacgcctcataccggtcgcaggcacgtgtcgacgccaacgccggaaacgccatacttaatacaacagcagatgcaatcattccggttattatctttttcataaaatcatttcctcatttcatttttattctcgcttaaagaatacgaaggatctccggcaaaccatagggtctgaaaaaatttttattgatttacaccagctggaaaaagctgtacaatggcagggaacaggaggtggaaccgtggatgacattgaaaaccgtataaaaaaagcacagtcagactcttctgaactcgagctgctcataagcgactatctgcctctcttaaaaaaacaggccggcgcggccgcctccggaatcctggaatacgaggaccggctcagcctcgccatgctgacattcatcagctgtgttcgccagtatacggaaaagagaggcagcttcatctcatttttctcggtctgcttccataaccggatcacggatgagattcgcaggcagaacctgtatttaaagaacgttcaaacgcttactcccgactcggccgaactggaaaccgcggccggtaaagcttcattggatgcctacgacagggaacaggaacgtctctccctctgtgaagagatcgaccgcctttccgaagccatcggcgtttacggcgtcgcctggaaggatcttccccgcatttgtccgaagcagccgcgcgccaaagccacgtgccgtcaggcggccgctgccgtactcctgaacccggaatttcacgccatgtttttcggccagaagaagctcccgcaggcacagcttgcctccgcactctttctttctccgaaaaccctggaaaagcaccgaaaatacattgtaactctgatcatcctcttatccggagactatcccggaatcagagcatttcttccacaatacagggaggtgataccgattgaagactggaattgtcattgaaataacagggaaagacgctattgtaatgaaaaacggaggagaattcatcacactcccggcgaaggaaggctggaaaaagggagatatcatccctgtaaacaggagaaagagaccggctgtccctatccgccgcttcctggcagcggccgctgcctgtctgtgccttgcagtatccggaggcgggtaccactattactatgcacaggcggctttaatcagcgtggatgtcaatccatccatcgaactgtctgttaaccgccaggaccgggttacctccactgcagccctgaatgaagacggaaaggcactgcttacgggaatccggctgaccggcatggaatgcggtgaggccgtaagagaactgctgcaggcagaaagcagcggacaatatccggccgatcataaaaacgtggtcgtcaccgtctactccaccaatgaagaccggcagtcccggctgttaaaagaaatccgcgagacagcagatcatgcgcttaccacccgcgctgcggatggcagcacggaataccgggctgtgacctccgaggaggtaaaagccgcccattcctgcggagtgaccgccggcaaatacatttacttgcagaaactggaggaagccgcccccgggaccgatatttcccggtacagccactgctccatcgatgaaattaaggatcacatttccaattgtgaaaaacggcatcaaacggattccacggaatcagacagcggcggcaaagactgtcactccggtcatgaccataaaaacagataggcccgcctgtccttacagggaatcgtgcgtccgggctctcgcccttctgtcccgaaccgactgaatcaccggtaccaggaacatggcgataatgccccctgcaaatccattgttatagaggttcattcctccatatacgattcccacattcagcgccacggatgcgtgcagaaatccggccagcacaccggccaccacaccgaactcccccgcgatgggtgccagagtcgtagagagcagaagggccagcatggcactgggatcagatatattccacgttttcacaaaacttcccagaatcacgcctgccataaccggcagtatattcctcagatgctttcctgtggcgctgaacccgacgattgtgaagattccgccgatggtgggaccgtttaaatctccgccggccagcagtacaatcagagtggaggcgattccattgactcccatattaaacagagtcggcgcaaatccctcacttttcacgtaatcggtaccgcttaacccgtacgtcttccatatttccatataccgcttccagaccgactccgcgataaggcaggaaaacagaatcataccgccaaacagcccgagcagcagtctggcgaagagcacgtcatttcccgtagaccatatcagacgggcttccgtctgcagtccgaaggatttcatcagagagacgataaccgtcgctataatccccgaggcaaaccccacattatacagggagtagcccttatgggagtaatgggtatgtgtggacagcggcggcagcacgaatccgatgatcatgcccacaagaatgctgaacggcagtcttactgccagaggcagatgtcccaccgtcataagctgggtaataatcggcgacagactggttccatagaagccgacatagatataccgtgtgaccgaggtcttgtgataaaaagcatagagacagacgcccatcataatcgaccagatatttaagatattctttccgaacagagaaaaaccgaacataagaaagcaggaagtaatcgtatgcccgctcatgtccatccccaggaaatagacaattgcaatggaaatcagagccagcacaccggcattgataaaagcggccccaattcccccaattgcaatataatccgtaatcaggaaatccggctccctgataatggtaacaattcctctccatacttcatctgccggctgaagaatcagccccgcagccataaaataaaccggcaccagggcaagaatcagaaactttgtccgtctggacaaaggtccatgatttctgaacttgtgtaataattgtcctgtcatgtcgtttccttcccatattgtattctgttgataccggattattttatcatactattttatccatgaaaagcgttaaaaaaacaacgatatcctcagcggctccgttccctgatcaccttcgtcatctgtatgatcacagtcggaatcaccgccagcagatagacgagtccaatctggccgccagtcagagccgtgacggaaaacagtttttccaggaatggcacaaacattacaaggcttaagagtacgacgcctgccagaaatgcaccaaggctgtaccagttgccggaaaatccaattctgaagatcgaatggctgcttctgcagttaaatccatggaacagacgcgccagtgtcagcgtacagaatgccatggtactggcaaccgcagggccgccctgattcagccccagatggaaggccgtcatggtacagacagcgataagaccgccctgcaggaacagcttcatcataaattcctttgtcaaaatcccctctttcggatctctcggcttctgagacagcaaatccttatccgccggttccataccgatggcaatggccggaagcgagtccgtcagaaggttgataaacagcagatggaccggtgcaaacggcacagggagcgccatgatggaagtataaagcaccgagagaattcctgccgtatttcccgacagtaaaaactgtatcgcatttttaatattccggtatacgtttcgcccattcgccacggccttgatgatggtggcaaagttatcgtccgccaggatcatggatgccgcatccttggacacctcggtccccgtaattcccatggctacgccgatgtctgccttcttgagggccggtgcgtcattaacaccgtcgcccgtcatggaaacaatgctgcctcttctctgccaggcatcgacaatccggatcttattttccggcgataccctggcataaacagagatcttcgtaatcttttcatccagctcctgatcgctcataccatccagctcggctcctgtaaccgccagatcgccctctgaaaagatgccgatctgtttcgcaatagccgtcgccgtgatcttatggtctcctgtaatcataaccgggcggattccggcccgcctggcatccgatacggcctctttcgattccaccctcggcggatccaccatggataccagccccagaaaggtaaaaccgttctctgttttcagggacagcacatggccgtcctccacttctttataagcaaatgccagaacacgcagaccattccgggaaaattccatattctgacggttaatttcctccctgtctgcctccgtaaacgcccggattccctcggaggtacggatatgggttgtccggtctaacaggacatcaaccgcacccttcgtcaaaatagtaggcacaccgtggagttcatatttggtgctcataagctttcggtcggagtcaaacggaatctcctccagccggagcatcatcgtccgcagcacatcgtcacttacactgacctttctggccatctccaggagcgcatattcggtggggtcaccgataccctttccgtccacgatggcagaatcattcgtcaggatcgaatcgtataagatatagcggtgaagctgttcatgcagatccagttcttccgggcggaagattctgccgtctgtgtaaatctcctggacagtcatcttattctgggtcagggttcctgtcttatcagaacagatcacagagacgcagcccagactctccaccgccttcagttccttgataatcgcgttttccctggccatcttctgggttcccatggcctgcacgatggtgacgatggaactgagcgcctccggaatcgcagccacagccagcgccacggcaaacatcagcgagtccagaaccggcatcttccgatacaggcttaaagcaaacacaatggcgcagatgaccatgataacagccgccaggcgtcctgaaaactgatccagactcacctgaaggggcgtctttttctcctttgtggcattcatcagactcgcgatcttaccgatctccgtatccattcccgttccggtcaccaccaccatggctcttccgtaggtgacaaggcttccggaatataccatgttggtccggtccgccagaggcatctcgccgtcaatcggcccctcctccttatccacgttggtggattctcctgtcagggagctctcattcacctgaagcgaatagttgtttaaaattcttccatccgccgccaccatgtctccggcctccagaaggagaatatcgccgggaaccacgttggccgacggaatctggatcttctgaccgccgcggatcaccttcgcactgggggaagacagactctttaagctttccagagatttctttgccttttcatgctgaacagtccctaaaatcgcgttcagaatgatgacggccacaatgacaatcgtactctccacattccctgaaaacatggaaatgacggccgctgcaattaaaatgacaacgagaaggtcacagaactgctccgcgaataccgcaagcacgctcttcttttttccctccttcaacacattttcgcccttttcgagaaggagctgttccgcctgaccggctgtaagtccttccttcgttacattgagttcctttaatatttcctgttcgtctttctgataccaatccttcaaattttcctccattctgccgtttttcgaaaaaacggccgcgcatcagacttaagctgaattgtgcttccggaatgatgttccgcaccatcgtctcttatgaaacaaaaaagacttttaatgtacctattataagaaatgacccatttctcaaaataaatacattaaaagtctggtaaccaacgtctggtatgcatcaccagactgttttcacagccaggatgttgatgatgcactgaaactactccctcttaatgaatctgattcagcagatgcttcctattcaatttgtgattagtagtatatccggtttgatggggggtgtcaaggtatttttgacattttttctcatcaaatgcgatcttcacaacttcttaatctcactccatgcccggaaattcttgttgagaccgttaaatatggagccttccttccagtccctcataatccaccgtgaccgtcctgccatccttcatctccagaacaatgggaccgtatgccccgcatttttctttatccgcataggagatgctccggatcgggaaaaggtcctcgtcccgccactcttcctggcttttctttgtcagaatcacgctgatcatcgcatacggaaggtattcatagtatttcctcctgcggctgacgccatacataatacagctctgcttcgtcacagcgctcacgccctgtctcgacatgatttcaatatcatcgaagccgccgtagatgaccatcgccatctgtccctcggaagacttcaaaagaattgccttggcccccgtcacctgatccgtgcggattctcacgtccacacccgagcggtccacgtccggcattccataggaacccagtgtcagggtatatggcttatccggaattctggtcctgtccacgcgcacgatgccgtccgccaccgggaaatcggccagatcgatcgacgcctggttctggaaggtaaattcaaattcaaagtattccttccggtagagcactccgtccttcacaccgccgtacatcaggatattcgggatcaggctcttcggtctgccgtcataggtcacactgtactgcatggcctcaatccccttaaaatcgaagtcctcccatagaaaccggctgttaaaggacagtctggaataggtattgagggagggattatctttcttcatcaggacctttgccgtcctgaattctgtaattcccgtatctttgtggttatccaccacgatccccggaccatcgagcaccgtagtccttacttccctttccttcatctcctcccagaccccgtttttctccgtatcggtccagaacggatgatcttccggaagggcgagacagacaaatgcgttggcaatccagaatgggctggccgcgcagctgtaggtctgaattaacggctgaaacggtccgtagaagccaaggcacggcactccctcatagaaacactcttcccgggtcgcaaactggagtacggcacctgaggcgattcttctggccagccccgggtccgcagccggattctttaacagaaaattagccgccagcggagcggaagccgcgcttctgtagataccgcttctcccccacatggtcacatggccctcttcatcgaacatgcgatggaatgtctccaccagacggttggagtattcttcgatctttgcggccatgtacggctccttttcatagccgtaccactggttccagagaggtccgtacacatggaaggcccaggggcagtagtaatcaaacaaatgcccgtcgcggtaccagccgtcccctgcgtaataggagagaatggcggccgcgtgatcccgcatcatcccatgatccaccgggtatccctcccggtccagaaaggccagaatcagcatattaaacaggcgccagttgtggtggcccgtataggaatggccaaaattcgacaggtaatctgcaatgcggtcccgctcctccttcgcataattctcccagatcacctcccggcacatggacaggccgataacaagagaagcgcactcacacgtgtgctgaaacgccatctccccttcctgcgcctccggaaatatctcctccacccgaagcagataattgggcgtcccgggtgtgacggagagcaggatctgttttgaataatactccttaagagagtagcctcccgccgctgcctccggctcattatgaagcagcggtgccgcaatcagaaagctcctggcaagtccctcaaaccgctccgccgcaattctccatttcggcccatccggctgtggatagctgacctttgtctcatggcgtccgactacgatcggatcctcgatcttctccacatgctcaaaaattccttccagaaaaaaatgactgatactgatccagtgttctcttgtcattcccgtatagggactccgtttctcatccggattttctactgtaaacttcatcgtaattcccctctcccgcctctcagctgttttcttttttgtatacacagacaccacccacgtatactgccagtatggccgtgtcttttatcctgtccggcgcgcacgttctgatgtcctgttccagcacagcgaagtccgccagctttcccacagacagcgtccccttctcgtcttcttcaaagctggcctccgctcccatggcggtataggtggtaatagcctcttccaccgtaagggcctgctccttcagaaaggttttcgtcccatccagggtggaacgggtcactgcacactgaattcctgccataacatcaggtctctccaccggacagtccgatccgttggacacagagactcccatagacagcagtgttttaaactgatacgtctctcctgcccgctctgctccgatccgcgcctccacaatatgattgtcataatcgagaaaaatggactgaatgtacgcgtgcagcttcagcctccggaattcctccaacagcctggcggtcgtaatctggcagtgaacaattccatgacgcctgtcccttcggtccggattttcctccatagccctctcatatgccctcaccgtcatctccatggcgccgtctccgatggcgtgaacggcgatctgcatgccggctccatcggccagaacaatcatcttctccagttcctcctggctgtagatcgcgatccctctctcacccggacgctctgcatcctcgtacggctgtcccagaaaagcagttctcgcccccagggatccgtctgccagaagctttaacggcccgattttaaaatacccgcttccctggcccgtgcggtaaccacacgacaggaattcctccagcagttgctcagtcggaagcaggcactgttcatagacccgtaccgtcatcgcgccctcccgctccagttcccggtacgcctccagcaccgtctcaaaggggatgccgggaaatgcggccaggtcatcggtctggcacgacgtcacaccgcggctgtttaaatccttcatggccagccgcagatactcttttaattcctttttaccgggcttagtgacagctcccagaatcaggtccacaccaaattcccggaatattccgttgggattcccagcctcatcagtgtcaaaacagccgccttccggctggggtgtcagcctcgtgatcccagccgcctccatagccttcgtattggcacaggcgatatggccgcaggcgcggataaccagaacgggattctctgtggaaacccggtctaaatcgctgcagtccggaaatcgcttttcatcctgaaagtaatcgtggttccagccccggcctacgatccacgtgccgggggacggcttttcctccaggagataaccggacagggccagacacatggcttccagcgaggtggtggcctgcgttagatccaccagcttcagcgtgtggccgtaatttaacagatgcatgtgggaatcattaaaccccggaactacaaaccgcccctccagatcgtggaagacggtatcctccgaatggttcacgtctctcagactccccaccgcagcaatccgcccatcctcaacggccatcgcctccgcgtccagaccggttcccgtatcgataactccattataatagatttccctcatttttaatatacctctctgaaaaaacaggcagcaaaaccggatgtactccgtttctgccgcctgtcagtttttatttaggaattccttctgtcggaatctcttctgtcagaatctcttcttccgccgtcacgtctgccggaatctcttcttccgccgtctcttctgtcggaatctcttcttccgctgtcaagcgttgatacatccacattgggatccatatcgcccggcttcatgcttaagttgattctgcccatcttatctacttcaagtacccttacagtcacctcgtcgccgatatttaccgcatcttccactttctcaacgcgcttatctgacaatttggaaatgtgaaccataccgtctttgttcggcgccagttccacaaatgcgccgaagttcatgattctgacaaccttgcccttcatgacagcgcccggttcgatgtctgtcacgatgctcttaatgatctcaatcgcacgtgcaatcatgtctttatcggttccgcatacggatacgcttccatcatcggagatgtcgatctttacgccggtctcttcgataatcttgttgattaccttgccctgcttgccgacaacatcaccgatcttctgaggatcgatcgtgatctgctcgatcttcggagcatattttccaacttccttacgcggctctgcaatcgcttttgccataacctcgtccaggatgtagattcttgcttctctcgttcttctgatggcttcctcgatgatcggtcttgtcaggccgtgaatcttgatatccatctgaatcgctgtgatacccttgtgagtaccgcctaccttgaagtccatgtctccgaagaaatcttccagtccctggatatcggttaaaacgatgtaatcatcgtcagtatctccggttacgagaccgcaggaaattcctgctaccgcggatttgatcggaacaccggccgccattaacgacatggaggaggaacagatgctcgcctgagaggtggagccgttggattccatggtctccgatacggtacggattgcatatgggaactcttcctccgatggaagcaccggaataagggctctctcagccagcgcaccatggccgatctcacggcgtcccggtcctctggatggctttgtctcaccaacggagaaggacgggaaattgtaatggtgcatatatctcttggaggtctccatatcgtcaatgccgtctaatctctggctctcagataatggagcaagtgtacagatgtttaaaatctgagtctgtccgcgtgtaaacatagcggaaccgtgtactctcggaagcatatcgatctcggccgccagaggacgaatctgatcgatggcacggccatccggacgtttgtgatcctttaagatcatcttacggacagtcttcttctgatactggtaaacagcttctcccaatacagccagccactcttccttatccgcaaatgcctcttccagcttcgcagtgatggttctgatattctcttctctcgtctgcttgtcgtctgtgaagacggctacttccatctctgccggaggaacaatctccttaatggcagcaaataattcttccgggacagcacagctgatataggaatgcttcggtttgccgcactcggctacgatggtatcgataaatttgattacttcctggtttacggaatgtgccttgaagatcgcttcgatcatgatatcttccggaacttcattggctcctgcctcgatcatgattactttttccctggtggaagcgacggttaacgccatgtcggacgcctgcttctgagcctgggtcgggttcacaaccagttctccgtcaaccataccgatctgggtcgtcgcacatggaccatcaaacggaatgtcggaaatacaggtcgcaatcgcggagcctaacatcgcggtcagttcaggactgcagtcctggtctacggacataacgatgttgtccagggtcacgtcgttgcggtaatccttcgggaataatggtctcatcggacggtcaataacacgggaagtcagaattgcgttctccgaagcctttccttctctcttgttgaagccgcccggaatctttcctaccgcgtataatttctcttcgtactctacgcttaatgggaagaaatcgatgccttctcttggtttgtcagaggctgtcgccgtagataatacgacagtatctccataatgcattaatgcagcgccgctggcctgctttgcaactctgccgacttcgaccgttaaggtgcggccggcaagttccatgctgtaactcttgaacatgtttgaatctccttgttgttataatatttatattataaagcagaggaggccgaaactactgatctgcgcgcaagcttgattggcagcttgcatggtagcttgattgcgtgacccgttactccgcagtgcacctcggttccgctgcgcttcacctcggtcgcgggcttcgccctatgaaaaaagtcaaaataaaatttacttatgtgccagcacaacgtaaatttttttttgccttttttcgcactgctcatggcttgcgcgtacatcagcggtctcggattttccctccgcttttaatactctttttgttattatgtctttcttttcatttctctaataatagacagatagggtggagaagtttctccaccctaaatggttttattttctgattcctaacttctcgattaacgcacggtaaccgtctaagttggtcttctttaagtagtcaagaagtcctcttctctgtccgaccatcattaaaagtcctcttctggagtgatgatctttcggattcttctgaaggtgatcagttaattctgtgattctcgctgttaaaatagcgatctgtacttccggtgaacctgtgtctccggcttttctgccgtattcttcgataattgctgctttcttttcctttgaaatcatgatgatttcctcctttaatttttcattcccaccatataccaggcgctggttggagtatccaaagcgctgagcactggcgcattttcataccgatctagtttaccataagctgtcctctgttgtcaatgattttttcctcagattcccgccctggttttatttttttcatgctccgatacctggccggtgcattcccggtcgctttttgaaaatgccggcaaaaggaggaggaatcatggtatccgcaggaataagcgatctcggtaatccggtattccgtctgcaccagcatctccttcgcttcctccaggcggtagcggctcaaatactgcttcggcgacacccccgcctggtgcatgaaaatacgatagagatacgtcctgtcaatccctacgtaaccggcaatctcactgatctgtatgggatagctgtaattatgacggataaatgcaacggccctcttaaaatagccttcctcatccacaggtacgccgccctttcccgatcttaaaagacaggccataattaaatagaagtatcccagaactctctcccggttttcctctgcgcttccaaaggcgccgagaagtccttcaaaccagccggaaaccgcggtgatctcacccatggcgcatacaggaaggctgtggtccggataataccgttccaacagcgcttccgccccatcgccgtcaaacgcaatccacgcataactccatggctcctcaaaatccgcctgatagtacgtcacctctcccggtctgatcagaaacgcttccccttcctttatctcatactgcccatacccggtcctgtaaattccttttcccttcagcacaaaatgaatcagctggtgagacctcactgccggaccaaagaaatggcccttctcgcagtcctcccggccgcaatagtaaaccttcacccgattccccttctcctttcaagatgcaacaaaatgacaataattacgaaacaaattttctatcttgttttcctgtctcattatatactttcttcataagcagcacaaccgaaaaaaagaaaaaaggagaatcattatggtaaaaattacgtttatgggcgccggcagcaccgtatttgcaagaaatgtcctgggagactgcatgtgtacccccgcgctgtgcgacgcagagatcgcactgtatgacatcgacggtgaacgcctgaacgactcttacgtcatcctgtccgcgatcaacaaaaatgtcaatcagggccgcgcatccatccacacctatttaggcgtgcccaatcggaaggacgcacttcgtgacgccgacttcgtcgtaaatgccatccaggtaggcggctacgatccctgcaccatcacagattttgagattcccaaaaaatacggcttaaaccagaccattgccgacacgctgggaatcggcggaatcatgcgggcactgcgcaccattcccgtactggaagattttgccagagatatggaggaggtatgtcccgacgcctatttcttaaattacaccaatcccatggccatgctgaccggatatatgcagcgctatacaaacgtaaagaccatcggattatgccacagcgtccagacctgttcaaagaccctgctaacggagctgggtatggaagataagctggagggccgcacggagctgatcgccggtatcaatcacatggcctggcttttaaagctgtacgacaaggaaggcaatgacctctatccggagatccgccgcctggccgatcagaaaaaccgggaagagaagcataaagacatggttcgcttcgaatacatccgccatctgggctactactgcactgaatccagcgagcacaacgccgagtacaatccgctattcattaagagcaactatccggagatgattgaggactaccagattccattggatgaatatccccgccgctgcatcaaacagatcgaaggctggaatcaggagaaggacagtattctgatggatggagccatcacccacacccgctctttagaatacgcatcctatattatggaagcaattgtcaccaatcagccctataagatcggcggaaatgtgctcaaccatggccttatcgataatctgccggccgaagcctgtgtggaggttccctgtctcgtagacggaagcggaatcacgccatgccatgtaggtgccctccccacacagctggccgccatgaatttaagcaatatttcggtccagcttctcaccatcgaggcagcccgcagcagggaccgccgcaccatctatcaggcagccatgatggacccccataccgccgccgagcttaacatccccgatattatcgccatgtgcgacgaactgatcgccgcccacggagagtatatgaaggaatattaaaagcacagccacactacagaaagcagccaaggcagatcagattcacgccgcggctgctctgttttgccctaaaaaccattctttttcttgtgcattatgacgaaaaataaaattttttgtaagcccgtctcttaatttactcttcaaataccaaatggggaagctaaataagtaaattcccatcggttcattaagtaattaattaccttcccctgtttccagactctgaacagaatccctcatcaccatctctccccggaccagcaccatatcaggaaggctttccgaaccccacatcaggcggagaccggcattcaccgcgctctccgcgattcggtgggcatccacgcggatcgtggttatggccggagttcctgccgtggcaaatttgttatcataaaaacccgtcacggagacatcctcggggacacgaaatccctgagactccaggtaatggataaaatagtatgcggtctcatcattgttgcagacaaaggccgtgggcatattctccgggagttggaagactcgtttcggcacggtaccggagacctcgtcccgatcctcaagcacccagtcctcctgatagggaagacgcctccgaatcacggatttataatatcccagataccggtcctcaatatcgctggtcgcatggatgcttcccacaaatccaatcctgcggtgtccgatgctgtataaatactctgtcatctggtatgtgtcgtacagcatgtccgcaatcaccgccgtggctctgttggccttgctgtaaaagtccacatacaaaagaggcagccccgcggcgtcaagggcacgcagatacgtccgtcccagccatcccaggacaaagataatatctaccttctcctctcttacaaaggccgggatgttgccctcctgctcgtccttcaccgaaatcatctccagcatggcatagtagcccctctgccgcagagatttgacaatgctctgatagatatcccagtaaaaggactgccccgaagccacaaaatggtcggccaccaggataccaaccgtgttcgtcgcgcttccgctgcgcatgctgtccctgtttcggtatcccagttccctggccgtctccttgatcttctttttcagttcctcgctaacaccgtctttatcggccagcgccttagacaccgtcaccgtgctgaccccaagcatattggcgatatccttcatcttaattccttttttactcacatccgtatccccttttccttaaattagcttaattataggatatttttaagtaatttacaacacagtattttagttaattattagcatccctgttttcgcagacgagtctgttttatgtgtaaaattcgatttcccttaactttgttaatttattgacacagtcttgtgccactgctatactccaggcatcaacagcatttacggaggtaaatcatggacgaattgatcggtacagaagggcgccttccttttaaaagatgggtgtccctcagttttcaacatttattttccatgctcggcggccttgtggtagcgccgctgatcatcggaattaatccttccgccacgatgttctgcagcggtgccggaacacttttctatctcttcatcaccaagaagaaaatgcccatatttctgtgcacttcctttgcatataccgctccgcttctgattgtgcgggaaaaatacggagttgagggcatgatgttcggagtcctgacggcaggcctcatgtacgtgctcctctctctcctcgtgaggctctgcggaaccggatggatccgcaggctgatgcctccggtggtcacggcctctgtcatgattgtcatcggcctttcgtccgcacttactgcggtcggttgggcgggatacaacgcctcgtccggggttgccgcggcactggaaccgaccgtgcgcttaaaatggattgccgtatccacaatcacactgctggtcggaattctgggaaccacctgtttccgcggcattttttcggtaattcccgtaatgctggccctgatctccggctatgcaacctctctcgtactgggcgtcgtctccccttccgccatcgcggaagccatctccggtccggtattggcgctgccaaagctctgcctgccccgggccaatatggaagcggccttcatgacagctccgctggcactggttaccgtcggggagcacatagccgatgtgacagcggccggaaacgtatgccgccgggatttcattcatgatccgggcctccaccgttccctgtttggagatggggtggcctctgtgattgccgccttctttggcggtgctcccgttaccacctacagtgagaacatcgggatcatggctctgaccaaggtctgctccgtatccgtggtctttctggctgcctgcatagccatcgtgatttcctttttcgcaccggtgaacaccgttatcacagggatacccactcccgtgctgggaggaatcagcatcctgctgtttggaatcatcgccataaccggaatccgcatctatatggatgcccatatcgatttcagcagcaaccggaacaccgtcatcgccttgtgtgtcatcgttctgggactgggaggggcttccatcagtttccatacaggcggcctgtattttgaaatgccttccatcgccgtcgccacctttaccggtatttttctgaaccagctgcttcccggagacaggaaccagctgaaacccgtgtgagttttacaggcccagcctgtatcaaatatatttataaggaggatttaccatgtatcagttaacaaaggatttattccgcattccgatgaaggcggaggaagtattgtgcagcacggtctatgaatcggaggcccttaaggaatttacagaggaaccggtgaaatcgccgaaaatcgaagaagtttacggccacttgaaatttccgaaggcgccggcagaccgcccttacgtctacgcgtcctttatcaccaccatagacggaaagatcgcgtttcaggatgccagagacagcgcccttcttcagacgaacaactttctcgacaagaccggcggcaacgccccgtttttcgtcttcatgctccagcgggccgcggccgacgcggtcatctgcggcgccggaaccatgagggaggagccgaatatgacggttcacttatacgatgtggatttagagcaggcaagaattgacaacggtctgccgccggttccgctcaacatcatttccacgctggatggcaccgatcttctgttcgaccacaccatcttcaaaaaggacgaagttccgaagatgatcaacacctcccctgtcggctgggaagtcgtccgtgaaaaatgccagaacccgatcttcctggttggcccctaccacaccatggaggacgtggactttgttaagcttgaccggctgctggaagaaaacaaaggaaagattcccgtcgttgtcaccggagagggtgcccagactgattccaacatcctgtttcgaatcctgcgccatatgggaatcgagcgtcttttaattgagacaccggtatatacccaccatctgatgatgaacggcctgatggatgaattgttcttaaactatgcctgcatttacgtgggaggcggcgccatgtccatcggtcttcactcaaaatcatgcacctcaacagaccatccgcacacaaagatgctgagcattgtcaacgcaaaggcttcgcctgaccactggttctgcttccgtgaagcggtcatccacggtgtaaagggaagggaatagagcgaactgcaaaaaaggagaaaaggaaaccatgaaaaatcagtcaaccgttaaaaaccttctgggcggactccagtgggccctttatatgatttccacgggtatcgtcatgcccgtggtcatcgggcagagctatcacttaagcccgtcggatgccagcatgtacatccaggttacgctgctgtgcatcggcctcgccacgatcacgcaggcggtcttcggccaccgtctccctatcaacgaaacgccctgcggcctctggttcggcatcttcaccatgtatgccaccatcggagtcacgttattcggctcagaatcggaaacgcttcgcgttctggaattctctctgatcctgtgcggtgtattcggatttattctgaatatgctgggcgtcattgagaagctggaaaagtattttacccccaccgtcgtcggaacaaacctgcttcttttagtggccctatgttcgaaattcttcttccaggccatgacatccgtctacggcgacggttacggaatgaatttgaaggtggtgctctgctccgttgtcatcatcgtactgacctttttcctgatgaacacccggttaaaggcctattccgtcctgatcagtatcgtggtgggctggggcctctacacgctgctgggactgtccaccccctatgagatgccgtcacagctggtgcgcatgccgagaattttccccttcggaccaccgcggattgagctgtccatgattatcacctcgttcttatgcaccctgctgctggtcactaatttactcagcagcatgaagatcgcccagcagatggtctcccagtatgatgaggtggccaccgggcgcacgaaacaggcaggcagctgtttttcctttatctatatcctgctgggctgtttcggtgtcaccggactgatccccacgtcggagggcggcggtttcgtcgtaagcaccggcatgacaaggacgaagcccctgatcatcggcggaatcatcatcgcggcgatcagcttcttcccgccgatcaccagcctgctctccatgataccggaatcggttggctatgcggccctcttcgttccattcgtaagcctgtgcggcttctccattgaatgcctggagggcgcggaggacaagaagagcatgtatcagaccgtaggactttcggtgctgatcggcatcggaatcatgaacgtacccggaaccggatttaccatggcacttccggcgttcctgtccacatttttaagcaatggccttattgttggtaccattatcgcattgattatggaagtaaccagaattcataaaaaagaaaaggagaattgaaattatgagtcgtttagaaggaagagtcgcagtcattacaggagcagcatcaggaatcggagccggcatggtgagacgctggctggaagaaggggcctgcgtggttggctgtgatatcaaagactccatgcctgtagaacacgagcgtgccgtctacgtgaagggagatttaagccggtatgaggatgccaaaaatgtgatcgacaccgccgtaaaaacgtttggaaagattgattccatggtgaactgtgcggggatcgccctccttggcggtctggaggacttatccgtggaagatatgcagaaagaatttgctgtcaacgtcttcggcatgttccacatctgcaaggccgctatcccgtatttaaaggaacagaagggcgctaccatcgtcaacatcgcctcggactgcgcatttaagaccatgaagggctggatcggctacggcccctcaaaagccgctgtgatccagttaagccgctgcatcgccatggaatatgcgcccgatgtccgctgcaatatcatctgccctggcattacagagacgcctatgatcacctgccgtttcgagaccgcagaagatccggccgccttacgcgccagctacgagaaccagtatccgatgaaacgaatcgcccaggtttccgacatggaaaacgccgccctcttcctctccacagaagaaagctcgttcattacaggggaaacaatctgcgtcagcggcggcagccagatggaataggcagagtgtgaaatatatcattcatagctaaatgtgtcaagtggtcagccgtattaaattttaatatacggctgatccctatttaatcaaatgaatcgtcccttcatcattcatttttttcacaatggtagcgataaccggaaatgtaaagatccccagaaccccgatcagctgcgcccccgcaaaaatacacagcagggtgacaatcggatgaagccccacctgctgtccgatcaccttcggttccagagtctgtctgactatagtgataatcacatacagaacaaaaatccccactccaagtccggtcttcccgataatgcagagaataagcgcccacggaatcaggaccgttccggttcccagtaccgggaggatatcgaccacagccaccagaaatgccagcagcagcggcatcggaatcttcagcagcacaaatcccagatacagctcagcaaaggtaatcgtcatcataagggcatagacccggagaatcttccagatcgtcgttctcgcccccgccgcagtctccgcaatcatcttcctctgctcctctttaaactgccgcaaaacaaagtcccagatccggtcataatcgattgtgaagaaaaaggacgaaataatcgtaaatatcgtctgtaccagaatcgccggaaatcccacgatccaggaagccccccagccgatcagagtacctgacacggtcataatcccgctctgcagggcattttccaggctggtggacatctgactcacccaatcctgatattccgggaagctgatcacgatccgttcaaacagaattcccagttccggctctatcacctccacataaaactgaggcagcttcccggccaggttctgaataaaggtaacgacatggcttgcggaaaacaggaccgccagcaccagaagcccataaaataccagaagtaccaggatcgacaccagcgcacgctttcctcctgtcttcttacacagctttccgatcagcggcgacagcacggccgccaccgcaagtcctaaaataaacgggaaaaacatgggaacaaactgcttcatcacaaagagaaaaatccctcctaaaatgataaagtagataaaattcgttataaaccgtttcctgccttccatcctgcgtttctgtactgcactttccttactctcttccatatttggatatccttcccttcctcatgcatcttattatgattttgtccaattcatgcacaaaaaggcacaacccgccataaaaaatgcaggccatgccttttcttatcatttttatctctgcgtcgctgtcggcgtggttcattgtttcctcttatcgtcataatttgagcaggcgtctgcatgtccaccacttgatggggtatgccgggccgaagcctgcatctgacgccattatagaaacagaaatccctttcgtcaagcgaacttaaggaagcttaacgacatctttacagagaaaacagtacttcctccgcaaacgcagtcttcgccatctttcctgacagttctcctcgtaaaacctccacgttcttttcagcaagcttcccatcctttacaacgcacgtcccttccacaaacaccatgtccacattggaggggccggcgctgtagaccagagccgaataaggatcgtagatggggaacatattggcggagcgggtctccaccagaaccagatccgcccgctttcccacttcaatggagccgatcttctgttccatatgaagggccttcgcgccaccggccgtagccatctccaccacctgccgtgccggaaatgcgctccggttcctcgtctcattcttatggaagttggcaaacagcttcatctgcgtaaaaaggtccagcgtattgccgctggccggcccatcggtgccgagccccacaaaaatccccagttcccgcatacggctgaccggagcgatgcccttggccgccttcgtgttggaaccgatacagtgagctaccgaggcccccctctttgcaaacagccgcaaatccgcttccgtcatctggatgcagtgtgcagccaacgtatgttttcccaggactcccagggaatccagatatcccgccggagtctgttcagaagtctcccggaaataatccatctcataatccatttccgccgtatgaaggctaaagggagccccaaacgcatcgtccagcttccacgccgccttaaggaggccggcagagcaggtagtcgtcccatgcggcgccacacaggcggaaatcctgggatggcccttgtacttcttcatgaggctctccccataggaaagcgcctcatacgggtctttaaaatcacaggcttcctcttccattatggtttctcccgcaataccacgaatccccatctcatccattgcacgtgcagcctccgcctcgaaataatacatatcaaaaactgtggtgaccccggccagcagcatttccgccgcggcatatttcgtggaaagatagacgagctcggcatccatggccctctgttccataggcaacagaaatactctcagacggtccttgcagtcgtcgcccagaccccgaaacggtatcatccccatatgcgcatgaaggtttaccatacccggcatgaggattccgcccttcccgtcgatcagacggagactttcccctgtttcatcgtccgtttcatcgtccctttcctccgcaatcatcgcctccagcatatccatcgttccaaccgcggtgatctctccgcctttccatgcggcaaacccgtgttgtatcacttcatgcgtttcattcatcgtcaccacagctacattcgtaataattgtactcactgttccactaccttttcttcctgtatctgaaatgcttctaccagaggaatttttctctggctcttcacatcgaacataccctgatcgcttagcttgagttccggagacaccagaagagacaatgtggaaatggacataatgacattattattcacataacccattcgctcgatctcttccctcacagccctgatctctgccgccagctccggaaggctcttatcggatataattccgcccaccggcagttctgccgccgctgtcactctgccgccgctcgccgtcacatagccgccctgcatatgcaccacctcattctgtgccagaaccatatcttccacagaattccccagcaccagcagattatggctgtcatgggaccacgtagtcgccacggcccctttctgctccagcgcgtgttccacgaatccccacgagacgtctccattttttccatatctctcaaaaacagcagcaaggcacagccccgcctcctgccagcaaaggtttccgtcctgtacaggaatttctctctgaacatgcttcgccctggttccaaaggtctgaatctgcatcacattcaccacagcggatccagacagttttggtacctcactcccgcctggcttcccggccaaatcctcttccccgcactcattccgacacgcttccttccgacactcttccttctggcactcttccttccagaaatcatcaactggcaatataaaatccgatgccagagccagcctgcacttcaccgaactgtaaaaatggtcaggaaacctttttttcagactgttttccaggccctccgccgccgcgtccacacagcgctttccgtctttaaaaaccgcttccggcacaaagctttccaggtcgggaagaacgacgaaatccgccttcttccccggcgcgatgattcccctgtcatcgagatgcattctcctggccggagtaaatgtagccagataaattgctttctctgccggcatccccttcgccaccgccagcctgacaatccggttcaagtgtccttccatcaaccggtcaggcatcgtgtcatcggttaccagtgcaatattttcatagagctgcttccgttttaccacttccacgacttcctctttcaaagatttctcctgcaattccagaaacatccccatatctgtcttctccaggaccgattccgccgtctgttccgtatgatccgcatccacgcccgctctgataaacgccgctaaatctccgcctgacagccccggacaatgcccttcaattctgacttttctgccgcattccccgcagacttccagaaatcttttactctttgtatccccttccgccaccagatctttaaagttcatcacttccccgagacaaaccacccgctcatcccgcagaagctcccgaagttccttttccccaaactccgcccctgatgtctccatctctgttctggtagccggaacactggacggaataccataaaaaatatccagctccgtctcctgttccataaaacttaaaatcccttcgagtccaaacacattggcaatctcatggggatctgccaccacagttgtgactccaaacggcaccacggcccgcgaaaattcctccggatacgtcatcgagctttccacatgcatatgaatgtccaccaacccgggaatcacaaattttccggtcccatcaaagaccgactccgcttcccattccccgcgccgtgctcctacccgctgctccgaatcttccacaaaatcagaaacaggagaaacgtcaaaaaactttcctcctgtcactgcaatatccatccgttcgaagcactgcctgaaagtccgataaacccaggcattctctatcaccagatccactttcacaaccacaatacctccgtcattcccgttagccaaagttctccaattatcccgcttttacccctcagcccactttttaatttccttctctctgtttatccggcttttttacagcctcgttatctttcaaatcctttttctcatcagtatctccgccgcccgccatctcccacagatccccttcgttcacaaatttctaatgccgcctgccccagcagacttttcacagcctcaccggaaagcgggtgtggaagatgcgatccccctgcggaggtacttctccagacttagacacagcccccgcaggagcttagcccgtgccctgcccgcatctcccgcgcccgctttcctcaatccactttgcaaagtccgcgtcccttcgccatcaacccaaaatttctgaactaagaattaataatcctgttccactgatcaatccactctcccaggatcggattcacaaacgaataatcaatcactttcgcgttctccgccgcatctccatacgtcatattggcggattcttcctctgtaaatgccacctggttatttgtaggcgcttcattcagcgcttttcctgtctttgtctgaagttcccggctcaatctgtaattaatgtactcataagccagttccttatttttagagttcttcgtaatgctgatcgtattaaagttggcgtatgtcacgtcaggagtcacgtagacaagggacggatccgccgcctgaattgtcggaacgccaaaatcaccgacaatcgcagcctctatttccccggaggtaaacatattaatcaggtccgaagacttcgcatacgtcttcacgatattcggtttcagttccttaagcgcttcaaatgccgccgctccctgatcggctgtcacatccgcccccttgtaatcactcgccatatacaccatggccggtccgaaggtggtggtaatatccggaattgcgatccgtccttccagcctcgcatcccaaaggtcatcgaaactcttaatctcaaatcccacagcctccggattgtacataataccgatactgttaatggtataagcgacaccctgtcccgcttccgccatcgtcttcgcagcgccgatcagatactggctgttttcaattttgcttaagtcgatcggctcgaataagccttcctcgatccccttcgccgtcatggcctgggacagctcgatcacatcaataaccgtttccgagtctgccgacaattttgtataacgttcgttggtactgcctgtctccgtcacaattttacatccaaactcatcctcaaatggttgatagacctcttcctccgagatatcctcgctgagtccgtaagtcgagagaatcagtttcttcgaattcccgtcagaatttcctccctctgcagaattggagcttccgcagcccgtcagcaccagtgccgcgcagagagacaatgccatcattttcttcatcataatcgtacctcacctttcaaaaatttagataccttccgttacctgtccactaaaatcagtttctcctccggcagatacaggcgaatcatctgcccttcttcatacgattcatccgcgttcctgttcaccaggaattttcctgcttcggtatgaacctcatactgatagctctttccaagaaacgtacgcacgcctaccgtcccggtcagcacattaccggtccggccttcaaagtccaccagaatatcttccggccggatcgttccggtaactgtttcttccgacggaaccacaccgtccgccgtctttacggtaaacgcttctccgctgtctgtccggtaaacgtccctgcctttgtggagcgtaagaaagttttcaaatccaataaatctcgccacaaactccgtcttcggcctgctgtaaatatgctccggagtgtcatactgttcgatcacaccgcggttcattaccgccaccttgtcagagatggaaaaacactcctcctgatcatgggtgacaaacaacgtggtgattcccaactgcttctgaatccgtttgatctccattctcatgttaatccgcagcttggcatccagattactgagaggctcatcgagcagcagcagcttcggctcgatcaccagagccctggcaagtgcgactctctgccgctgtccgccggacatctgctggggaaaacggtctgcaaattccgtgaggccgcatacctccaggatgtccttcacctttctgtccatctccgccttgtccagcttcctgatctttaagccgaacgccacattgtcatagactgacagatggggaaacagcgcatagctctgaaatacgataccgaaatttcttttatgcaccggcacctttgttaaatccgctccatccagtgaaaaaatgccgctctggggttcgatgaagccggccaccacccgaagtgtcgtagtcttaccgcatccgctgggccctaagagagataccagttcgccttcctccacctccaggttcagtccttttagaacctgctttttcttatcataacagacatcaatatccttaagtgtcataaatgccatcgtcttttcctccttaactggcgactattttgtcaacgcggcgattcccagcgtcttatctacaattaccataatcatgactgtggctgccattaagagcacggataccgctgatacagtcggatcataattatattcgatgtaattcatcagagtcgccggaaacgtggagactcccggaccggaaagaaacatggataccggtatattgttaaaggaattgataaaggcaagcatgaaagcggccgaaattcccgatgtgatattcggaagcaccactttaaaaaatgcggaaattttgccgcaccccaggctccatgccgcttcctccaccgagaaatcaaactggtccagactcgaccccaccacacggataacgtatggaagcgtcaccataaaatgtccggccagaagtccggcatacaccggaatcctcaaggacagcacgagaaactggtaaagcacaaagccgattacaattcccggaacaatggtaggagacaggaacaccgactttaagatcccttttcccttcatgccggatcttgccagtgcataggccgccggaatccccacaagaagagcgatgaaggtagccagaaatgcaatttccaggctcgttaaaaatgatttccggaaagattttaaggagaaaacattcagaaaccatttcatggaaaatgattcaatgggaaaggtgatggcatttcctccgccaaacgccgtcacggtaatgatgatgagcggtatgatcagaaatgcaaagaccagtcccgcaaaaatcgtgagcagtttatttttacgcatggcttcctcctcttctgtccagcctgttggccagagcgttaaatcctttgatgacaatcaacgtcacaataatcataatcagggatatcaccgccgctccatcccagtcccccaccgtcatggcacgctggtaaatgaaggttgacagcaccatattcttattgccgcccagcagctgcggcgtggtgtaggctgtcagcgttccggtaaacacgagtataccgcctacaataattcccggaaggctcatggggaaaacaaccttcagaaacgcggtaaaccggttggcgcccaggctctgagcggcctccatcatatcatccccgatattttccatgacgccggccaccgtcacaatcatcagaggaaggaataagtaaacagaaccgatgataatggcaaaatcggtgtataataatttcaccggcttatctgcaaatcccgcggccataagaaaccggtttataatcccgttgcttcccaggatattgatccatgcaaagctgcggatgacagaattcgtcatcatcgggaaaatggaaactgccagaaggattccccgccattttctgccgcaccggctgataaaatacgcggtcggaacacctgccgccatacaggccgccgtcgtaattaccgccaccttcacggtccttgcgaatatcttcagataatactcgtcccggaaaaagtccacgtaagagttgaacggatactcgccggcaaagagcgtggggaccagaaccctcaaaagcggaagaaacagacacaccgccaggatgacaagtccgggcaccaccataacaaatgcactacttttcttcatctctacctctccaatttatttattagtttagttaatccaacgatgtacatttattataaaatgtgatatactgtacgtcaaatacatataatctataatttttatgcagtaaagctataatctctcattgatccattgtctttcacccaggaggagaccgccatggaattaaaagaagcccgctatattctagccatcgcccgccacaagagcatcagcaaggcggccgaagccctgttcatctcccagccatcgttaagcaaatacttgaaaaatttagagcagcagcttggaacccggttattcgaccggatcggcaacggttattttcccacctatgtaggtgagcgctatctccactatgcggaaaaaatcgtggagtacggcctggaatgggatacagagctcgatgatattatgcaccagaaccacggccgtttaaacattgcaattccaatcatgctgggcaacagcatcatcggcccgactctgccccgttttcacaagcagtatccccacgtgaccgtaaatatgatggaggcagtcaactttgtagcagaacataccctgaccgatcataccgtggatttaaccttctataatgttcatgaattccccagggatttggattatcagatcattggaaaagaagagattgtactggtgctctccgcctcctctcccccggctcataaagcagtggataaagaaggcttccgatacccgtggctcgatctgcgtctgctgaaagaggaggactttattctgctttacccggaccagaataccggaggaatagccctgaagctcttttccgagtacggtatgaacccccacgtcctgatgtatacaaggaacagcgaaatgtctatccgcctggccatggaaggcgtgggggcggcttttgcacccgagagctattaccattatataaaaagacaggaaagctcctcccccgcagtccgttcctccgcctgcttttccataggagctgaaaaaatcgaaaacacgctgatcgccgcttaccagaaaaaccggtatctgccgcaatatgcgcgggcatacttagatatgattaaggaatactgtttatatatggatcggaagaagatacagggggaagattaggaaattacggatataaaaagagaacacattgaaagacagctaattgaaaggcagttatttcaaagacagctatttcaaaggcaatgcttttagatacaataagcttacattcagctatgaataacgtcggaaaatgtcgaatatttatctacatggaatattagcccgtttttgtttttactttgtttttatgttaaaataactttgtataattgtgctgcggtcaagagggtagtctgatggtttcctccggaaatttacaaaggaggatatgtggtatgaatacactggaagtgttgacgctggtgctggttatctttacagcactggcctaccttgataatcatcagaaaagaaaatagctatcctctactcgcaatagaggatagctcgtaactataaattactcagttatccgaagtcttaatcatcagaccgaaacaaatcttttgattacttctaagtacattatacccaaggtacttgtattttacaagtacctttttggattatatcacattttccggtaaacaggttacatcacaccgccgcctccctcacttaagctggaatctctccaagtttcctgttttcgcatcaggaatcctgtggtatgataaatgaaacgtaatatatagaaagcaataggaggccaactatgaaggaaatacaaagcactgccatcattggcatgggagcactcggcttactgtacgggaatcagattgtttccaggctgggttcctccggcctgcgcttcattgcagacaggaaacgtattcagaagtaccattccatggaattcaccgtgaacggggagcaccgcacctttccaatggaagactgtgaaaccgctgctcctgccgattttgtgatcgtagcggtcaaatacaacgcgctccccgaggccttaaacaccatgaagaactgtgtcggaccggataccaccataatctccgttatgaacggcatcagcagcgaacagatgatcggggaacgctatggccgtgaaaaagtactgtactccatcgcccagggcatggacgccatgaaattcgggtcttccctgacctacacacaggcaggagagctgagggttggcgctctgtcaccggaacagaacaaccgtctggaagccatgaccgccttcttcgaccgggccgggatttcctacaccgttgaagatgacattctgcaccgcctgtggggcaaattcatgctgaatgtcggtgtaaaccagacctgtatggcgtatgagaccacctattccggcacactggttcccggagaagcccatgacaccatgattggcgccatgcgcgaggtcatcaggctggcccatgcggaacacgtcaacttaaccgagcaggatttagacagctacatcgacctgctgaagacgctgtcaccggacggcatgccgtctatgagacaggacagcctgtcacaccggccgtcagaagttgagatgttttccggaaccgtcagagagatggcgaaaaaacacggacttgccacaccggtcaatgaccgcctgtataagcggatcagggagatggagtcacagtacacgtaatacgttcctgtaagcgaaaactaccgcagcaccttctgtccgctggccgtataaacccggtaccagtccacgtgctccagccggatctccacaccgcggaccgcctccaaaaggcggtcgatccggttgcttccgcagattggcagcgctttcaccggatggtatgccagccatgcgtatacaatggcagactcggtagtcccgtattgctccgccagttctttcagaacacccctgacctttacacaggcctcatcgctgccggtaaacaatcttccgccggccagaggcgaccatatcatgggatggattcccgtgcctgtcagcagatccatcatccctgaatcgaagtgctcaaagcagagcgggctgcactcgatctgatttgtgaccaggctctgtccggtcgcctgattaagcgcctggaacttccagggatcaaaattcgataccccgtaagcccggataagcccttccgcctgcaggtccttaagcgcccttccgcactccgccggatcgagacagggatcctctctgtgaatcagcagcaaatccacgtaatccgttcccagccgctccagacagtctctgcacgcacgcatcacatgatcgtacgtcgtattgtaatgggaaaatgctgcgttctcccctttcggcacgataccgaccttcgtcaccagttcgatccggcttctcagcgtgggatcgaaggccagcgctttccccatctgccgctcacactctccgccgccgtacacggctgccgtatcaaaggtggtaacaccgttctccacacaggcgttcatatgatctgccagcttctccgggctccagtcccaggaagttaaccgccagtagccctgtattacccgtgacaattcaatcggccccatcttaattcgttccatatgctctccttttactatcaatctctacattaagctccagctctgtattccacctataactacagattctcaccattctgcataatcgtattcctataccactcaaacgaatccttcggtatccgctcctgcgtcgcataatccacataaatcagaccaaacctgtcgttgtatcctctggcccactcaaaattgtccataagcgaccactggaaataccctgccacgtccacgccctcctcagcggctctcttaagcccgcgcagatggcggtgaagataatcaatcctggcataatcatgaatctttccatctaacgcaggccagtcatggctcgacataccgttctccgtaataacgaccggtgtctggtacctctcatacaggaacttgacgccccagtagagacagtcaaaatccacatgccagttaatggccgtcttcggcgcgccggggctgtgaggcaccgtctcccaaccgccgggaaccgcctttgtcggaattcctctatagatattctggccgtaaaaatccggtttctgatggataatcttcatatcatccggtcccatgacaggcagatccttttccagaatacgaagaccttcctccggatagtttcccagcatcacaggatcactccaccagctgacgttccacgaccagtccccattctccggcatacggaaataggcgtttctcgccgcctccacatctttcggatcgctgctgaccggaaccggcacattggacgtaggcgcataacctatctttgcatccggaacaatggaacggatctccatagaggccagaccgtgagccatcataacgtgatgggccatggacagtgcctcgcggcggggcagcttatgtcccggagcgtgaactccatccacgaatgccagaccgatgaatacctgtggctcgttaaacgtaataaagttcttcacccggtctcccagcgcccgggcaactactgctgcatattccgcaaaccatttcgggctgtcaggattcagccagccgccccgcagatacagctcataaggctgatcccagtggtacagcgtcacatacggtgtaatcccgttctccagcagcgcatccgtcagacgggaataaaaatccagccccttctgattgaccgtaccaatcccgtcgggaagaatacggggccaggagatggaaaagcgatacgccttaattcccagctgcttcattaattttacatcttcctcaaatctgtggtagtgatcacacgccacatcgccgttgtgtccttcaaaaacctttccgggctggtgggcgtacacgtcccatatggacagccctttcccatcctcaaaggccgccccctcgatctgatacgaactggttgcggctccccatacaaaatccttctgaaatcccataaatgccttcctcctgttaactcgcagttcacggccccgcccgtaaaaggcagaaccgtgaaccgcagtgatgattatgaaacaattattttacatgaatcatttcacatatccgctttctttcatgcgcagatacgacgccgttaaagtctgaacccggtctaaatgccgcagcacatcctgttccacacaggcgtatgataagccctgccggtccatctcctccaggatcggatcgacgggaagcagcccgctgcccaggctggtaaaaccaaccttcgtggacggatcgctgttcagtatgtgcttcggcgcttccagatcatagaagtccttcagatgtacattggcaatcctgccctccagacgttttaagagctttaccgggtccaaccccgccaccattgcccagcccaagtcaatattaaacttaagcctcggatccacgtgcagcagcattaaatcgaatcccgaaatgccgttgtagcaggtggtgaactcctggtaatggttatgatagcagaaatggattccttcgctctcaaaaaacagaaccgccttattcataaattcaaaatcctgcatgacctcatcgtatccggcattgctgccgtatcccctccggaagctggcaatcatgctggacgaatacatgcacacctgatttatctcctgaatgtgcagtgacttaatcttcgccgccgggtcctgaaagacctccggggatgctcccgacatgatgggtttaatccccagactgcagacacgttcatacttctcttttaaatctcctccgggaatggcgtaatcgagatccatgtccatggcgcggtatccgatctccgcgtatttttccagcagcttccatgtctcctctgtcttcgatctgtcatccggaagaaatcctactacaccagcctttaacatatcctgcctcctgcccattttatcacatccggctgccagtctgcaagcgcagcctcatggcatttgccgatcatcccggcttttaaggctgccggcctggccggtctggtctccatcgtatagaccgtcccctcccttgtgcagacatcaagcccgtgaatcagttccaatgcgtgcagatgcagtcccacatcgcaccggtggggcctctcgccgcgaatcgcccacgccatctctgccacgcccataccgcgccttgagtctccccacgttcccggtgctccctcaaacttattcgtcgtcacatgatcgtgggtgatcggtatctccataaaacggcttccgccctttcgcatcagcatcaccggcccaccgtaatagttggggtccgggcagatcagcgtgccttcgcttccatacacttccacccgcggcgtctccataaagctctcgcccgtcaccacgagggtgccgcaaacaccgctttcgaaccgcagcgctccgtataagctggtaattcccggaacctccgcgctttctccctgccgcggattatagggatttctcagttcaaacgggtacgagtccgcgaatcccgccaccgtctgaactggtccgaataagtgaaccatagcgtgaatatagtaggccgccatgtcaaagggcagcgttcctccattttccagcttaacgtcgtttctggcgccatccggccagacattgcgcgccagaaatgcgtgcacgctgatgggctttcctatgtatccatcatcaatcaatttccggcaggtctggtacccgcctcctaaaaatgtatctggcgcacacccgatccgaagccccttttcctctgccagcctggcaatctcacatgcctcctcataggagggggcaaggcttttctctgtatagacgtgttttcccgcgtttaatgcctcccggatcacctgtgtatggctctgccagttggtggtattcaccacaatctcaatctcgggatcatcgtagatctcctggttcgtcatctgacggattccgaattcctccgcgcgggcggcgctccgctccggtatcaggtcactgcatcccaccacttccacggactcgaaacgattcaccatattatccagatacgtccagcttataataccgcttccaattaatcctgcttttactggtttcattttctctccttttcccggacagtcaggcattttccctgctgccatccggtcttaagccgacagcattaccatacatacccgctttccttcatcgccaggtaagacatggtcaatgcctccctgggatttaagttccgcatgatatcctgttccacacacgcatattccaccgactgcctgtcaagttccttcagcacccccggaatattcacgactcccgttcccacagcggtaaacccttccttcgatgaaggatccttctccaccatcttccacggcttctgtaaatcgtaaaaatccttcacgtggatgcatgcaattcgtccttccagcctctttaagacctccaccggatcatagccgccggaggtaacccagcccacatccagatcaaatttcagacgggagtccacattgtacagcatgcggtcaaaagcattgaccccatgatataccgttataaactcgtggtaatggttatggtaacagaaggtgaggccctcttcgtcaaagagctctatcagccggttcatatactcgaaatcccgcatcatctcgtcatacgtcctatggacgccatatccttcgtgaatgcttttcgatatgctggagctgtaagccgtaacccgtttgattccctgggcgtgggctttttttgcaatctcagccacacggcccaccgccagttcaaaatctcccggacagcccatggtgagcggctccagaccgagatttctcagtctggaagcgctttctgttaagtcttctccgggggcggcatacgataaatccatatcaattgctttgtatcccaaatcagcacaccatttaaaaaattcccaaacgtctgatttatcttcaggcaaaaagcctacgatacccgctttaaccatgatttccccttcttacagatattttttcaggttttcgatgctgatttcagcatttttaagactctccggctcattccacagctccgtcatcagccactttgtcccgcatgccctggccgccgggataatcgtcccgatatcctgaattccgtgatcccctactgcgcagcctctgtggttgtcacagatctcattgtggcgtaccagaatatagtcgctgtcttccatcggcggctggaaatccttgaaatgcaggatatccacgtgacctttgtacttatccagataaactgcaggtatcaccccgcccacaatcatccaggccgtgtcaaattccggctgaagcagatccagaccgcattcctccagcatgccgtcgatggtacggcggcccctgtaatctcttaagtagccgaaggcagacccgtgtacctggaactggattcctgcgtcccgaaacatctgtgcaaaccgtttcgtattctcatagcacttcttctgctcgtcaaacggcgtacggtctgcataaaaacacggtcccacagccgcataggacagccccagctccctgcactcagcaatcaccggttccggatcctctaaaagccgttccgtggatacgtggcagcctaagagttcaatcccgttttccgcagccgcctgctttacctcctgtaaatcaatggggcgttccatacggtcggccagcgtagcgctggagccgagtgcaaactcccagccctgatatcccattttagacacaagttcaaatgcttttgcaaatcccagttccttgcagacattatgaatactccacatctgaatcccaatcttaagctcgttctgttccatgatgaaatcctcctaaaaattttgttttgtttgttttttcctgtaatttaccggtgtttccccatattttttcttaaacaggcggtagaaataattgatacttcccacccccacgcgttcactgatttcctgcaccggcagagacgtttcccgaaggagttttgcggcattttccagccgcacatctgcgatgtaatcgctgcacgatacacggagtatactataaaactgttttccaaagtaagccggtgataaatccaccagtctggcaaggtattcgacggacaaatccgccctgctgtaattttcctgaatatagttctgtgcaaaagcgatgggattcccctcccccggcctgtcttttttctgttcctctccgcaccgcttcatcattgtttcacaccactgcgcaaatacatctgccagctctttttcagtatccgttccgaacacttctccatgaatatcctggtgttccacgatgaccgaccgggcagccagtcccgataccagactgttaatgcaacgttccatgtaacccttgattctcgtttcctccggagtacccagagactgccggaatccatttactgccttttcaagcgctttggaatcctgaagcaggattgcctctaaaatttctctctcttccttcaccgggtaggctgaccgcttcgtctcccactcccgcacatatggatttaagcttccggttccgcggtaaaatctgtagtttaacgcactgcacgcctggcggtaactcaccgccatatcctcaggtgcagccgccggaatccccagtccgatggatacggaatacttgaaaaactcgtagaaatttttctgaaacagcttcagagcttccagaatctcgtcatctatacttccggccgggcaggcgaccatacaggccagcttctgctcatccatacggatcagcacccccaggatccgccctcccagcagctcgcttaaaatgttggagactgcaaaatcatgaagtccccgctctcccacatccacggtgctgttataggtttggtaacggtccactgccagtactaccgcacacttgtacggactttccggcgctctcattccctgctccagcgccagtttctccacccgcttcgccgtctccatatctcccaggagctggctttttacccagctcccgttaaagagaggctgtgaatgggtcaggcggctgttcagcttctcgatttcatagctccgtttaaccagttcttcacagatcactccgatctcatccacggttcccgtgtcataaccgtccacctgctctctcaccatggttttcacaggcgcatagattctgcggatcatcagccagattccgtacagcacagcaagcagaaagataaaaagcgccgctccaagctgcagagaaaactttctggtcagaattccgcttccggccatgggcatcagacgcaccatcttccagcccggaatgcaggcctgcttcgccgttacggcgcaccgggtattctcgatgtccatgatccggaaattatcctcctctatcccctccagaatcggccgccagtctatttccggcagatcggttctgccgatcagaaccgattcattggtgaccagaaagatctggtccagcggctggagagctgccggattcagcagatcaataaagtaactgtcttttaagtccaggacgatggcactgtccctgtactggcctgatggaaagaatacaaacgtagttacctctgtacagggactgttcgtcagcctgattttttccggaatcgtccgccggaaggaaaccaggccgcctgcaccgctctgttcataatgctccacgatggaatcatccacctggtcagaagcaccgtctgtccccaaataccggtttcccgacagattgatcagggaaatcttctcaatatacggatataagtttttaagtctcctcagttctaaaaagatattggcctcgttggccctgtcggcctcatcgcggagaaagaagactgaaagattgtttaagctcagaacctcattgatcacgccggacagcttatcgtaggaatttaaaagcacactgtctgcggatacgaggctgttttgggccatatacttatactcctgatgcatcacgtgagaaaacagcgtgtatagcatcgtaacaatcaacagcgagaacacagccagcagcgtcataaacgacagaaccagtttccggtacagtgtaaacctcttaagctggctgaaaaaactatggatcaatatcttcatgcaaactcccccttttcttactttcaattatatcaaaaagtaagctgtttgcatacgcggcggcctgcctgccctctttgtccctgctgttacatcccctcgatttcctccgcggtcacctcccgctttaactctgccgagcggtagaacgcctggataattgtgaccacgttgagggcttcttccttcgtaacgataggttctgcctttccgtccagcacatcgagaaaatgttctacgatcagatagatgcccggattctggatatgctcaaatttgtggtgcacattcagattcaaaatcgtgtccgtcatggtctctcccttagatctgtacagcataaagggattctccgcgtacttgttaaatacgagtccgcccttcgtaccatttaaacggattccgtcaaatggcggggaattcagcgcccatgcgaatttaaagttaatcaggatatcttctcccagtctcagcgtacctgccgaatggtcttccaccgtaaactcactgctggaatacggacgcggaacaaagtttttggacttgctcacagttcccaggttagggcggtccgtctcgtacggtgcaatcttgctccacgtattgccgctgatggacttgaatttcggattgcccagcatgtataagatggaatcgataaaatgcacgcccacgtcgcagaacggtccgccaaaattatccttcttgatgtggaaactgccccagttgggaattcccctgcgccggatattctcacattcgccaaaatacacatctcccagagcgccgtctttgatcatatctctcaggacggtgcgggcccccatgcggtcgttctgaaccggcataaagattcttcccgctctctcggccgccgcgtagatttccttcgcatccgccagcgtcacgcagatcggtttctcacataagacattggctcccgcctccagcgccgcgatgctccattccttatggtactgattgggaacgcagatggagaccacatccggtttgcactcttccagcatctgctgcgggtcttcatagaacttctcaaccccgtatctctttgccacatattcggcggctcccggctttaagtcggccactgccaccagttcgcaccgctcatctgtctgatacgccggtacgtggcttcccgcgccgataaagccgacgccaattaccgctgctttgtacttcttattcatgggtaattctcctctcaactttcttttattatttttcaaacactccgaccagatccttattggcctcatagtgttctttatactgtttggaatactcctctaataccttgtctaacccggccgctttcagacgctggatggcctggtcgatattgctgtcgtaatccaccacgccgaatttaatcgggtaaatggacgtaataatctcattggtcagattggctacctcattggagacgttgaccggatcaaagttgaagccgaccataggggtacgcacattggtaccggtaatcggtgtggtatacatcttcatcagagtatccgtagcagtggcgtcgtaaagtctgaaatccgcattgcccatctgccagtcatcatacttgtaaagcggctttccatcagccccaaagatggtttccatcgtattatcagttaccttcttatacgtctcgccttccactccatacatgaataactggtagttttcggcatccttatagagccagtccaggaaagacagcggcacattggggtctgtgcaggacacaggaaccgcattgccgttatagataccgaaatactccacattgccaagttccggattcagccagaaatcacctaaatacgcccctacattcttcgtcatggtggattcactctggtagtcgatggtctcaaagccgaagacaaatttgccgtaatcggctgcgttgctgcggtcttcactgtctgtagtgagaatatccggatcaatcaggccaaggtcatagagtctgctgtatatctcacagtcccttttaaagatatcgctctcatagaagctttccacggtgccatccatattgcattttgcaattcccatggtgttgtctacgataaaaggcgcttcctcgtaggagcggtgcagccatgtggccggacgggaaagggtatggagccatgtatagcatttctctcctgtctcctccattaagatctcctgcatcttctgtcccagttcgatcacctcatccacggtttccggcacctttcctcccgccttatcaaagatatcctggcgatagaagatacggccgtaatcgcggctgatatagtagtttggcttcaccggcacagccaggatttcaccgtttacggtaaattccggccagcgctcggacagagtctccttcaaatccgggaaattgtccagatagtcgttaagcggcgcgattgcattctgggaacgcagtaccgttgcgctctttctgtcctgcatgacatgcagcagttcgaactcctcaccggtggacagcattaagtttactttctgatcccatgcgtcccaggggatacggatcagctctacctcgatattcactccgtccttctgaagcttgtcgttgaccagaccgatgatctcgtcctccttctcccagtcgctgcccggcgctacatagcgcatcttcttcggcgcttccccggcggttccccctgccgtctctgccgccgaccccttcgccccggtcgtacccggactggattctgccggcttggaaccacatgcagttaatgaacagaccattgcagccagaacgactaacgccccgattcgttctactcttcttctcatttcaattcctcctcaactataattgtttttcatctattgattctccgtctctgatccgaaacggttaaatccctctccggtcagcccttaacggaaccgaccataataccttttacaaaatacttctgcaaaaacggatacaaaaataccagcggccctatggtgacgatcaccgtcgccatcttaaagctctccgcaggcggggtatccagctgaatcccctgggttaccatctgagacagcatactgatatccgactgcagccggaaaagcagcatctgtaacggataaagctttttgttatcaatcagcataacagcgttaaaccagttattccagtaattaattccgtaaaacagtgtaatcgtcgctataattggtttgcagagcggaaaatagatctggaaaccgatcctggtctcgctggctccgtcaagccttgcggattccatcagcgattccggtatggtggcgacgtaattgcgcaccagaaacatattaaacggtgtaaagatcatggaagggatcagcaaagacagaatattgttgtacatccccagcttccggcagattaaataccacggaaccattcctgaattaaataccgttgtaaaaaagaaaaacatggcaaactgatttctgtatttcaaattcttattggccagcggatacgccaccatgaatgtcatcagcacggcaatcgccgttcccactactgtgatgaaaaccgttatcccgcagcttgcataaatcgaagagcccggataaaacagcttctggtaagcggccagcgacagctttttgggaatcaagctgtatccgtatctgccgatacagctttcatccgtaaaagacacggccacgaccagcagcatcggcagaatacacagcagcgaaatgcaggtcagcaataagtaaatcagcccctgggctatactgaaacgtttgcgttgaaccataataatcccctccctgatcagaataatgcgccttccggaaacagctttttcacaagccagttggacccgaagaccatgataaagcccatgatcgactggtatacgcccaccgccatggacagcgacgggtcgccggtcacacgcagcatacggaacacgtacgtatcaataacatccaccttcggaagcagctgcccggaatccttcaccagcgcatacaccataccgaagtcgccgcagaagatctttccgacctccagaagaatcatgatacatatggtcggtgtgattaacggaagcgtaattctcttaatgcactgccaccggtttgctccgtcaatggccgccgcttcatataaggaatgatcgattcctacgatggccgccagatagatgatcatcgtgtaccctgccgacttccagaccttcgcaaataccagaatcccccgccacagctccggccgtgaataccacctcacccggtcgagcccgaccgccgtcaggatattgttaaacacgcccttttccgtagacagcatggcatataagatgtagcttacaataacccacgaaataaagtatggaaataacattgtgctctgcgatattctcacaaaagctttgctcttcacctcattaagaatcagtgcaagtcctaccgacaccagtgtaccgaagaaaagaaacagtgcatttaacagaatcgtattaaatgtcacctcccaggcccggttgctctcaaagaaaaaccggaagttctctaaaccgacccagggactgaagattccttttttgtaatcgaaatcttcaaatgcaatgatcatataagggagtgtcacgtatccaaatatgaatgtatacaaaattcccggcagcataaagaggtaaagccctctgttctttcgcagttcataccaaatcccttttttttggctggctgcatttaaccccatagttcccaactcctttttccctgtattcccgtctcccaatattccggattcccgcagtctgccggcggaacgggtacgccgacagttccatgtgacgtttcctcagcggttgtttgtctgtatgaccatactaccccatgacggcagaggttttcaattttaaaaaatggcctttcttgaacaaatttagataattttgtgtaatcactaatttttttaatagagcaaatttggatatttttcctgctttctcaaaggataccgactgatggagcctggattgagtcaaaaaaaccaccgcaggcatcggagcatcaatttggcagcggtacaagcggcggcggattgacgcttgcgcagcatactgttataaaaagaggctttaaaaatggagtgactaaacttcatttttaaagcctctatttctgaacgcagtatacagtaatttcattccattgcatcctgccatcaccacctctgctacacatatggcaaggtcataacaataatttacatactgaaaaaaagagggcggtttcccgtcctctaaacgtcataatttcccctgcatgagataaccacctctgcacgatcctcaaccacatagacaagtctatgttcctcatcaacgcggcggctccaaactcccattgtatcactcttatctgtattgtcattcctctatcaactcatgctcggaaaaattcagccgccccgccttgtagtcctccattttcttgtcaaaataatgcaaattgctttcggaataaaatgggtctgcggacaattcaaaggggatacgccgctctctcagcgccacgctttacatcatcatcaacacgcaaactaatctgtgccataaaatcactcctttccatgtacttttaatattcatcactcagcaagaaatctgcaatgtgcatggtcttaatcccttcgtagttaccacccgcaaaagcatctgtttgcaatacatatttggggtaattatcccgaatatcaagcagtctgccgtattctcgccgctctgtttcaggagagccgattttctgggctgcttgaatgtagaccttattttcctgcttaacggcaatgaaatctatttccgcgttatccagtttcccaacgtacacgtcatatccgcggcgcagcaattccagatagattacattctccagcatagcagccacactgtccggtgaataccccaatacactgtaacgcagtgccgggtcggccaggtagaatttctcctgggtttttaaaatttctttgccctgtacgtcaaaacgggaacaacgatgaagaatataggcgctttccaacttgctgagatagttgtaaaccgtttcgttatcaattgaacgattctcgcttttcagatatttggaaatagaagcagcggaaaaagtccgtccaacattatcaaaagcgaacttcacaatacgctccagctgatctacctttctaatttgattacgccttactatgtccgtgtaaattgtggaactgtaaatatccttaacgatagtgtagacttcgttcggcgtatatttttgcagatggactgcagggaaaccgccaagccgcagataatttgcgagctctgtgcggggatcaagcacttccgtatattctttgcggaagatcatatattctgaaaaggacaaagggaaaatgcggaatgcaatataacgccccgtcagataggtggatatttcggaggacatcatccgggaatttgaaccggtcacataaatatctacatcataatctgtcataagggaatttacaactttttcccatgatttcacctcttgaatctcatcaagaaacaggtaagttcttccctccgggcacaagtgctgtttcaagtgggtaaacagagtttttgccgttttaatatcctcatattccaaagaatcaaagctataatgtaaaatctggttatcacggatacccctttttttcatttcttccatcaacattcttaaaatggttgattttccacagcgacggattccggtcagaatttttacaaatggcgtattcacgtaagccataatcttatcaacgtaaatgggtctgttaatcataaccaatacctcctgtccataatagtatatcgcattttcttttatatatcaatattttttatggttataaccgcaaaactttaaattgatatcaccgttatcagcgaatggctggattagactttgattttgtcgttcatgcagcctctctctttcttctcttttgttttgggctgatttttgttgaaacaagtggaaaaagaataaagacaaatcggaaaatcccttgattttacggggcctttccgatttgcctttattatactgtatgagcacacagcaacatccaaaatgtaccagctcactatccccccataaactcagaggtattcactgcctgttacaaactccttccatacagctttacagcactttctgattcacataaaacacacatcaccgcacacatttcaccacgaaatcacgaaattcttacatccatactgccggatcgaaatccttccagatccagcgtaatatagagaaatcccatttccttcagtttacggatcagttcctctctcatctccagaactttttcgaatgcatttaaatctacttcgattcttacaatatcgccgtgcaggcgcaggcgtacatttcctccaatcatggttctcaaatacgcttcccctgccccgattttctccagaacctcataatcgatatccgtattatacggaattctcgtagccatgcagggagtagaaggcctggaagccacggatattccatactctgccgcaatcgccttcacttccgctttcgtcacatgaagttccgccagagggcttacaattcccaactccttaagcgcctgaattcccggccggtatacatgcatgtcgtcttcattggttccgtccagaatcagcctgatgttccgcttccctgcaaaatccttcaggctttgaaacaggtggcgtttacataagtaacaccggttcacaggattatgacggatttccttctgttccagttcatccactgtgattacctcgtgaatgcctcccagctcctccgccactcgcctggcgatctccagatcacaggaaggatgaaggcggctgtcaaaggttaccgcatagaccttctttcccgtttttttaacggcctccgccgctgcctttaaaagaaggctggaatccacgccgcctgagaacgcaagacagatatcctggttcgcgtattctgccatcttcttttccagtttcattttcttttccgctgtattctctgtcatgatctcctcctgctgcttttgtgttgtaattcagttccctgtttcttttgttttccgctcattttccagccaatgctgcggatggcagagtcgaaactgccggcggccttttttcaccggcctttttactgtttgctctccatttcctccgccgctcttctgacctcgctgtaaacagtctgaaaatccacattctgttccctgcagatcgcccggacgctttcatattccggataaaaatacgtctttccatttcccatgcagattttcacttctgcttttccaaatcgcgtctctgccacagccttcctccgtcccagaaccgttctggcaacggaataacggcgaattccgatgctggtagtctgttcaaagatcactgcctccatcttcggaataaaatcttcccggcacaaaacggaaagcatgtaggaaggacggtttttcttcatgtagatgggcgtgctccatacgtctgccgcccctgcctccagtagcatttccatggcaaatcccagcatctcgcctccgcagtcatcaatgttggattccagcacccacatctcatcgtctgccgcttcctccgtctccagaagcatggcgcgcagcacgttggcgtgagcaaaatcctttttaccggctcccataccggtctttatgattttacaggagtcaggcagtttatctcttgtcctcaccgccgctgcaatggccgctcccgtgggagtcaccatctccccttcctgatccgtcatgcgcagagccaggccgtgggcagatgcgatattggcagttgccggaaccggaaccggaatcacgccgtgctggcaccggatctggccgtggccctccgccagcggagataccacaacctcctttattcccaggttgtcgagacagactgccacgctgatgatatcgacaatggaatcgatcgctcccacctcatgaaaatgaacctgatcaatgggaagaccgtgggcctttgcttccgcctctgctacaatcagaaacatgttcttcgccagttccttcactgcattgttggaatccaggcggcctatgatttcataaatatctgaaagatttctatgggtatgaccgtgagtatggccttctccttggtcatggctatgctcgttatgatggtgttcttcatgatcatggggatggtcatgagaatggcctttttcgcagtcatggctgtgctcatgagaatggccctcttcgcagtcatgattatggtcatgggaatgcccctcctcacagtcatggctatgcccatgctcatgcccctcttcctccaaatgcacatcaaaatcatacgcatccaggccgcacttcaccgtcctgccaaaatgaaggtggtatccttccactcccaggctgtccagcgcatgctccagcaccgtttggtcggcgccaagatccagaagcgctccaaccgtcatatctccgctgattcccgaattacattccaaatacagtatttttcccatttatttcaccgccagtctgtttatttgcgttgccagatagcccgcaccgtatccattgtcaatatttaccacggaaatcccgtttgcacaggaattcagcatggttaggagggccgaaactccgtggaaattagccccgtagccgaccgatgtcggaacagcgatgactgggcagtccaccaggccggccaccacggttcccagggctccctccataccagccaccgcgataatgcagttcgccttcataagccgttctctctgtgacagcaggcggtgaattcccgccacgcccacatcatagatccgatccaccgcgcagccgaaatattccgcggtctgagccgcttcctccgccaccggaatatcagcggtcccgccggtacataccgctacacagcccgttctttccttgtcctttttctctaccttcagaatcctggataccgtatcgtattcaatctccggcacttcctctttcaccagaagaaactgttctgcggatgcccgtgttcccaggacctctccatccctctcataaaacctcttcatgatctccaccaggtatttatccggctttccctggcagaatacagtctcgccaaacccggaacgcagcttcctgtgatgatccagtttggcgtagcctaaatcttcatagggaagatcctttaaaagcgcctcggcctcagctacatccagcgttccgctgctcacactctccaacaccttttttacatccattacatctgtatcctttctacttttgctgtcattcacagtccccttcggcctctgcttcctgttcagccattcagtctcacgattttcgtacatatacgctccagcagtacctccgagtgactaaccgccataaggccgatttccctgttcttcacttcctccaggaggaaattccacagctggctctgtgtaatcaagtccagcatcgtactgatctcatccgccagaaggaatctcgttctctgtccaagcgccctggcaatacagaaacgttggagttcaccgccggataattccgatggataccggttgagccagtccagctcaattcccaggccatcgataatcctcttttccacctggtccccctcttttaaaacttcgcccatcttccacctgggattgaccgacagttccggatgctgccatatcatctgcaccggacagtaccccttccaggctgaaagaggctttccttccagcagcacctcgccgctgtccggctcctcatatcccgccagaatcttacagaatgtcgttttcccaaaaccactgggggcaatcagtcccaggcggtccgtgctttccagagtcatactcattttatttaatatctgtctgttcccattatcatatcgaaaagagagttctctcgcctccagcttcatatctcccgtcacctcctgccgcggcctttcagataaccaattccatcttcctgccttacttttctgctccatccccgctgaaagcccgactcaaaccgctttgcggcatctcaccttgcctccccgaagccctgtatactccacctctttgccgcacgctccatctgccagttcacaccgcgccgcatacggacagcccgccggaaaatcctttccataaggctggctaccggataccgggacaaatccatgctgcggcatagcccgaaacagcgccttcgtatatggatggcgaagtctttcttcctcctcaaaatcagaaaccgaagcctcctccacattggttcccgcgtaaaagacaacaatccggtctgccgcctctaaagccagttccagatcatgggtgatcagaaggactcccgccccctcatccgcaatctcccgaaaatgggtcagaacccgtttggcagcttccagatgaagccccggagtaggctcatctgcaatgaccagccccggcttttccataaccgctgtggaaatgagcacccgcctcgtcataccgccggaaagctcgaacggatacagttcctccgtctcttttccaagtccataacgggccagaacctccctgcatttccttctgctctctgaatccttcctcccttttctgacctgtgcccccgccttcataagcggatctaaataagaaacactctggggaacaagaacgatctcccttccgcgcaaagcccgtattctcttttccgtcagctccacgccgtcgtaatcaatacgccctccggtcacggcattatatggaaggattcccatcacagcgtgggccagaagactcttgcccgaaccgctggagcccaccaccgccaccatttccccttccttcaccgtaaggcacaaatcacgaatcgcgggaagttctatctggcgaaagccccgctcatactgggtgaatttcaccgataaatgttccacggacagaactgtttttctctcttccatcgtatttcttttatcctttcgatctattctcatgaggtttttcactgatgcgcatgggccggatccaaaagctggcttatggtgcttcccataaaatggaacaaaagtaccacaaagacaagaaagagtcccggaaacagggccagccaccattttcccatagcaagatacttcatgctctccgacaaaatgacgccaatagccggctgttccggcgacagtccgaagcccaggaatgtgacactggcctcatgcagaatcgcatggggaaacatcagtaccaggccgacaaacagctgtggtatcagatgaggcgtcatatgcctaaaagcaatcgacagctttccctgccccagtttctccgcgatttttatgtactggctctgcttcagctgcaggacttccccacggatcaggcgggcaagtgaagtccagtgtgtcagtgaaattccggcgacaacgccccaaaatccctttcccagcgcaaaggaaataagcaccagcagaaggatatggggaattcccatcaccagatcaatgatcccaataatcaggccgtccgcgatctttcccatggtcgcggccacaattcccatgagaaacgcaatcactgcgctgatggccgccgtcagcagcccgatccggatactcatggatagtcctgtgatggtgcgtacaaacatatctcttcccatccagtccgttccaaaaggataggccagacagggagcaagattctttctggaaaaatccgtcaccatggctgcctccgacaaaagctgtcctgccaccgtaatcactgccagcatcagaacggacaggccagcgagaagaagcatcattttcctcctgttcatgcgccgcttcatgtccttgccctccctcttctgattcttggatccacaacgccgtaaagtacattggcggtaaaattccccgcaaatacaattgccgcgctgatcacggtaattcccagaagcagcggaatatcgcctcccagcccggccgtaaccgccgcctgcccgattcccggataagaaaatacctgttccaccagaacggagcctccgaatatctcactgatcgaggcaaactgcagagtcatggccggcagaacgatgtttcgcagcccatggcgcagaataatctgcctgccggactcgcctcttgccttcgcaaacagtacgtaatcactctccatagcctcggccattttctctctggtatgcagaataatgttggacagtccggtaatggaaagcgtcagagccggcagaacaccatgggcgattctgtcagaaacagtaaccccggcggcctccactccaatgggaacgcttaaaccgatcgggagtaccttcagccataccgcaaagatcatgagcagaaccagagccagccagaatgccggcgtactggcagtcaccagcgcgtatccggaaataattttatccaccggctttccccggtttgcccccgccacaactccgagaagcagcccggccgcaccggagatcagccaagctgttcccatcagccataaggaatccttaagcttcaccgagatcacatgggccaccggctgacggtaaagcagggacgtacccatatcaccccggaaaaaatccatggcccaggagacaaaccgcttaagcggcggggtattcattccccagtattcctccagcttagcaatctgttcctgactcatggatcccagggcagtctgccccacattagtcttaagcggatcaagaggagacgccgacaccagaaagaaggccgccgcgctcaccaacagcagaagtactgccatccgtattaaattttttagaataaaccatggcatgctcttctccaatgccgtccgcctcctgaatttcctttttcttttgctctaatttctcttacttccagctccactgatccacattatttacaatcgaccagccgtgaccgtgaggatgcagcttctgctgcgccacagccagatcggactttgcccagtagagatggtcgatattgacgagccagatccatggaatatcgccctgctgcgtaataccggtctctccatcccactgcgccttcttccacagttcataggactcctccagactgctgcttgccagcgcctcatccatatagcggtccaccgtttcattgccatatggagagtattccgccagtcctgtatccttcatggtatggtatatattataaagctccatcggcgtatgcgctccccagccccacatcagcggttctgcctgcgcgcggtcgtaagcggtatcccagcccacgccttccgtcttcacgtcgatgccaaccgctttcaactggttggccgtatccgcagcaagggcctgtctcacggagtcaccggccggatacatcagggtaaatcccgccttcttcccgtctttttcccggattccgtcttttccttccttccatccggcttcctctaaaagcgccttcgccccttcctcatcatacgttgtttccgccgcgttattataccagggcatcttatcgcagacactgtaggcgggacttccgtaaccactcaatacattttctatcatttcatctctgttgatggcgatgttgatggcccgtctcacaagcacatccgcggtaaaatcatttccaagaggattcccgctgccatcgctgccgcctgctgctacagcagggagattgaagccccggttgtccaccgtctcgaaggacagaagttcatagccgggaatcgtctgatccgaataagaagccgccgtataggcaagatccacctgaccggactgcactgccgcaaatgccgcatcctcttccataaacagtacggtcaccttcttcatcttcggcgccttcccgtaatagtccgggttcgcttcaaaaatcacctgctggcctctgtcccactgtttcataatatatcgtccggatccgatcggatgctcgccatagtcagaaccatatgcgtgttccggtatgattcccacaatcgccatggtatacggccagatcgaatatgcccgtttcatatggaaaaccacagtcgtatcatccaccgcttctgcggagtccagcatggtaaaatcattgactgagctcgtatctctaagcgtattataggtaaatgccacatccttcgccgtcagcttctctccatcggtaaaagagacgccgtcccggatctttaccgtccaggtaagtccgtcatcgctgacgttcatctctgtagcaaggtcgtaatcaatctttaaatccgccgtcgtcaccgtcagcgtgctctgaatcagcggctcatgcacatgttctcccgcgccccatccgtaagccggatcaaatcccgcctccggctccgagctgggccccatcaccacaatcacgctgttcttaccggtgtcttccgcttccgccgcgctctccgtgttacccgccggattctgctccgtacgctcttccttccctgccgctcccgttgcttcctggctcttaccggtgctgcatccagtaaccgcaatcgctgccgcagccagtaaaaccgctgttctaagtttccatcctctttttttcatcgttcttttccttcctgttatccgcctgcaaaggattacacagaaaaccaaaaaataccaggttcaggcatactccttgggagtactcataccttcctggtatctgatgatcatcattcacttatcctgtttgatctgtgttcttactcttccaatgccctgcactttttgtgcctgcaaccattctgtttcagggtggtgacttcagtcagccgttatagaaagtatacgaaaaaaggaagaaaacgtcaatcaattttaacgcaaacgtttgaggaaaatttgcgttccagtcacgtaaaaatacggacaccaatcagcccatcggctgcagggcgcaaacgcggatctcatccagttcctcagcccgaagagtgccatgatcataaagccgctgatactccttcgatacatcactgtcaaacatcagcacatcgtcagaattaatcgtcacttcgatcccctctctgaaaaggaccttaatcggatgctcctcgtaggaatccacacgccccagcttccggttgctggttggcgtaatattcagtctgatccggttctctgcaagataccgcatcacctcagctgaattcacagccgcgatcccatgctgtacctcgtcgagatgaagaagttccacgccggcccgtatatcttccgccgttccccattccccgatatgtgccttccggatgagatgatactcttccgccttccggtaaatgggcacaaagttttcaattggctgcgccatctcatctccatacagatcgatggaacagaactccggtctgccccagaacggttccagctgctccataagccactgcaccggacagtgcctcgaaagcccgaccaaaagccgcagctcgagatccggcgcgtacttatcccgtgccgaaaaaaatgcttctgtcagcgcattcacgtcatggtcaaagtactgtcccagtccccatacatcctctccaatctccaggaccgtaacgccgtcttccctggcctgtacaaatgcggcctcaatcagaaagcggcggccttcgctgctttcaaaatacttcccaatgaactcctgattccactgatccatctcctgcatcgactttaaaacgccttccagcgcaggaatcatgagtccctttctctcacgtataaagctcctgctgcctcccagtacaaaatggttatgtaaatccgcttttggaatctgccgcagccgctctgtatctctgttctttaaggcgtttatgaatgcttccgaccattcatctctcatacctggcctcccatttcttttattttcaagacagctccttactcctgtcaagtaaaaatatctcccgcagatatcccccgtactttaaagcagacttcaccggctcatatccctgactgatgacattctgcctgctgtaccggttctccggatgcaccgtacacataaaataccggtatccctgttccgtcaattcccgctctgcgtgctgcatcagccttttctgtaatcccgctccacggtactgcggaagaattgctacggaatccatctgggccaccaacgaaagcgcttcctccgaaagtccgatatcacgccccagattttcttcagaattcccgggaaatgtcacaagaaaaataccggccacagcgcccgaaggctcatgaactgccttgtaaccgacgccgttgcagtctttcagcatgtggtacgtatactccgcattatcggccgcaaaccattctttctgttcaagtgcctcataaacttcctgaatcacagaggcgaacagctggtaatcagtttcctccgccttcacaattttaaatgtcatactggacctcctttgatctctcttgatatctcctttcatttctccttggatatctccttctctgtctccttcattctgcggcttcctgctctctgatccgaaacaccgggatccatagaggtctatacctttttatcaaccagaatacgccatataaagcgccatattctttatgtatgtcaaaattacgttcatacggttaaatactctgtttccacttgtacttcctggacggttcccctgggaacgtaattctctgaggcccgctgtgctgccaccctgcggccgtacataccggctcccagtaatacgagaatcaaacaaaaagcaatcagcatgactttgttatacagattcttatcctccatctccctgtcctttcctgcctaccggcacgcttcactcttttcttcagtctaccataaaacaggctcgctgtctctttctgttttcttacatcttacacaacaatatttttcgtatacctgcaggccgggtagttggagcagccgtagaatggtccgaatttcccatttcgctttgtaagctctcccccgcatctggggcagaccggaatatccgcgtcctttaaaagttttcccatgtgctcatagcaaatctgattcatcacacagtcgttaaacgcccggtgtgcgccctctgaactgatcttaaaataatcggccagatccgtaagccggtgacgggaaagacccggaagcaaggccctggccataaacagtgtatcaataaaatcattcagaaccgccttcctgcacacctcatcagccgcacggttcagaaacagcagatcaaaggactggatgttatggccgatcagaatctctccgtcgataaaatctaaaaactccggcagaataaactccagcccgggctcactctgaaccatctcatcggttatcccgttcacctttgtagccccggccggaatgggacgtctgggattaaccagccttgaaaaggtctccacctgttcatgattcttaaccttcagggcggatatctcgatgatatcatcctttaccgcactgatccccgtcgtctccaaatcgaacaccacataattgtccacatatttactgagccgttttcctctgttgtccgctgctgccatagttctttttcctttccgtatatcagatatcctgtcttctgttcctgatttcatgttctgttcctggttccatgttttgttcctggttctgttttctgcaattataccggattttgaccgggatttccactctaaactttacttcttccgttttaacctggaaaaatcgaataccagtcccctgcatacccgtgaccccagtgcaccggaaaaagatgcaagatccatctcaccgtcatcgaaataatagacgtaaccgtgatcccagtcccggtccacaatccagtactccttcacaccggctttccggtatctggtcagtttgatccggtaatccatatactgagattccggagctaccacctcaatcacaatctccggcgctccgctgcatccgcatttcgtcagctttctccggtcgagaatcacacagagatccggtatcagatacgtcatacccccggccagcgtaagaccgaacggggctgtacgcacttcacaaaatcccggatttgcctttcggtactcctctatcatttcctttaaaattcttacaatcctctgatgccaccgtttcggcctcttcataatataaatccggccatcgatcctctcagcaagcggttccccgccaggactggtacatttttttcttgaataactttcttctggcacctctctcacatttcaggcctcactttcttaagactccacgctccatacgaatccattgtcagcctcatgtccgatcacatcatttcacagtaacaactacttttcatatgtattctgtttcgtacaagagaacactggtcctggtccgtctgtcgcccccctgcttaacgctcctacaattatacttgttttccgagagtacttccagttatttttctcttccctgagttccatgcctgtcatgaatcctgacggatccctgccatacagcttttcgtaactgcaaaaatcaccggccgctccgttcaaatgcttttattctggagcaataccggtgattttgttattttcattgatcggatttcattaatcagatttagttgatcgccaccatctgcgccgctactgtttccgcttcctccgctgagaagtagccgcagtcttccatgcgcctcaacacctgcatctgccgtttctccgccagcacaggattctttgtgggagcgtatctggaaggggcattcggaattcccgccagaagagtgctctcatatttcgtcatttcttccggcgcctttccaaaatagccctcgctggcgtcggctacggtgtaataaccatctccgaaatagatggtatttacgtacagttccagaatctcttccttactgtaattgcgttccagatcaaaagccatgaagacttccgccgccttcctcgtcatctccttctcctggctgaaataaagattcttcgccagctgctgggtgatggtgcttccgccttccacgaatctgcctgcccgtatatcattaaataccgctcttccgatggcaatgagatcgattcccgagtgcctgtaaaatctgtggtcttccacagaaacaaccgcattcacatatacctccggcagttcttcaaatgccgtataatgttctttgttctggatcgattctactttatccgccagactcatctgatccagcgcattccggtacatggagtatcccttacctgcaaccgcgaagccggagcagatgcacagtaccattgtcagaacgaagaaccattttaatattctcataacctttatttttttcattgtatctgctcctttctttttggtttcagactttttttgttttactggttctattgtaacagattttcaaacagaagactttaataaacccttataataatctgacagattccggtaaatactaacgagaatctgaacaattattacgaaaaacagatgtaaaaataaaattgttaaacattccagataaaacaacagcggaggggactgcgaaaaccacagccccctccgtatattgaggaaaacaaataaaagaaagtatcctatttaatcacaatcgcctgagataaatgtctcggtgaatctgcatcaatcccttttttctctgcgatataatatccaatgaactgaccgataaatccaatgagggccgcgttctgcgtatcattatagccatatgtcagatccaggcagtaatctgcgtctttaaaatccacagaagccgtgttaccgatcgctgcagtaacagctccatactccttcatctgggccagcagcttcccatcctcctttacagtctccgaatggcttaataagatgatgagcgtattctcatctaccaggctcatcgggccgtggcggtattccagcgagaagtaggcctccgaattggagagtcccatttccttcatcttattcatacactcattggccacgccatagttaatcccctgtcccagcgtaataaacaggttcagtccctcatgctccgtaatgatacgctttgccatctcatccattttctttaacgcatcccgcgcatgatcaccgtaaccggccatagctgcgatctcttcctttttaccgcccacatacatcgccatgacggcagccaggtacaccatgctggtgaacgagcgggtcatgatgacactgtcttccgccgtatccggagaaaggatcataaagtcattgtagagtgcgctgtccttatcacaggtaatcgccagtgatttcactcccggataacttctcaccttatctatcgccatgcgcacttccgtcgtgtagctcttcctcgtaatcggaaggacaagcaccttccggtttttcacaaacgtctccgggaaataatagagctccgaacagcataccgcttttgatggtatcgcgttatagcttgaaaatgcgtgtgccgcagcctgggccagatagagactggtgccgcaacctgtgaagatcagttcgtcgtaatcttctgcaaataccttgtcgagaacaccataaatatcctctaaagtctcattgacagcctcaaatgattctggctgtaaataaatttctttgtatgtaatttcactgtttctcttttccattataaaaatcctctctgttataatcaatttgttctgtactattaagctttcccctcagaaccggccaggcggataatgtccttaatgtcttctgtcagtctgtcgttggcaaactgtgacaatttccacgagtgtccctgatgatccagcgttttcagtccctcttcgtaatgttccacatatttgtaccggatttccgtaccaaaattaatctttgccactcccagcttaattgcttcttttacaatctcctccttcattccagtacaaccgtgaagcaccagtggaatatccgtgaattttctcacagcctccagtacctctaaatggatatccggctcacccttataataaccatgagcattgccgatcccgattgccagggaatccggctggcacaatcctaagaattcctttacttcacagggatctacgatgttcttattttccatcacggttcccatattgtcaaggcgcaggagttctccaatctccgcctccacaggcactccaaaacactttgcaaccttgatcacctcattcgtcatagctgcattctcttcgatcgggcttgtggaaccgtcgatcatcacagaggtaaaaccaagtttcagcgcctccatgcagatatcaaagtcggctccgtgatctaagtgtatcgatacagggacagaaactttgtcggcacaccatttacagacctgtacaaaccagtcatggccggaataagcaccggtagacacataatgagccagtataataggagatttcatctcctcagccgcacggcatgcagcccatatgatatcgtaattgccaccctgtgtattgagtgccggaatggcatatccatttttggatgcctcaattagattttctttgttagttacaagcataatattctcctttttcttaaccttttaccgctccggctaccagacccttgatcatatacttctggaagaagaagaatacaatcaccatcggtatcgtacccacaatggatattgtattgatcagcgaccagtcataggaaagttcgcccagatagcgaagcgccacgcctgcggataatgtccgaagcgagtctgtctgtatgagtgtggatgcgtgtaaataatcatcccaggacagcaaaaatgcatagatgccgactgccagcatgccgggtttcactaacggaaccacaacccggaacagtgtaccgaaccggccggctccgtcaacacgggcagcttcttccagttctctgggaattccatcatagaaactggacatcagcataatggtgaacggaagctgtccggctgcaatagccaggatcagtcccgcatgggtattgatcagatgaacgtctccaagtattttatacagggaaatcaaccggctgacaaccgggaacatctgtgcggaggtaaatgcagctatgatccatttgttccacttaaaatggaagcgggacagcgcataaccggaaataatcgccataaatgtcgtcagcagcgccgtggaaccggctacaataaagttgtttttataatatgtaaagaaatcattatccactgtaaacagattgatataactctggaaggtgggattctttacgataaaggtcggaggaaatttatatgcctccatattggttttaaaggacgtcagcagtacccacaataaagggaacagcagaaagacgagaatgataattaaaaccacgtatttgatcacgccgttaaggatacgtttccgtttcataagctttccaccccctctacatgtcttcgctcttaaagatgcggttataaatataaactacaacaatcatcatcagcatccagacggtcgtaactgcagctcctgatccgaagttgttggagacgaacgcctcccggtagcttaagatcgccatcgtagtcgtagagttgtttggaccgccccctgtcatggtccagaacagcgggaactgtttgaaattctcgatgatggacatggataccgtaaccttgataacgctcttcatgtaaggaaggacaatccggaaaaatctctgaacaccgtttgccccgtcaatctttgccgcctcctgcatatcctccggaacattggccagacctgccagaaggagcagtgtggcaagcggaatctgcttccacagtgcagctaccgacacaccaaacatggccgtagccggattattcaagattgcaaaatccgtgattctcccttttgtcaggacgcctacgaaatatttgaccagaccgtactgaggctggaacatccacagccagacgagaccggatatcagcgtcggaaccacccagggaaccatcataatactgcggataaatctggaaaattttacattgctgttaagaatcagtgccaaagccataccaagtacgaactgggcaatcaccacgccaaagacgaaggtcagcgtgtttgtcatagacggaatcagctttccgttggaaaacagcttcgtataattggcaaaattattccacacccccggctgtcccgaaatgatgttcctgaccttatagtcgaaaaagcttcggtaaattgaatccacaacaggtaccagaataaatgaaactgttgtgataatagcaggaatcaacagtgcgattgcaaatattttatcacccgtctggtttttccagagggatttcttaatacctttctccatcgtaacaactccctttatatattttccccatatacattgatacccggtcccagtactcccgctaagtctttctgtccaccgcccataacaggctccttagctccatcgattctgggatccacatactgtaaaaaccacagttccatctgcttcttcatatcccgaatcacatcctgataggattcatcttctattccgttatatgcctcccccggatccacctccaaatcataaaactcgtcggggccgaaaggatatctgtgaaccagcttatacttcctgcttcttatcattcggaccggtccatactcatcgaagacgacaacactgttctcctctcctttctgctcctggcccatcaaagccgaaaggaagctcttacccggaagcttatccgcctcatcatttttaaatcccaggtaatctaaaagagtgggcataaagtcatagccgctgtgcatctcgtcacaaacatgattctccggaatatgccccttatgacacataatcaagggtaccttcacggaagaatcatacatattaagtggaaatgtcccgttgcccttgccccagattccatggtggccgcagttaaatccattgtcgctggaaaaaataatcagggtatcttccataagattctcttcctccagcttttttaagatgcgccccacattatcatccatagctgtaactgctgcaaaataaccgatcagagactctctgggcttttgataccccgcgattacctctgtctttgcccatggatgcacctccccctgaggacatgtctcaaacggacaatcttcatagagatccgtatatttcttcggatgacagtttatccatggagaatggggcgctgtataatgcacacttaagtaaaaaggctgctccttattcttctctctgtctatgaaggaaatcgcttcatcggtgatcacatcggttatataacccttttcctcaatcttctgcccgttacggaacattggtgcgttgtagtaggggccgcctcccttctggtgagcataccagaaggagaagcccttttgcggatgaccgccgtcacccaaatgccacttcccgctcagaccgcaggtatatccctcttcggccaaaatgtccgtatagccgcgatgatccttcaggaactcaattgcagcctgagaggcgcctccatttcccccgcttaagtaatcaagaattccgtgctgtgacggaatctttcctgtcaacagagaagctctggcaggagaacaaaccggagacgtgcagaaaaagttatcaaatctcactccctgttttgccagcttatcaaggtttggtgtctggatctcagagttgccataacagcccatagaccagattccctgatcatccgtcagaataaatagaacgttcggtttctttcctgccatgtctttctacctcttttcttaatcttgactcaattatttctatggaagcagcggctgtacggccgtcttaaagccttcgatcgccgtatccacatcctcgccgcctactgttaccgcctgtgccagtgcacacagttctaagttaaactccgataatgtcgggaacatgtaaaccggttctgccttctcaacagaatcccctgcaccatttaagatcggactgttcttaacagcttccatatccttcatggaatttttagccggaagtgccggtgcgatattggcaatgtagtcattcagcacctcaggtgtaattacgtactggataaaattcttaactgcttctacgtgatccggcccattgtctactgctacgaagcagtgtgattgaagagttgatgcgccttcaccatttcctccctttaacggctctgctgctgccgcaaagttcactacatccgggttaatggattttgcaccgttaaagccccaggaattatcgtagtacatggccagctgaccaagcgcaaataagttccgtaaatcctttggcttcgcgttctgtggattgtatcccttctgatccaaaagctttaacatctccagtgattctttaaatgccggatcatcagcggtaagcttgccgttatcatcgataaccgttccgccaaagtttgctgcaaatgcctgaatagaagaaccgattacgataacagatgctgtcggctgtccaaacgcgtatactttatttccatcgtccgttgtcaaagccgctaacttctcagccattgtaagcatctcatcatatgttttcggcggctgttccggatccagtcctgctttcttaaacagatccttattgtagaacaaaagtgacggagatacgtaaagcggcgctccatatacctctccatcgatggaatgcgcttccagaatgtttgcataataatcattcagaaacgattcatccagcacgtccttcatcggcattgccaaaccggaatctaccagagccggcagccagatcatttcgctgaagatacagtccacacggtccccgccgcctgccatgttgatgacctgatttaaaatttctccataaggagccgtcacccattcgatcgttacattcggatatttctcctcatatccagctttcacactgctccagaactcatcataccctttttccagcacagcataattggcgatcttcaaggttatcttttccccgctgcccgtatccgccgcctttgcttcctctttcgtacccgcttctgtctttgcctccgtgcctgccgtacttcccgctgtactaccgcctccgccggaacacccggtggtcaatgccataacacaagcgagtgccagtgctgccagtcttctctttttcatcataataccctctctttcctcatttttcatatagtttttgtgtttctctatattgactcgagccttatacactcgagtgtataaaccccgatataaaatggaaaaccattttatattttcacattgttactttcgtcttccggaagggaccttcttacgtactctcccggataatcagctttgtctcaaacgtcgcgttttccggcatctgaccgccgatcatctgaaccatcatatcgataacagttctgcttatctcctcccgctgcatctccagtgtcgtaagctttggtgaacagaaccggctgatgctggaattatcaaatcctacaacgccgatatccgcgggaacccgctttccaattcctattgctgcctgcatggcaatgcaggccaccatatcgttacgtcccatcattccgtccacctgatcatgacaccttaagtaatctgctacagtctcagtcagttcctcttccgtatggcaaccggctattaccgtatcgccgcctgcctccaggccgtgatcgtgaagttcatccagatatccgctgagacgaagatccgacggaccgctgacattcccccgcctgctgatgcgatcgatgtagataatattcttttttcctctgctgattaagtggtttacccctgttctcgccccggaataaagtccggaagccagtgtcgccacattctccggcagagtatcgtgcttcttatgttcaaacaacagcaccgggataccggccttactgaaatgccttacatactcttccggaaaactgatggaactgatgatgataccgtcatactggcggctgataacctgtgatacaaactccggtgtgttccggttggcacaaagtgaaatcaggaatccggcttcgtaagcatacttatccatctcactgacaattctgctgaaatactcgtttgtaatctgatctgcaatgaacagcagctgattgctgcgttttcctttcaaagctcttgccacattgttaggacggtaatgcagggccgcaatggcatcctccactctctgtcttttctcctttgctacatagcggttattattcacaacatatgatactatggtttcactcactccagcagcctttgctacgtctgcccttgtgacccgctcacgatttctctccatacgttcttttctccttgccgcataccctcgtactgtacttttattcagtataactctgtatgggaaaaggtgtcaatgatcacagtcattattgtttacaagccaggatcccacgaggtgtattttgtgagtggagcgaagcgcgttattgttcacggagtgaacagtaattcacggtcagattttacatctcaataaccggaatatttaacaatccacagattcccttcatagcttccgccacatcttcccagacaatgctgtaatgatgaggaattccctctgttatgattccttctataatttctctcaccggccgctccacctttacactggctgttacgccttttgtacaacggtccaaagcgacggcttctccacgaagaagaaaaagtttgtacgcaccgtctatattgcaaaacctggcgactgtcacctttccaggcttaagcgccccataaaaagccgttccctgtcccgccagcggatggtttctgatttccacctcatatgctttgttaaataaagatggggcagcgtttccacagtgccagaaggtaattacatttttctcttcatcaatgttaatcaggtcagtgataaaactgggctcccccgtaagataatattctgtcatctgagccagttccgcatcgacatcaccctcgcacccgatagtaataccatcgtcagccaaacgtccaagcaccgcacacggtgtcgtatgtaaattccccatctccggccagcatttaattgctgcgaaatcgtaatgctgctctgccatcacttcttttaaagcaagatacagcctggaatgattctccagatggccctccggcagttttcctgtgtcatacgcttccgccatcttcgccatgtctgcctcatacttctcagctggcagatcagccatcttgtcgaaaaccacctttaaatcagtctcttcgatcttaactccgaaggttctccggatcagcccttcgtcaaatgcacagttataaaatgcggtaggccggtaccccaaaagtcctaatgtggtatgctttaaagacttaaccactccgtaagcaagaagaagatttttaactttctctgctgccttatcatcttccctgcttccgtagattgtatggcaggaaactcccaaccgtcttaatgcagccgcattcatcgtcattgagcagagtgcattggaatacaatctgtcttccctttcaaaaggtacttcatagggagcccaaaggataatcggtatctgaaccatctccgccagataggaagccacgtcatcgccggtaaatgccccatatacaagaacaataacatctgcctcctggcgcttaaattctctgaccgccgcttcaaccgattcaatcccgcttccaagttccggcgcccggactacttttacttctggcatctgcgcttccagccattcaccatactctctgtttctttgttccggaacctctcgcggccaccgtcccgaacatgttgttataaaaccaatcgttagctgcatctgattaccttccccattcttagtaatttgcacaattgtagtttatatcaactcgtgtgtatatatcatttttaccatattcttttctcattgtcaatacccttttctcatttttttgctggtaacagtgacttccggaaatgaatgctgaacggttaccagcaaagaatgaagagtccgcgaaccggactccttcgccggagcgcggttgcttcagcaaccatacttcctcagcgcggagtgcgcctcctgccctgaggacttattatgtaacaggagcacttttacataaaaagcagcagacacactccccatcgttggttctttctcggctttgggtgtgtggccgtgccggagggcttgatatcccagtgtgccgccatctggatacgaaccgcaaaaatgaacgtggctggcgaacacatgggctttgtgtccgacagccacgttcattctttgtggcgagtaggaagcaaggcggacacgggatatcaagccctccggcacggccacacacccaaagccgagaaagaaccccatcgttcgcgtgctgctgcctgaaaaccagtgacacctttgtcttattcttatggcagcaatggctgaacagatttctcaaaatctgccgctgccgccgaaacctcctcatctcccattgtcactgcctgagccagcgcacagagttccagattaaaatctgccactgtcggaaacatcaagctgggtgagaggtggtttaccgtatctctggcacctgccagaaaggcactgttattcactccatccatatgctccatagctttcttagccggatatgccggtgcaatattcgtcatataatcctccattatttccggagtaatcacgtattggataaaattcttcactgcctcctttttctccggaccattgtcaatcgcgataaaacagtgagactgtgaaactgtctcgccgctcccctctcctccggccaatggacatgcagtagctgtaaaatccgctgccgccggattaatggatgttactccattgattccgcctgtcttgtcataatacatggccagctgtcccagtgcaaaaagatttcttaaatcctttgctttcgcattctgaggattatagcccttttcatccaattcctgcaagaattcaaaagcctggataaaaccaggatttttcatatccagcttcccgtcagcatccagaatctcaccgccgaaattttttatgagtccctgcagataagagccaactacaatcactgatccggttggaaatccgaacgcatataccttgttgccgtcagatgattttaactgtgacagcttttccgccattcccatcatctcatcatacgtcttcggcggcttctccggatcaagtccggcttccttaaagagttccctgttataaaataataccggcggcgtcaaatacagcggagctgcatatacggtaccatccatagaatgagccgctaatgcatcaggatagtagtcgtttagaaaatccgaatcaagtacctgatccattggagccgccaggccagcctcaaccagcgacggaatccagatatcttcaccaaatacacagtctaccttgtctccgcctccagccatgtttataacctgatttaatatctctccatagggtgccgttacccattctacagtcacattaggatatttcgactcatatcctgtttttacattctgccagaattcctcgtaccctttttccagtactgcatagtttgcaattttaatggtgacaggaacctccgaatctgcttccgaagtattggtctccggtatactctccggtatactctctgttgtcacttcactggaatccgtactgatctcctgtgtggactgactttttgcacaacctgtcgtcaacaccagtaagcaggcaagcagaaatactgacatcctcctctttatcataagtttccttctcctttctaaacacagatcaactcacagtttcaaacaatatactgagattcatcagagcacgcggcacatgaaacgctacccggtgcttccctcctttgtttttacgaagcggcgtcccatcccgttttaacacaggataccagtctcccccttcttcaggcttaaaatacgtctggcagaactgatggagctgacgaaactgctctatggcagtctcctccccagtcagcacagcggcaagcgcaaacgcataaagactctcacagttcacccagtccactttgtcatctgccctgagatctcccgtatccgtctttaacgtgtcctctccctcctttccatagcagtcaaaccggtgaatcacacccccatgcgtccgatcaactgctgctttcgctgtttcctgtataatagtaagcgcacgcgaaatcacagcgtcatctgtatccctggcataatcgatgcagaaccacatgccttcgaaaatgtgccccggattgacaatgcgcccttccggagtatcccatacggatccatcttctttaagactttccaacagataaccgctttcatttttcccaaagaaatacaacagttttctgatacagaaatcaataaacggtcctgtcacctcttttcccagaactttctccgctaccattgaagaatgaaccgcaatcatatacggggaatgtctctctattccgttttgccacacgtgtggttttatatcccgaaattcaggatccatgatatgatttctcgcactgtcaaatgtctttcgaatcaggtcataatccgtctgatcccccgatgcagatgcatactgtgctaacgcaatcagggcaaacaagtccgtaaagatggaagtcgtcccttcaatcacctcttccccattctctgacacctcatagttccatcgcccttcccccgcataagcatggcaaaccagaaaatctcgtcctgcctttgccagtgagagccacttttcctcgcgtccggaatattcataataggcagcgaacatgtaggtctgacgtgcctgagcccatatattccttcgtctggaaaccagtttccagttttctccgaagtctgttaaatatccgccggacggatctgcagaatgctccgcccactcttccataatctctgagagctggcttttatacagggctgacaactgcctggcctcttcttttgttatcccaattttcatatctaatcctctctggacacacttaatcaagaatcatttccgcggccttcttgaaatctgcaatcgccttgtccacatctgtctttccgaccgtcacagcctgagccaatgcacaaagttccagattcaaatcactgttctgaggaatgaaaacctgagttttcgtattagcctcggaaccagctgctccctttaagatcagactgtcatccactgcgtgttccatggatttcttagccggatatgcaagtgtttcattggacatacggtaacttaaattatcatttgttataatatattcaacaagcttttccacggcttttttacgtgcttctccattatccaccatcatcagacaatgagactgcaaaatactctgtcccgtgccactgcctccttttaaaggttttgcagtaaccgtaaatgcttccgcctccggattaattggtttaattcctgcaaatccccatgactggtcgtaatacatagcgagtcttcccagcgcaaataagtttcttaaatccttcagtttcgcattctgtggattatatcccttctcatccaaaagcttcagcatttcaaacgcctgtttaaatccttcgttatcacagcttaactttccgttttcatcaagcacctgacctccaaaattgaataccatgcttgtcagcgaagcgccagacaccggcaccgatgccgtggtctgtccaaatgcatatacctgattcccatccgcatcctttagctgcgaaagcttctcggcacactccaacatctcttcataggtggtcggaggattggatgcatccagtccggcctgttcaaacaaatccttattaatatacaagatatatggtcctacatataatggaagcgagtagagtacatgatcaatcgaatgcgcctccaaaacatttgggtaaaaatcttcgagatattcctgcggcataatatccgataccggacatgcaattcccgaatccgccagcgtcggagtccagtccaattcaccgaaaatcaggtcgacatactcgcctccccctgccatattgatgacctgctgtaccatttccccaaatggtgcagtgatccactcgatttttatattagggttctcagtttcaaaatctgttttgatcttttcccagaaagcgctgtttccttcttccagaaccgcataattggcaaacttaattgtaaccggctcctcctgacttacagaattttctgcctttgaatcctctgcttttgccatctccgtttcgcttacttttgtttcctgacttcctggtacttcagcagtctcttttccccctttttgacatcctgctgtaaaaatcatcgtgcaggcgagtgcaagtgccatccatcttcgtttcttcatgtaaatcccctctctttcttagtactgtaccccatttttgtttgtcgtgcatatacacacgtgtgtatattgtttatataaaatggctttccattttatttttcctatacgcttctgtgccagatccttttctccttcgtgaactgtctgaatcttatcgtttcgtgcattggctgaaaattgttttttgacagctgctctaaggaatcaaccaggttctgtctgctcaatttataattaactctttctggtactgaaaaaacaacacagtaaccgtgcttgatatccgcatcaggtgtacgtctgcaatgcggcggcagagtggatcatgcgtctggctttgctgacgggcctggcacggacagtgaatactgttaccatagaattagacatccgctcattcacagtttgccatttccattggaattatgtaaggaaatagaatatagtaataattgtgggaaaggcttgaattatattggcactttgcacaattaactttttataaactcgtgtgtataatacatatttaccatacttcacacgaattgtcaataccctttttctctctgcataaacaaatagttactattctgacttgcggtaagctatcattagcaacaccgttcatctcagaatactctgaaccacaatcaccatcccggcaaacgccataaatccgtacacgcatttcctcatcacatcgatattgatcttcttaacaatcctgcttccaagaacacagccggttaaaatggcggcaattcccacacccataagcggcaccagcgataccgtcagaaagccgttgtaaatcctggatatcaaattaaaaatgacagtaaatgaaaaaaatgcgtttaaagtccccaaatactcttccttcgtatccgtcgcggccagataaaacagactgaccggcggtccgctgattccaaataaaccaccacagataccagccagcgcaccgcatccgaacttcataaaaagtgttggcttcacggatagttttccggaaaatccaaagaagtacactgacagtatgatcaaaaacacaccaaaaactccttttagttttcccgcatcgataaaggcggagccgtgaatcgccagtgtactggaaatcagataaacagcagcgggaattacaatacttttaaagcgtaccgatttgcggtacctccagaacatggaaaatgacagcgtcatggtgatgacatcgctgagtgccggcgccgccgtcatatttaaaataagaggcagaaaaatcatgataatgactgctccgccaaatcctgtaaccgcctgcacaagtcctccgcaaaaggaggaaaagactacaatcaatacctgttccatcgcatctcctttcctgatgcacgttttcacgtaaataatgtctgctttgtgtgttgcaatgtggcttggattttcgctccggcttggatcgctgcccgccagtccgcagtgcacctcagttcagttccgctccgctgcccgccagtccgcagtgcacctcagttccgcttcgcttcacttcggtcacgggcttcgccctatgaaaaaagccgaaggtaaatttgcttatgtgcgagcacaacacaaatttaccttcggcttttttcgcactgctcattgctaacgtgcaaactgataaatattataaatgtttataaagatgatgactatcattaaaaagatgaataacttatctactaccttggaatcgatcttcttattgatgctgcggccgctcatgcctcccaggatgccgccgatgaccatgagggctaaaagccatatcgtaaattccggtactgttctggtgaccagggaattgatcaggctcgtgatctgggagaagaggatgatgtacagggagttctgggccgctgtctttgtctccatggagaagaaataaaacagaacaaccagattgatggggcctccgccaattcccaggaaagaggagaaaatccccagtactacgccgatgataatgcatactactgcatttgtcacatgaagcgtttttatcttatcttttttcagtgtataaatcagcgttcccagtgtgataatgagcagacatcccgcctgtacagcccccaccatatctttattcgcaaacatgttggaaagcgcctggaacatggattttccaactacgcctccgatggcggcacctatcgctaacggggtccctgtcttcatgtcaatcagtgattccccgctcatctttcccttaataacagagtagcaggtcatcgccagcaccgtgcagcctgacagaaaactgatggttgaaacgcttaatactccaaacgcgtcaagcgtaggcttaatgataacgccaccgccaattccacagatcgctcccgctatagatgccccgaagctgacaatccagaataaaatataaagatatccactcattatctaaccgtctctttcttactcatttttatgcatttgccgtcagtaacaccattcattccgcaatgctgaactgacactcttttcccttaacaaaggtacgcacaacactgcagtcctcgtccaaaaatacaaggtctgcgtccttaccgggttcaatagaacctacccggtcataaacaccgatcagtctggccggattctccgtcagcatcgggagtatatccgtcagagaacgtcctgtaaattccagaaggttcttcagtgcttttccggttgtcagcgtactgcctgcacgggttccgtcggaaaccagcttggcatcaccatccactacgactacatcattcactcccagcttgtaattaccatccggaagtccggctgccatgatggaatccgtgaccgcaatcacacggtccaggcccttaatctttatgataaaacggacagttcccggatgaaggtgtcttccgtcacagatcatttcacagtacacctcgtcgtcttccagtactgctccccagatggccggaaaatgctgatgtaaaagcttcatggcgttgccggtatgtgtggctcccaacgcaccgttttgtatggctcgccgcgccgtatcataatctgcccccgaatgaccgatagccacctgaatccccagactcttaatatagggaataaaatcaacaatgccttccacctcaggagaaaccgtgatatagcgtacctctccttccgccgcctcctgatacgccttcagaagctccatatccggcttctttaaaaggtgttccggcatggcgcctttataagccgggcataagaacggcccttccagatggattcccatgagatttgcaccgtgatgctccgtatttttccacgctttatacatctggatggcatgcatcgtctgctccttcgtgtccgtaagaacagaacagagccagctggtcgttccctgcgaggcaaagaaacgacagattttctcaaagccgtccgcatccgctccattgacatccacaccgactgctccgtgagtatgaatatcgataaatcccggaaccacccgttttcctccggcatcaatcacctcatcacatctctctccctcgcagccgcccattcgggaaatccttccgtcctccaggagaagatccagcgcctcgaaacgatggttgtggtacacagatgcatttttgatcaatgttttcactgtaaaacctccttccataaactctgttaacggtacagccaatgccctgtctccatgatattccaaagagcgtcgggcatcgcttagaacggcctgccagccgcaaagtcctgccgctgtaaggccgttccgtcgttgtatgaatcaggaatcattttattcctgcacacatcacaattctattaatggtgcatatgagctgcacaggcacaatcttctgcaccctttccctcatacacgtcatccttcatcatcagatgtacagctcccagcttaaatgtctgtggaagcgcaagaatattcggattcggtcctacaaatttcttctttgcatcctccagcgcctcttcaatggtcgctctcgtcttaagccccattccccttgcatagcccggatcctgagcgccgcagaggtagattgcggaggtattcatctctgcaatatggccgcagctgatcatggaaaatccgtggaacggatggaatgcgttgcagtagcggtactttctgatatactcctcattggttgcaaaatactcgccgtagcggttcatatcaggaagtgtattcataaagtcatgctggaacatctcatacatttcccttgtatacggccacagttcatcgtggaagtatccgttgcagagagaagaacagataatcacacagttatcgctcataattctcttatgcctgattacctgggcggaaatagcctgaagcagcatgatcggattggttcccatgccttccccgtaatggaagaactgaggcataccgaataccatgacatcgtacttcttctctgcccacggcacgtacgttctcttgtctgccgtgatccaggaatgaggctgcataacctttgcatatccgctgttgatctcgatctgtctggactttgtatcgagaaccgcatcacagcagaagaatttcttgcccatgcatttctccatgtgctgtccgatctcatcgaacttcgttctcataagggactttccgcttaccggagtaaaatccttccggtgcataacctccggcacatgatgggaggcgatggagcgccaatgggtaattcccgtcgcacagtgcttgtatcctcctgaatatccgccataaggattgccctgggtatggccgatcagaatcgcaacatcactgtcgtagacgtatttgttcatcagaaccggatcacctctgtccgtggttcccaaatctaccagatgatcgtaatcctcactgtcgtggttgataatctggtgcgtatgccagaattcatggaacagctcgtcgcccagaatattatgtatctcctgttccgtattcttccgatggagaccgttggaacagatcagtaaaatgtccttcttctcaacaccagccgcatacagttcgtccagaatcagcttaatggaaatcttgcggtgggacgtcggctgctcaccgccttttacacggtccggaaaaataatggtaaccttggatcccttatgagccagctcagagagcggttccattcccattgggttcctgatggactttaaagtctcttcaatcagacggtcctccggtatgcatgccggatccggcacggtctcgcccggaataaagatgtcagttgtatcgggaagttctgctgccataaggccagcaccgtattcaaatgataatttcatataatttcctcctgctttctcattacagtgttaatgtcccatgtatgtcttaatgatctccagatattcctccggataaaaaccgatttctccctggaatctggtcaatgcgatgagaccgccgtccattaccggcacggaagccagcatctctgcgttatccacctttaatccgcctccgtacacaacgtcgcagccttcggtgatttcctttatataggtaccgatcatggtgatatagtctttatccggcggaatctttcccggtccgatagcccagaccggttcataggcaatggtaaccagatctttttccacaccctccagaccgatatcaatctgctcttttaatacctctttccatctctcctgctcttcagaagactctccgatacagtatagcacagaaagaccggaagaaacagccttttttatctcctgattcagcagacggttcactgcctttgtatctgtgacgccggcttccgcaaggattcctgccttgtcttttcgctcttcacagtgaccgatgattgtcgtggtacagccgatggcttttgccgcgttcgcggtccggttcgtcgtaaaagcgccaaaaccgcccccaaccgccgtatcatcacggtatacgccctggcatcccactttaaccggactgttctcacacagcgctcccacagcgggaatcaagtgtgcctctggaaaatacatggcaaattccacgtcttctccggtgtacttttttagctgctcctgtgtattggagacaataaagcttccccattctccgatcggagcaatgctgtttaccccgccgtattctttggggatgtcaaaccgtttcaaattcaaaaaaatatgtttcatgaaataccctccttgttttcagtgctgagtacactgctcatcctatttcttaattctcactagtaatgttaaagtcaaaaaagtctctcagttccggtccaatcaaaggtctgcaccagcggataaactcctctgtcacatcgttgccgcgctcatttaagtaggattccggaatggtacgctcatacatcatgacttctttaatcggtatcatctctgtatgcatgcgatatacgccgtcaatcttctccgcctcttcatcacggataaatccaaccatgacgccgctctgaccggcaactgccgcttttaatgcctcgcttcccgccaaaaccgcctcatcccggtccactggagactgccatgcgatcgaagcccttccgcagatgcccggtttctcacttctcgccttgattcccagtttcttaataaccagctcggccagataggcactgacatctccataataggttgcccgctccgtcttaaagattggaggaacaatgggctcacccgcttcatttttcaggccctcgctgactacgactaccactccgcccttctcttcatgaagccgttttacatcttctaagaactccgcctcgttaaaaggtctttccggcaaatagatcagatgtggggcatcccccggttttttcctggccagcgcagaagccgcggtgatccagccggcattccgtcccatggcctcaatgatgcatacgtgaattggaagagattttacatccacgcccacctcggcggtcgtagccgctatgtatctcgccgcgcttccaaaccccggcgtgtgatctgtaattgcaatatcattatcgatggttttgggaattccaacgacgcggatatcctcgtccttacaaacctcataaatacgtccgcacgtatccatggttccgtttccaccgtttaacagcacatacttaatctcatgctttttaaaaataccgaccatggcctcataatcttcctgctccagcgcataccgggacgatccgatcgccgtagcaggagtttccaaaagcagcttcagcttctcttccggaaattccagcagatttaaaaagcgcgccttcaaaatcccttcacttcccccgattgccgcataaaccttatcaatttttccaatcttcttcgcttcctctatgactccgtaaagggaagaattgataaccgctgtcggtccgcctccatggacaatcaaaacattttccgccatgcttttccacctttcttcattttgtttcttttatgtttttgcgtacttcaatgactttatattaccacatttcagagggaatttgcgaagtttttactcaaacgtttgcgtgcaaaaaggaaggcggtatgagaaaaaatgaatgattgttaagggatttaattatgaatcgattgattatgatatgaagcgatgaaaacaaatattttatgttttttttacaatctattatcgttatgtttttctggatgtgatatactaaaaaaggaacaaccgtgttgcagggtggcgttggccttcattctattattattctctatcagaatggaggtgatgtctatgaaacatttcgattttaaagacctgatggcctttggaatgtttattctggcgttactgacatttatgtatttgatctgtcactgaccctacatagaaaaaaccacccctaaactttgaccgagtgtgatatgatacctcttaagtagacaagataaataaccaaaatctacttaggaggtatttttatgtccaaatcccctcatacttcggaattccgtgcaaaggtgtcacaggaataccttgatggattgggttcctataattatttagccactaaatataatatcgggtgtaaaacattgaaagagtgggttgctaaatacagaattcatggaatcggagcatttattcgtaaaacggggaatgcttcttactcatccgattttaaaaccatgtgtgtcgaagcggttttatctggtgatggaagcgtagatgatatcgctgctaaatataacatttcttcaagaagggtactcagccaatgggttgtgagttataatgccaatagagaacttaaggattatgttccgaaaagggaggtctatatggcagaggccagaagaaaaacaaccgttgctgaacgcaaagaaatcgttgagtattgtattaaacataaccatgattataaagggactgcaggcatttataacgtttcatacagccaggtttattcctgggtaaaaaagtatgatgtgaatggagaagacggtttaacagataaacgcggccatcacagagcagataatgaagtggatgaactggagcgtttacggcgggaaaatctcaggttgaaacgccagctggaagaaaaggataaggctgttgaactactaaaaaaagtgaaagaattcgaaaggatgtgaagcttggaaagctgcgttacgaatcaaaatatttagcaatcagacatttccatgaaacagagcagtggagcattgcatggatgtgcaaacagcttgaaatctcaagggcggcttattataaatggctggaccgggagattccgaaacaggaatcggaaaatcttaagctggcagaactgattaaagaatacgatcaacgctttggccatatcttaggctatcgaagaatgacttcatgggtcaatcgctttaaccatactgcttatggaaaaaagcgggtacatcggattatgaagaaactgggtattcaatctgtaatcagaaagaaaaagaaaaaatatgtatcttctcccccggaaacaaccgcagaaaacaagctatgcagggatttttatgcgtctgcaccaaaccagaaatggtctacagatgtaactgagtttaaaataccgggcgaaaaaaagaagctgtatctaagtgtaatcattgatttatatgaccgataccctgtttcctatgtaatcagcagccggaatgataatcaactggtgtttaaaacatttgataaggcggtgatctccaatccgaacgcagcgccgatttttcatagtgacagaggttttcaatatacgagcagagtgtttcagaagaaactaaaggaacatgaaatggaacaatccatgtcaagagcaggacactgtattgataatggccccacagaaggtttctggggaattataaaatcagaaatgtatcagatgtatgaaattactgatgaaacgacattgagacatgcaataaaggaatatatgaagttttatagcgcagaacgtcctcaagacaggtatcattgtaagacaccgttagaagtaaggaatgaggcaatcgctgctgaacatccagaagaataccctattcctaaaaacaagcgaatcgaaaaatataaagaaaaatggtgtgcatagaaaaacggccacaaaatgtggccgttcatcagcccctcgttttaaatatttcacctgtctacttgaccgggggcatatcagtgacaaggtggcattttctatcacatataaggtcaacccaccttgtgggcggttgctcctctttgtatgtataatataccatatttctatcaatatttcaaggatgctttcatatttttacgctttatcggagtatttttcaatctcccgtccctccttcgaagaacggtaaatatccagaaccagctccagtgtacgcttcgcatcctccggatccacaggcaccggttttcctgcccttaagcagcggtaaaaatcccgaatctggatctcgtgataattcccccagtacgcttctccatttacattagaccggacagacggagacacgattctcggctcctgccctttcaagcgaatgactacttcgtcctgtgttaaaagcgcagttccattttcaccgcttatttccacccggatcgggctgttgcttgtataataattacatgcaaaaaaggaatataccgcaccattttcgaacgtaatggccgcgtccgccacatcctccacctcaatgttggtcaggattctccggtcaatctgccctttcaccttaactggttcacagcccatcatataacggaccagatccagactgtgaatcgcctgatcaatgaccacaccgccgccttccttctcccagcttcccttccagtcgcattcataataagacggcggccgccaccagttcagcgtggaaaatgctcctgtaatccttccaaatttcccttccgcaatcaatcgtttcacttcctgaaccccttcaatatagcggttctgaaaaataacacccagctgtcttttgttcttctttgccgccctgatcatggcgtcagcatcttctgctgtaatagcaatgggtttctctgtcaatacatgaaatccggcttccagacatgcgatgccatgctccttatgtaaaaaatgcggagtcaggacatgaaccacggacagcggctgcttaagcagatcctccagcttatcggaataaccgcagcccggaaatgctgcagccagtttctccgcccggcttaattccttatccactgcgaagacgagttccacctcatccctcagattctcaaatgcagccttgtagaccgatgaaattctgccgcagccaataattccagcttttattttttccaattgtctactccttaataaaaagttgtttgattgccagagctgcaccgcctctggctccggtcaggggattgaaatcaataaattcgatctcaatttcctgatcattcaaaccaaaaatgtgcttctttgtctcctctaaaagctgtctccggtttctcttcaccttcatcatatagccatccacgattactaatggcgggctgataagattgatgatgttggccagtgttacccccagatacatgacagcctcttccataacctttaccacatatgcatcgttgcactcttccgccatcagcacatccttcatggtcagaccctcaatatccggacataactccgtcagcatggtagatacaccggccctggcagctgccttgcactttttaataattgcccgttcactcgccagctcctccagacagccattatgaccgcaggtctcgcatttcggaccattaatatccactaccatatgaccggcttcaccggcactggcattatcgcctgttatcatacggtttttcacgaacaacgggcaggcaatgccgtaggaaatcagataataagcaaaggaatccggtctgagcgtcttgccaaacatttcctcaccgattgcccgtactctggcattgttttcgatcagcaccggcagatccagtcttctcgacagatctctggctatatttttcccgttccactctgtcttaaagctctctctcaaaacaccaacatcgggctctacaaaacctggcagaccaactccaactcccagtattttttccggttccgtcccactgtcctgtatcagtttattgatattacgtgccagcacatccatctcttctacatatgtacgattcatgggagggtatctcatgctgattttttcatttccacgcaggtccagcatacagatagcagtatggtaaggattcatttccactccaacagcatacttcgcctcctggacgaaattaatcttaaccggtttgcgtccgagggagcgttcctccacatcagaatcatctgccgcaaattcatatacaagcccgcgctcaatcaaagacgttacattggtcgtaatcgtaggaggcgtcaaagacagcatctctgcaatcttactccttgatatgggaccatacttatagattatttccttaatgagcgcttcgttctgtttcttaactcttggcagattcgttcctcgtgcagtcatctttctccctccgcaaccattcttttataccttccattatattaaagaaagaacgatattacaagttcagcctttgattcccgaaaaagttattccctcaataaaacgcttctgtacaatgaaataaaggacgattaccggaagtgtaatcatcagtgccgtagccataagcagagaccactccgtcttatactgtgtcgtaaacatctgcagcccaatactgagtgtatacctcttttcgtcgcttaaatagagaagcggtcccagaaagtcattccaggaattcataaaccgaaacagcgctactgtcaacacgcccggcaccaccagcggcagcataattttagcatatatataaaactctgaagctccgtccacacgagccgcatcttccagatcatgaggaagattcataaaaaactggcgcatcagaaaaatcataaatggtcttccaaaaaatgattggataaacaagggcacatacgttccggttaaccctattttgttaaataaaataaacgtcggaaccattgttacttcctgcggaatcatcattaccgctattgtaatgaaaaacaacagatcccggcctctccattccagcctcgaaaggccataagccaccaacggacaggcaattacagttcctaacacatccagtactgcaatcagggaagtatttcccatataccgaaagaagggaatatagttaatagccttaacaaaattctcccacatcaccggtctcggaatccagatcggcggattgataagcacctgctgatcagttttcaaagccgtagacagcatccagataaacgggagcagaaagaaaaaaccaattccaatcagaataagatggatcggaagcttctttaaatgtttcatgataaaatccctcctattcctgataatgtacccattttttagaagtaccaaaaattacaatcgttaaaattaaaataatcagaaacaaaatccaagccattgccgaagcgtatcccatacgcatgtaaccgaatgcattattgtacagatgcattacataaaaggttagcgaattgaccggtgtaccctcgccgtttgtaagcgtataaggcagtgtaaaagtctgcagggcattgataactcccataacaacattatagaaaataacaggtgtcaggagcggcagcgtgatatggcgtacccgctggaatatccccgctccatcaatctgcgccgcctcatagtattcaggagagatgtcctgaagtcctgccagattgatgatgatcgcctggccgattccccaggaagcgatcatcaccagcgcaagtttagaccagttttcactcgccagccagggaattgacgctaatccgactttgttaagcaggctgttgataataccgtaattagaatccagcaaccaacgccacactgtagcggtagcaacgaccggaaccagcgtaggaataaagaaaacggtgcggtaaagaccaatgaaacggattttggaatttaacagtaatgcgataataattccaagaataatattgacaggaacactgagtactgtaaaatacagtgtattccagatgctcttccagaacaaattatcctttatcaactccctgtaattttccagtcctacaaaattaccgctgtttaatacactataagaagtaaagctgtaataaatggatgagagaagcggataagcataaaacaggagcagcccaataatccatggcgctgtaaacaaaactcccatcctcgctttacgtgcttcgagactgcccttagtcacaactttatgtcccggccgtacattgctgccactactcaatggtaatcacctcttctcagttaagtttcttaagttcttcattaattgaaacatctaatgccttcataaggttttcgggagtgtcctttccattcagcgctgaatccagtacctgatttaagttatcccaaagcagctggccaaccggtaccggcggacggatttttgctgtctcgatataatcaaggaaggccttatacttatcatctgaaccgaataccgcttctgatacactcttgcgcggcgagaagctggcactatcctgcgccattacggtctgtgcttcatcactcaacatatacttcataaaatccattgataattcctgatttttagcacctcgcggaattacaaaggcccagccgcctgcccatgtagcatgttccccttccactttactcgggatcggacagataccatagtttaaatccggattatattgtgccatgttggcaatgtcaaagtttcctcttaccgccatcgccacctgtcctgtcacaaacgcatcctgagctccactgcccagaccattggcaaattcgataaaactctttcctccgaatttttcagcaaaatccacttcccactgaagtgcttcaatattctctgctttcgcaaccgtcagtgtgttggtatcagcatcataaaaatctccgccaaagttccacccccacgtatagattggttttcccgcattcagccatggaataaaaccaacctgcttataagtattcccatccatgatagtcagtttctcggccgcttcgttcagttcttctattgtagacggcgggtcttccggatctaagcctgcggcggcaaataaatctttattatagaaaagtgcacgggtgtcaccgttatagggaatggaatacaccgcatctttataatgagaaccattagatgcccaatcatagataccatcaaatgacagccctgatgcagccattaaatcatccagcttcacaagtgcatcctgctgtgcccatgtcggaatctggaagttgtccagaagagcaatttccggtggatttccggcagctatggaagccatcagtttatccatcgtctgagtattgccgcttgctttgttggctacaaactgcaggttgatctcaacattcttatcatttgactggttgtacatctctacaaccttctccatcgcatctgtacctggtccagctccccaggtatgccataccgtcaatactgttttttccccttttggtgcctccgcctctgtggtcccggctgactctgcatttgtttctttagatgcagtttctccggaagacgatccatttgttgtgttatttccgcctgaacagcctgttaacgaggcggcggaaagtataaatgccatagatgcggcgagtaatcgtttgtttttcatgatataatccctcctgttttcactacttacataaagaatgagctgacgtgatccctcgtttttaagattccccgtttcactttatcttcggttccttcccaaaccgggtcttcatgttcaatgcagatagcctgatcataaccgatttcatacaatgcatcgacgattcgtccccagtccaaatcgccaagccccggcagtcggtgcctccaccattttccattctgtaaaactccggctgaagcaagcatctccctgtctactgcggtatccttggcatgaacatggaaaatcttatcggcaaacttatagatatttctgtacggatctatgaactgccagacgaggtgggacggatcatagcaaagccccagccgttcactgccgacggcgtcaaagatagcctcccacatgtccggagatgttgcaatattccccatcatcgggcaattctcgtagcataatctgaccccgttcttttctgccaaatcaacaaactgtttcgccagttccactactgccggcagacttttttccggagtaaatcccataccttcaaatgactgcgctgtaacaccggtggagcagacgatcttctcgattcccatttctcctgcaaactgaatccgttcccgcagggcatcacaatgcatcttcgcttcctcttcattctcgcttaaaaaattgcggcagtagatcaaagtttttattgctactttcccctcattcaacactgcaccatactgttttttgtccaatggaaccgcaggaccgacatccagctcacagattccattttcggcagcccagtcggcaattgtttttaaatcacttattccgataccggtcagactgtttgtcagcagactcattctcataaacttattcccccttataggtttattgtttttcctgtttcacacgcaagtaatattttatccagaagtctctgtatgtaaagggcacggtcaaaattacgatccggcctctcaccactttgaatacagtgaataaagtcgtcgatttctgcatagaaccatggttcttttatcatatcctcatcggcctgtacaatttcaggctttcctttatatccatcatccttttccttaaaccaaacctctaactcattcggacggtcgtcacggaagagcatcataccgccttctccgtaaatttcaatggtatgccttgccactccaagccggctggccacaaatgatgcgattgcaccaccctggaaccgaacattaaaggcagtcgagtcatcgttagttaccgttccctgtccctgatcaaatatttcttcgcgttttggtatggaacaggaaacaaatccgtttacctccgaaacaggaccttctgacccatcgaacagccaatcgcataaatccagcatatggcagccaaaatcggcgagggctcctgtgccggatagctgtttctgcattctccactccagttttacgttcggattggtaattctgcatcctcccagtgtctccctgtatgtaaaaatcttgcccatgcttccggatttaagaatttttctcatatagcggacagccggaattccacggtaactaaagccgatcatggcaactgtggaacaacatctggccagacttacggccgggacagaactctctgaatcaagactcagaggcttttcacagagcagatgcttccccttctccatggccctgaccgcgagatcaacatgagaataatttggagtgcagatacttaccgcatccactttgtcaagaagttcgtcataactggaacatatctcaacattcaatttcttctcttccgcccactttgcggcacgccccgggattatatcgtatagtgcggtaagaatacagcccggattctgaaggtagccgttcacatgattggctgctataccaactgtatagccagttccaacaatacctactttaattttttccattacactcactcctgtatttatattttccaagcgcctcatacatatagcccttgtaattttcaactccaggctggttaaatggattaactcccagcatggtgcctgacagatagcaggcaaactcaaagaaataaaacagttgtccaaaactgtattcacttaactcttctacctgaagactgatacatggtaaacgctcactatgtgctttcaaggtcgcgcaaaaagcgctgtagtttatttcatccatgcttaagccgttcaaataatcaaactcatccttaacctcatcagcgtccaaccgtatcgctgagttctgttcccggatatccagaaatgtctcaaacagtatcggtgttccttcttggacaaactggcctatcgaatgcaaatcttcggaatactttgctgtaaccggatagagtccccggtcttctttcccttcactttctgcaaagagctgagtccaccacccataaaaatactggtatctcggttcaaacgaagcaagcatttccagcctgaaccccttttggtataataaattccgtattgccgcgtattgaaatgctgtattctcttctccataagtattatgcagctccgcttccatactccttgcccctgcagctattgaaccaatatcaataccggacactgcggccggaaagagccccacattgcacagaccggaatatctgcctccgatattatccggaaaatctaaaaatgtatatccatgagttctgcataactcatgtaatttactttctctggttccggttgcaaatatccggctcccatactctgctccataccttttcttcagatattgacgaagaattcgaaaactgataccaggctcaagtgtctcaaaattttttgcaattacattaatataaacagattttccttccagctgatttatgatatttttcatatatgccgaagatatattgtttccggcatacaggatcttcacatgaccatctccgtgcagtgcctcaataactgctctggctgcctgattcgatcctccgattccgatcaccaccagaatatctccgttctctctgaccctttccgcatgccttgtaatctccctgatattctcttcgccagcccattcatctacatggagccagccaagactctcacggtaccgctcttctccgttttgggctcttatcagaacttccattttctgattcatgtattcttttaattcctctgtttccagttgtttgcatttgtcatataataccagctgcatcgcaccgatcacctttcactttttcaaaactattttcgttttgctgtcgtataattagttttttaatttaattaaataatatcattctgtatattatttgtcaatataatttttaaattttatctatttatgacaaatccgcatcaaacgatggagtgaattctttagtacctaaataaaaaggcccggcatccatccctcatgggacctcctgccgggccaaataacgcttctgttaaattttcttataccgctcgatcatctcttccagagtcacctgctccaccagcggtgccttgccgaacgatccaaactgcacgatcagcgttcctaccacttccttcacaccgcgttccacgcagtttacgatagccgccacatcttcatccgggatggttcccttcataaccgtatccataatcggcggaaggaagacacgcgggtcaaactggctctttttcgcttccagcagctcgtaaatcccaccgatggacgcactggtacgcagttccggatattttacaaacagttccttcatgttcctcgtaactgccaggcggatatcggtatccacgttaatcttgttgatcccacagggaatggctgcctgcagttcttcaacagcgatgccataggtattcgtcagttctccgcccagggcattaatctcatctacaatatatttcggaaccgtagaggaaccgtgggatacaagcgcaccgaaaataccctcgtggcttaagcactctctgatcgccgtggcgatctcctttctcagcttcacgtcttttcccttggacgcgccgtgcatggttccgtaggagatggcaagcgcatccacgccggtcttgcggaaaaactccactgcctttaacggattcgtataggtagaggaagcggagaatacgtggtcttccacaccggccagaacccccagttccccttccacactgacgcccctggcgtgagcatattttaccacttctcttgtcagctccacattctcgtcaaacggcagtgaggagccgtcgatcatgacagaggtgtagcctcctgaaatcgccgccacgcaggaatcaaaatcgcggccgtgatctaagtgcagtacaattggaatctcagaatcggctccatatttctttacggcgtctgcaatattctttgcgccgatcttcttgtcttccagcgttgcgttcatgaaatccgtacggccgcccataaagccatttgctaaatctgctccctgtaaaatggccggtgaacgaaacatctcatgcacttcaatagccgcttttgcctgggctaccgcatttacattaaatgcgccctggccgaatccgtattttatcgtcgcctccatcagaggtcttaatggaatcaatggcattgtctttatcctctctctcttttcctgtgcagtttctgctttcactgcttttctatttttcttcttttctgtttttcttcctgctccctataccgcgtcttcccttttcagtctgtcagggccgccacatagtccgtcagcgtcagcgtaatatccggatggttctggagtaagctcaccggaaaatcggtggaaggctctccgtaagccgtacggcgcaccaccgctctgtgccagttgcggaatacacccaggcggatttttctcgcatgggcaatctcatagattccgatcgtcacgcagtaatgcggcatatcctccagcgctccgccgaaatcaccgatggcgttggccgtcctcgtctccggtgtgatagccagaaccctcgttttctgcgccagaaattcctccggtgtaagagaaggatccgcctcgttaaacgccacatggccattgatgccgatgcctccgaatgcgatatcgacaccgcccagcttctcgatcagctccggaatatagctgacattgtcaggatccgggaatacccgctgctcttccggcataattaattccggcctgatcttcgtatagacagtccgttccatgaacccatggaaacttaacgggtgatccgctggaatccattttttatcgtcgtccagatactcatccatattgataaaccaggtatccttaagacttaaattcttttcgttgaccatgtccacgaaataggggtactggccgaccgggccgaccgggcagataaataccgtcttctttccggcctggttattctcctcgatcgcctggaacatttcctttgccatcgcctgaaataccgtggcattatccggcatgcagatcagcgggagccgcggattcttcaaaagctgttctttgttgtactggtaatatgcgtgattcatctttaacctccttagaaaagagagtgtctctgaattggagataccatctccgggacactctcttcacctgtgtattacttttaacagttactgtttacttcttatttgcctgcttctatcatgttatcgatcataacgtaatcggctaccggaacttccttctcgaccacgcctgaattgataaagttatcctgctgaatcttatagtaattttctacggtaccgtctgccgctccctcggagacttcttttcctgtcagccagtccgcatcaccgcgctgtgcataaacgctgtcgtaatcagtggccgtctgtgtcgaaacatacttggcaacctcatcataatgatcgtctgccgcgtagtccatggccttaaataatgcctttgtgaaacgcaggatcttatcctgatttgcttccgcatactttggtgttgcaatccagcttgcgagggataccgtggtgtcggagaacgttaagttatcacagagctttgtggagtctttcacttcctctaaaatctttaagctgtttggagaccatgtggcgcatgcgtctacgccgccggaaatcatggcagtaacaataccggatgcatccatatccacagcagtaatatcatccatggtcataccggcctttgtcaggctgttcaccagaatgtcctcgctggaggtaccggaagagtatgcaaccttctttccctttaagtcttctactttcgtaattccagggccggcaattaaagcgtcgccgttagaaatatgagacagagcaaaaatcttcgcctgaccgttgacacagagcttatgagcgccctgaccgatgtatcccacatcgatgctgccggattccatggctgcgatgatggttggaccgtctgcgaattccacaaggtttacggtaatgccttcttcatcaaaatagcctttttcctttgccgtcatcacggaccataagcttccgtagttaggcatatatgccacattcatggtaatcggttctgccttggcttccgtaggtgcctctgttgtctcctctgcttttgtctcttccttcgtcgtctctgcctgtgccgctgtagtcgtctccgccggtgccgctgttgtcgcttctgtcttgctgcttccgcagcctgccagtgatgctgctaccagagccgccataattaatggtaatgccttcttcataatgttttcctcctttaatggttttttataaaacattttttaaactgctgttttcaaatactgccattttccttatttacgcacttccagatattcctgataaacctcgccccagatataagtctttaaatccaggaatggaagctccatcttcatctcctgcgtacgcggatatggaagattgatatccacaattttcttgatacggcccggtctcgcgctcatgataataaccttggttgccagaatgacggcctcttccacatcatgggtgatgaagaaacacgtcttcttctcttcctgccacgtctttgtcagttctgactgaagctgggttctggtctgtgcatccagcgctccgaagggttcatccatgagaagcacttccggctgtaccgcatacgctctggcgatcgccaccctctgcttcatgccgcctgacagctccttcggatatgcgtccacgaattcttccagttctaccatctttatgtacttcatggcgatttccttcgcctgtgcatcgttcattccctttaatttaaggccgaacataacattttttaatacggtcagccatgggaacaaggcgtactgctggaaaaccacgccgcgttccgttcccgttccctccaccttcttgccgtccacataaacggcgccggaggttgccggaagaaggccggcaataatattcagcagggtagatttcccgcagccggaaggaccgaccacgcagataaactcgttctccataatatccaggtcaattccatttaacgcaaccatacggcccttgcggccttcatagattttctccacatggtcgatcttaacctttatatttctctcgtttcctgccatcccgtgaacttcctttccagatatttgatgatcttttcacttgtaattccaatgataccgatgatgataatataaagaagcatcggcggaacatcgaagctgttgttcaaagaacgaattctcataccaagacctgccacggcacctgtcgactcagccgcaatcagtgttgtaagggcgacagatacgcccagacggactgctgtgatgataaacggagtcgttgccgggaaaataacctttacaaagatatctctgtcttttgctcccagaacccgcgcggccttgatcagtgtctcatccacgttgcggacgccctgataaatcgtgacgcacataattaagaaagtagccatccagataacgataacctgcggctttctgccgacgcctgcagcgataacaacaagcggtacgtatgccagaggcggaatattacgaatgaactgaatccacggttccacgatgtagcgtaccggacggtaccatgccatcagaaacgcgatcggcactgccgtaacaaagccaaggataaatcccagaataacagaaatcatactgctggagaagtcgttccacaaaacgcccctctcaatcatggttttcagtgatttgacaacctccggcagaaacggaaagcttcttgcggtggatggattgaccgacagccagaaccagagcgcgatggcaaccataaacgatataagcagccagccccagtttggtattgcggcaacgatgtccttcttctttttgttttcagaattaccaaaagacattttgtaaatcccctttctttgtgattttccccaatacacatatcttttttatgtgtatattataacacattgtataaatttatcacctcttatttagtcaaacgtttgcgtaactgaaaagataaaacttcacgcaaacgtttgaccattcacctatggtattttgccggtttttcgtgtatacttatgataaactggcatttataataaggatgcaaaacgcaaggaaagggggctggtttatgacactcaaagacatcgccagagaagccggcgtatccatctccacggtttcccgggttatcaataaaaacagcacaaatgccgccagcaaagaggtgcaggaccgcatctgggagattgtacggcgcacgggatatacccccaacagcacggcccgcgatttgaagatggggggctccgaatccccggaaccgctctcccgctcgattgcgtgcctgtttgcccggaccgaagattccaagtccgatctctttttttccacgctggcacgcagtatcgagcaggaggcatttaagcataactatgtgctcaaatactcttttacagcgattgacattcatcaccccaacacctttcgtctcattacggacaaccatgtagacggtgtggtcgtgctgggacggtgtgacaagcagactctgagctttttaaaaaaatactttaactgcgttgcctacaccggtctcaatattctggatgccaaatacgatcaggtcatcagcgacggataccaggcctctctgaccgctgtgaatcacctgatgggcctcggacacaccagaatcggatatattggtgagactcaggacgaggaccgctacaccggatactgcaccgccttaaatacaggagggattgcattaaaaaaagaatacgtggcaaacgtccccctgtcctcagaaggcggctaccgcggcgccaggcagctgatcgaccgcggcgtggacgtgtctgcgctcttctgcagtaatgatgtgacggccattggagccatgagggccatacaggaaaccggctgccggattccggaggatgtatccatcatcagcattgatgatatcgatacggcccagtacctgtcccccatgctgaccaccattcacatgccggtggaggagatgggacagatgactgcgaagatcctgattgaccgtatcgagggcggccaccgccttcctatccgcatgaatctgccgtattatcttgccagccgtgaaagctgctgtcagtaccatccttccaggaacctgacagcgtcaagagacaccaccaataagaaataatgaataatatatcgaagaaaagaggtaaatcttatgcttgtaacgatctttgattccaacggatccgctgtcatcgacagcattggcgcccagttaatctcctataaggacagcactggaaaagaaaccatctggcagagggatccgaaattctggaaccgctgctccccgcttttgttccccatcgtaggcaactgccggaacaacaaaaccatcattgagggaaagacttactgtatcgaaaaacacggcttctgccgtgacgtggattttcaggttaccaggcagtccgatactgcggttacatttgaaattcacgatacggaagagacgaaggccgtttatccttactccttttccctctccttaacttatgtcatggaaaacggcatgctttccatggaataccgcgttgccaacacggatgacagaaccatatactactgcatcggtgcccaccccggatttaactgtccgatggaggaaggtgcctccttcaacgattatgagctcgtatttgaagaggacgaaaccgtatccagcatggtctacgatctggagaatctgcagttcgacccgtcccacagaattccccgtctggaccacagccgcaggctgccgcttacgagggagatgttcaaggacgacgccgtatattttgacgacttgaaatccaggaaagtatccataatccataaagattccggtcatgggattgaagtcggattcccaggtttcgatacggttgcattctggacgccttacccggcagaagccccgttcctgtgtgttgaaccgtggaacggttccggtgtctatgccacagaagacgacgaattcgtacataaaaaccatgttcagaagctggaagccggaaagagcaaaacttacggccttaccatacgaatgatctgattcaaataattccgattgccccaacaaatacagaaaaccggaatcatctggaagatacagcttaactctttcgctgtctcctccggctgatcccggttttcatttattttctatcatacgacactgaaattttcctgggcaaacttccggtacttttccataaataattttctgcggctgctgctgatatacagcttctcgccgtttgccatatgaatttcatccccctccatactgcgtatctgcagcatattaatcagattatactgattaatgcgtacaaaatggtaactggaaagccgctgttcttcaacatcgagcctggcctttacccttatctttttcttacccagcactaaactggtctttctgtcataggattccagaaaacagatatcatccatgttgtaaaccataggctgtccgttaaatacggccgtatactttgcacgggccagttttttccattgatcttttcttccgcagatataaataattaaactgtccttttccttctgcttcagctgcttaaatttgcactcctttgccgtccagtcctcatctgcgtagacaatgatggcatgataatttttttcctccacggcacttaacaagtcagccggggataagaaatagtcttcgtttatcagaacccctcttcttttccatttttcaaaatatgctcttgcattatccagctgtgacgtattgtctgcgtacaccgctatcttcatgcacgctacctccgtaatttcctgatatcatataattttgagatctcatattatataacgttattttcttaagtctgtgacgtccgcagcagaatattctatatactgcgcataaatataacaaaactcctcaaactaatatcagtcacgtttgcgaaaggagatatctatggaaaaagataaaaacacagtcagccagcccgatgattttgatgttgatatccaggcgtgttctaccatggactgcaccggtctcatccctgccctgccggaaacagaggcggaaaaagaagcttatgaggacttatatccttacatcacgcatgcgaagaactgcgcggatgacaaataaagatccggaatcacgaaatcccccgaaaggcgttccgcgcacttttcgggggatttgattcttctgtcctgtacaaaatggttttatactcctgaataagcggagaatccgccgtcaaccggaataaccacacctgtaataaagcccgcagcctcattatttaacaaaaacagcagtgttccgtttaactcttccgcctcgccgaaccgtcccatcggagttgccgccaggatcttggctgttctggctgtaggcgttccgtcatcgttaaacagaagcttctcattctgtttcgtcacgaagaagcccggagccatggcgtttacacggatgcccaccctggagaaatgaacagccagccactgggtaaagttgctcacagccgcctttgcaccgctgtaggccgggatctttgtcagtggggtaaatgcgttcatggaggaaacgtttaagatgttgcagccttctctgccgatcatatcttttgcaaaaatctgtgtcggaagcagggttcctaagaagtttaagttaaacacaaattccacacccttcggatccaggtcgaagaaggagatggtatctgcctcgatgtcacccatctcgaaatactccttcgttgtctgtgccttcggattgttgccgcctgcaccgtttaccagtatgtcacacggtcccagctcagccagtacccttgcgtgaacctcttccaggctctcgcgttccagaacatttgccttataagcctttgccgtatggcctgctgccacgatgtcgtccgcaaccttaccggcagcctcttcatttaagtcgagaaccgcaacctttgcgcctgccaaagccagagtctttgcaaacatgccgcataatactccgcccgctcctgtcaccactgcaacttttcctgttaaatccgttccgaatgataatcccataagtcatttccctctttctttttattcttaattttatttgctcatcttctcaattgcttcccacagtccgtttaaatacgtagcacccagcgctctgtcatacagaccgtagcctgcgcgtcccgtctctccccagatcatccgtccgtgatccgggcgcatatatccgtcgaagccattgtcataaagcgcctttaatatggcaaacatatcaagggaaccacagcttgacaagtgtgctctctcttcaaagcctttattgtcttccagaaccgccacgttcctcgcatgtacaaaatggattcttcccatagccgcgtatttggctgccatcttcaccacatcgtttttattggagcagccgagagaaccggtacagagggtaattccgttgtgtctgtcgtctacaagctttaagaaacggtccagattctcctcacacgtaatgattctcggaaggccgaagatgctccagcatggatcatcctcatgaatcgccatgtttacatcacactccgcagctaccggaatgatggcttccaggaagtattttaagtgattccataagtcatcctcagacatggcgttgtactcggataccacctgtttcagtccgtctctcgtataactggaatcccagcccggaagcgttaaatcgctgtcgctctcaagaggattgaccttgtctacctgatcctgataatatacaagcgaggtggaaccgtcagccagttcatggtccagctgtgttcttgtccagtcgaataccggcatgaaattgtaacagatgcatttgatgcccgcttctgcaacgcggcggatattttcacagtaattggcgatatactggtctctcgatggctttcccagcttgatgtcctcgtgaaccggaatgctctcgattacctcgaaggccagcccggcgtcctcagtttcctttttcagcttcgcgatgctctcccggctccatacttctccgaccgggacgtcgtacacagccgtcacgatggaatgcatgcccggaatctgtcggatctgcttaagcgttaccttgtcatcgtctccataccatctgaatgataatttcatgataaacctccttgggattaaaaaatggtttcgttcccggcagcctgtcgttcctctgcctcatggtcttagtataacaaattctgtttcgaataccatggatttaattgccgttcacattgcaaaagttgcggttctctattataatgggatataactgaagcggctttggaggttatgagatgaaaaaagaactgtctaccggctttaatgccaggcaatatatgaattcaggagaatttgaggtatttttttacaatgatatcgatctggatcatgttgtggatcacacgcatccctattatgagatctattttttcttaaatggggacgtgacctacgaagtggacggaaaccggtatgagctgcagtacggcgactatctgatgatccctccggagacgaggcaccaccccatctttcattccaccggacaggattaccgcaggttcgtgctctggatcagccgcccctattatgacgctctgacggccagatctgaagatttcgcctacagcttccgccatgtggcagagaagaagcagtaccatttccgcacggatttcattacatttcaggagcttcagggacgtcttctcgacatgattgaggaaatgagaggaagcaaaccgtttcgcgggacatccgcccacttgatggtctgttccttcctgctccatttaaacaggatcacctacgattccctgcaccaggttcccgcggtatatgagaatgtactctatttaaatgtctgcgattatatcaacaaccatttggacgaggatctctcccttgaccatctggcatcgtttttctatgccagcaaataccatatttcccatgtgtttaaggataatatgggcatctccctgcatcagtacattctgaagaaacgtctccaggcaagcaaaaatggaatcctgtcggggattccatttaatgagttgtaccatcaatacggtttttcagattatacaagcttttaccgggcgtttaaaaaggagttcggtctctcaccgaaggaattcagggagcagaggtcccttccggaaggctattgaacggctttctcccaccggtccccggtccgcacatacgtcacgctgcttccatctttttgtgtcagcagaacagagtctgtctccggtccccagctgatggaagctaaatccttcaccaggtacagatcagggcactgatagatggtgccgccattttccgcatcccggatcgtgaaacccgcatagacctttcccagcagcgtcttcgtctcagaggtcagtaaaagtccgttctgctcctccgccgtcgtctcaaattctgtcgcctcgctgctgcggtacgtgtggtattcatcatagatgttcatgcctatgatgacgcctgccaccgccagaaccgccatgaccgccagtatcaccggaagccgtctcttatgaacggccccatacgtttttacaatctttgattttttgttcatcggaacactccctgtaccagcaccatgtagatcacggtccccgccccgatgctcagaagcgaattgcctttccagatgtgaagtaacacgatcgctgcaactgataggatctccggcagcgcatgcggccaggaaaccaaattaacgccttttaaacagtataccaccaaaagcccgattgtagcatagggaagtgttgttcccagaaaactgatgtatttcggagttttcttccctgccggaaagagtataaaaggaaggaatctcgtgagcagtgtggccgcagccatcacaacgattatcacgattccctgtatggtatgtccgctcatgccccggtctcctttccattctttttgtaatcccatgtaatcgcggccagaatcagaatcatggccggtatgataaatgcgctctggccgaatattacgacacagagtgccgatgccgccactccggtcagcgcggctttatgaccgtgacccgacttccactggtccacaaatatgacgacaaacaacgcagtcagcgcgaaatccagtcctgtggtgttaaacgtaatcagacttcccaacagcactccgacgacggttcccgccacccagtagcactgatcgagaatggagatccagaaacagacccagtatctcggaatactcttcggcggctcctcatggcagacaatggaaaatgtctcatccgtcagtgcaaagatcagatacggcttcagtctcccggcatcccggtacttgtccagcatggaaaggccgtaaaaaagatgtctggcgttcagcatcagcgacataaaaaacgcgtacacaggattgaccattgcagtcaaaaatgtaattcccagatactgtaagcttcccgcgtagacaaacacgctgatggcgagagcccaccagataccaaaaccgctgatattcattaagattccataggcggctcccagaaccagatatcccgccatcaccggcaccgttctgggaaacgcgtatttcagtgctcttattctctcctgattttccatgtgtcatcacctgttcacttgctttttttatctatattgtttactatattaaagtagaaaagtatttttgtcaaattttttcatttgagccgtacacaggctcaaaatgcagattatgaagaaacaggaggtttgcaatggatttcacttcccaatatgattcctgcagtctttgtcccagaagctgtatggtgaaccgccgggtgccgggtgtgaagggcttctgcggctgcggcgatactgtcatggcagcccgggcggcccttcatcagtgggaggagccgtggatcagcggaatccacggaagcggcacggtatttttcaccggctgtactcttcgctgctgcttctgccagaattatcccatcagccaggaggggctgggaaaggagatttccatccggcagcttggcgatatctttctgcgccttcaggatgagggtgctcacaatatcaatctcgtcaccgccacccagtatcttccctccatcgtctccgcgttggactttgtaaagtacagactgtccatccctgtggtctataactgcggcggctatgaacgggtggagacagtaaaggcccttaacggctacgtggatatctggcttcccgatttaaaatactacagttcccggctctctgcctgctacagcaaggcgccggactattttgaaaaagcttcggctgccattttacagatgatccggcagaccggaacacccgaattcatctcctttcaggatacggaagatcctgaggcccccgcctgcaccctgatgaaaaagggcgtcatcatacgccacatggtgctgcccggggccagggaggattccatctttttgctgcactggatgaaggaacaccttccggaagggcaatacaacgtgagcctgatgagccagtacaccccgttttataacagcggcagtttcccggagatcaaccgccgaattacatcgtatgagtactataaggtcgttgataccgccatcgagctgggacttgtccatgggtttatgcaggaaaaaagcagcgcaaaggaggaatatacgccaccgtttgatttggaagggctggagtaggctgtttttataagattatgtacataatcgagtaggagggagtgattaactcccgtcctctcacaccaccgtgcataccgttcggtacacggcggtttcaacagttgacgtgcacggactgataggctgtggctaaatcataatagccactgtttatcagtctttcttttgtcattgccatatttaccgctaccgtttgtgtggtaaaccaatagcctcttcggctgttccctgccttccatgccaattctttcggcactcccattttcagcaggttcttcaccttcgttttcggtttcttccattgtttccatatacacattcggattctgtgatatagccattggttcagtccctctattcggttcttcatatctgctactccataataattcagccagccccgcatatacacctttatcttttctaacgatgggcgtatgctctgaacagaccttcgggaactaaggtctttcagttttgacttcattttcttccatgacttcccatgaacccggacataaatgccctttccgttctttcccaatgtgaagccaaggaacttaaaatttcggattgcaaatacacttactacacggcttttcttctggttcacctgcaatttcagcgtcccttccagatatttcgtgcttgtttccagaagtctctttgcggctctctcacttttagctaacaatactatatcatctgcgtaacgtacaaaagccactcctcgtttctcgtactcctggtcgaactcgttcagatagacatttgccagcagcggggatagatttcctccttgcggcgatccttcctctgtctccatgactacaccgttttccatgacaccactctttaggtatctctttatccattggataaccctttcatcctttacatctctgcgcaggatatttaatagcatttcttggttcagagtatcaaagtatttcgacaggtccaatgcaacggcatgggtgtatccctgttctgcatactcttttacctttaaaatggcgtccctggcgcttcttcccggccgatacccatagctgttctccgagaacagcgcctcatagactggcattaactgctgtcctatggcttgctggaagatacggtctttcacggttggaatgcccaactttcgcactcctctctctggcttgggaatctctactcgtcttactgggtcgggggtgtattttccccttttgattctctctatcagttccttttgattttccctcaggcagtcacctgtttcctctacggtcattccgtcgattcccggcgctcccttattcgcctttactctcttaaaagctctgtttaagttgtccttattcagtatcttctctaagagttccggctgtgcactgtctctttccttccatatccggcggaaagaacggtgcgctctcacatacccttcacgttccgcgctgtctctttgtgagcagctatctttgttttctgtacccaatgttctttcctcctttcccggttgtactaaagactcctgttgattcggtccttcatctctcgactactacgacctcggctgacttctgtacgttcagcactatctcacgatagtggttatccctttcaggacattccgcacagacctccccgggtaccacacgtttctttctctccatctatctgccacatttaccatacatgattctgtgtagttattgggctttgacttgttgtgcagtcttaccctcatgtatagcctgatgtgatttctgttcgtcagaccagagatttgcccatgggttagtatgttccccatatccagcttccttcagattccacctcacgatggacacccttgccttcggctatatccttcccaccaccgggcggattccggacttgcaccggttagaaacgtgcgccgccgggcgcacacacagacacagccccggacggttcaacgtccggggcataatattttgcacagctattctcccaaaatctacagctcccttcgaaggaaccgaactccctcaaccggttccacaccaactgccgtaccattcaccagaaattcctccgcatcccttacccgcatttcaccgtactgcacatctgcgaatgcaatgctgcggtccccgtcccattcgatatccatctcttttaaattctcctgaaacacctcgaagcttccaaattcctccttcgacccgcattttacgatcacagcatggttcaatccttctgatatcagctcttttttcgtgttggcaccatatgcagccatctcgtacccgttggaaaaccagcagcccagatatccgtcaccggatttggcaaaaaaccagtttccgccgcagacatacgcttcatactcatagaccggcgtataggcatgaatataatgcaccagttcatcaggatcgatagcgaacagcataaccgttacattgcagtaccgctcaatccacggcatcgttccgttgcccgcccaatagctgggacggttttctccgctgaaaacccgctctccgggatgattaacatagaaaatcgccggacgttcttttccgaataccacattcatcagatgctgctgatggccatggcggaatggtttaaaccttctgactcctgccgttaagtactctcctgtccggtaagtatgaatctttactcccgcgattccctgatccatttccatcaccacaccctggcccggctggggcctgcactccatttcatagtcctccggctcgtaatcgctgatcgcgtacagacatgtggcattgccgtaataggtacagaagccccgcccggcagacacccagctcacaaaattcggttcaacctggagccgcgtcttgatagtttcttcgtaaattcttccataggtggtattcatcacaccttcaaaagagttatatccgatgatctgcatggtaaaatccagtgctttttctgctttctgccggatttccccatcaggagcgcttaagtacaggctgaaaaagccaatcagatcgataggaatgtaggttgctgaattccactccgcatacccatagctgaaaaagctgtcaaaccattccaacacccttttccttccgatttcgtactgctctgctcccgtcctgccgctgacggtaaatagttctttctcgaaaacagatccccagagatactgggaaacatggaacagaaaggcatgattttcgctgaaataccacatcacatcatttcccggttcatcaatccagtaccggaagttcagcaccatatctctgatccgttccaacttttccggtgtcaggagatgcttatagcgggtcatcaaaaggctaaagggggcgaggctgaaatcggcacagtcatcatggcgctcgatctttttacatgccatatcaaaccctttttctgcattgtcattccagccctttaagagttccagcgaagtaatcacagactgaaaaccgatctcaccgttctttaccaggaattccagagcctgctgcttcctctccccaatcgttccagccggttccagtacaatccgttttttcgggatcacaccgacaaataaattgcgcggtattacatagccccctactgtcaaacagacggagattcgcgaaagcctgatactgcttttctctgtctctgcaaccaccaggtaatccttatcttttttcagtgtcatcaccgtatgttctatttcggagagctgcattccggttccacagggagttgaagtcaagtacacagttgtatcgccgtctaaaagcgtccggtcgtaacaaagcctgacctctccttccgtgtacatatcctgctcaaaataacagctttttaaaatctgctccgctttttggatcttctcaggctgctctgtcacttccacactgccttccactggcgttacacccttataccgcagttcaaaatagaaaaaaacgtcccgttccgccagctcatctgcgtaaaccttaatttcattgagtcccttcctcagagaaagattcacccgggtatggcccgcaatgtttctggtatatggcgtatagcaggcctgttcctctccgttcacccacacccggactccgccgcaggtatagatctcaaatggatagcatccctcttcctgcacacgcactcccgccttcgcatgaacgtaaatgtactggggtgtgtgaaaaaatgtggataaatcaattctgttattctcaaatggaaaataaagactttcatatgatccgtcataccggaccgccttcctgatcctttcttcctttaaaaaggcttccctgaccggatacaccacctgaacataagattcctccatgttcactccagcctcaaaggttttcttcggggaatggaacggttctttccccatggctgtcacattccatctgctgattgtctcatcatatccgatctgatacgttaattccatgatttttctcccttaatacagcactgggatatgaaagaagctttcatatcccatgtggttgatgataaatattccaattgcctgtcaatcctgattactcatgaactccagtaagattttccaggtactgggtcactacatagtccattacgccgtctgcgtcaagttcaccggcgatagccctgtcaagtgcatcacgcagtgcatttcctacactctcgccgctgtgctcctgatctgtaatagactgatcatactgagtctgaccgatagactctgcgatctccgtgttgaaaacgttgattccttcaatatcgtagctaacctctacatccttggttcccggcagatagtttcctgtctggcagtagagagcataattttccggctggtagaaccactccagaaacatctttgcctgatcctccacaccggagccatcaaacgcatacagccagttgccgcccagacacgttgctttttccttctcatatggcatgagtacaggcgtccattcgaaatccttgatattctgggcataatcagaaataacccagttgcctgccatgtgtgccgctacagttcccgtcttaaatacatcctgcgcattctcagcaccggttccgatcgatgcctttgagatacctccatctttgaacatatcgaggaagaattcaattcccttctttgtatcatcgcttctgaaggctaccctcgttgaatcggcaggatcgaaatactgcatgccaaactgatatagcatggttcctgaacgctgctgagagtgatcaatcacgaaaggagtggtaatcttctcattcttttcagcaacttccttcactgccgcttcaaactcgtcccacgtccaacgatcctccgatgcggtgggataagatactcccgctgcctcaaacgccgtcttattgataatcatacctactgccgtatcgtttacacccgtaccataaagcttgccgtttctgacaccgtttcggttaaagttatccggattcagggaagtatcatcgagcggaagcacataatcaatatacgtatcgaagttggacatcttgcagattgcgggcaggtttcctgcctttgcacggttcttgatctgcgtctccatatcagcgtacgcaatctcattgacaaatgcggtcacaccctggtctttatgctcctcgttaaacttctcgacgatggtcttcatcgccccgccttccagcgtatcgtcggcgagcagaatctccagttccacctcccctttctttgcagactccttaccggagcatgctgtaagcatggtcattcctgccagtgataaacacactgcgcctgtcagtaatctttttttcatgaatctttcctcctgattttataatataatttgttgattttctcatgtcctcttacttctgtcagcagctttccgccgcggttattctgttaccccttaacaccggacgacatattcgcattcataatctgcttattaaagacgataaatacaataagaatcggaatcatggaaagcactgccgtcgaaagcagaaccgtccagttgaccgcctccgcaccggacagcgtcctgagtgccagctgaagtgtgtattttttaggatcgctgagtgcaagcagcggccagatgtagtcattccatctccactgaaaactgaagatcgccagaatcgctatctgcggtttacagatcggaagcataattctcacgaaaatggagccttcgttggcaccgtcgattcgcgctgattccataagttctgtcggtacagtgatgaagaactgcctcattaaaaatacaccagtcatggttcctacggtcggtatgatacacccccagaggctgttgtaaagaccgagagtattcagcacagtgaagctcggactcataatgacctcggtcggaagcatggtagttgcaagcagacacataaacagcacattcagccatttatacttatattttgccagtgcatatccgcacatacagctcattaaaacagtaataaccgtggcggctactgtaataaatgcagtattgctggtgtatcggattaagtcaaactgctgcagcgcagtcgtataattctccagtgtaaagtgctccggcagaatggtcaatggataattgaataattccgaaccgtccttgaaggagctgataatcagccatatgaccgggaaaatccagagaatggcgaaaccaaatgcaaacacatattttaaaactttatttacagttttcacgtttctcctcctccctaatcattactcttgtcgctgacctttgtctgtacaaacgaaaggatcagcaggattacaaacagcaccatggaaacggcgctcgcgtatccaactttattcttcgtaaatccggttgtgtagatatactgaatcatgtatgtcgtggccgtgcccggccctccgttcgtaagggtctgcaccatggcaaacactttgaacgatgagatcacggaaagaatgatgaccatgaaggataccggttttaaatgaggcagaataatatttttaaacgtctgccatttatttgctccgtccagattcgccgcctccagcagttctccgggaacctgcttgagtgcaccgatgaagatcagcatgtttgttccgcatccagaccagattcccgcaataattgtggtaataaaagcggctgtcgggtttgtcgcccacttgattccatccagtccgatacactgaagcagatagttgatcagtccaaaactctctccgaagatccatctccaggtgagaccgaccatgattgtggaaagaaggatcggccagtagatcagaattctcagaatggtaattccctttatcttctcagaggagagcaaaagtcccagtcccagcgccaccgcgtagccgagaggaacggacacaatggaataaaggattgtctgccacagggtcttatagaattccggatccctaaacagcttcatgtaattgctcagcccgacgaaatccatctgtttaaacccgttgtaattagttaacgagtaccagacacccacgatcgcaggcgctacgaagaacaccagaaagaacaggatattgggcagacagaaaccaaatgcccaaagctgacgcgtgtcccttttctttctcctggcaggcgccggcaccgccgtattcgtatttgccattattttacctcccttgtcagttcttttctcgcttcaatcagatacaggatcgccatcgcctgtccgtaaggcatcgggcggatctcaatatccttataaaattgtttcccgtctcttcccatcggggttccgtaggatacctgtcctaccacaccatcgccgctgatgtaatccatcacagcttctaacggcttcattccacattctgcaaatgattcgtcaatcagtcccatgtgagcagctttcagcattccgtatgcaaatcccgtcgttgcactggtctccagataggaatcactgtcgtcgatcagcgtatgccacattccgttgtccgcctgataggttttcagggcttccacctgattcatcagggcctcagttaaaagcctcttaatcaccggctcgcagtcagctcccagtatctcaatcagttccggaattgcgatcgttacccagctgttgccccttccccagagtccttcggcgaaattgtgtctgcccttgaaggtccatccatgaaaccacagccctgttttccgatcctccagatattttttgtggagttcaaactggtactgagcctcctcgatgcacgatctgtcattcatcagttttcccattctggcaataaagagaatggtcatgaacagggtgtcatcccagagctcctgttcatttaaagtatcagaggtcagatgctggaatccgccctcctccgtcctcggaagctctgttaaaacctttttcagccagtctctgcaggtctcccagtaggtctcattctttgtgtagtcataaagatatgtaagtgtcagcatcggtgccgtcgtgttgatgttgcaggatggaaggccatcggcgatccgctcatcgtaataccgtttcagcatggcaagcgccttctcgtcccgattttcctcaaactgtttccagagtccaaacagtccgactccctgtgtccattcccagaatcggtatttctgtacgtcgtctcccgccagattatcggttttcatgttctgaaggaagatgtcatcatcatcgtaaagaaccttttcaaatccattgataaggcactccagtttttctgcaatttcctccaaaagcatgtctttcttttcttccagactatttttcatcatcatctcgctgtctccttaaactatctatattatatagccaatcattctggcaagctatgcaattattgttagaaatagagtaaaagtattgcatatcttgctcaaagcgactattatgaatgttttacgctgattttaaatactttatcaagcggcgtatactcattgcagtacaccgtaaagccggaggtattgacttcttctccggaataatgtcctttaaactcatggcttccaaaccccggacccatgacaagttctctgtccgtttccttcacctgcaaatatccgtttctcaggatcatgccgcttccagcctctgccttcatataaaaatgttcattctctatggttgtccccgcagggataccgatctccaggcggagaggaagcccttttaagccgtccgcctttacatgcagttcgagtccctcgtcacgctctctgatctccagtctcgtgatcagcctttccggaagcagtttcttccgctttgactggtccatctcccaccagtcagaggtaccctgaggctcgtcaaagggaagataataccaggagtcaaacgcttcgctcaacacacagccatgatcgttcacctccattgtcttcggtataaaattccgcttctcacagcagctttcaccgatcttcacacagaccgccgtactgcccgccttaaaaaacagaaatgaactttttccatttaaaaccgtataggtatacttctccttttttaccctgagaactcccgaatgcttaaagtatttccggtacgattccacaaatccgtacccttggaattcatgattcatcatctcatcatgtgtcataagaacagggaagcagtccggcgcaatatcaccgcgctccatattatccctgatgatcttatgggccgctgcgtcaaaaaccccgtcgtcccccaggcacgcagcgtataaatactgataaaaatacttgtccgcatattcagctctccccttatcctgtcgggaggaattctgtgtgaaaatagtatcatccggatcgatatagagcagcatcatcttcagattttttctcgcataatcgtagtacaattcttctccggtctcctgtccaatggcaaacatggcgttattgacaacagcgttgtaatttccggtggaacgctcagcgtactcaccgtcctcatcctcatcgactccctcagccagatactgagctacccgttttcttaagctgtctgcaaaatccgtctcctccgcaaataagtcagctccctgcaggagtgccgcggtaattccccatctgtgattcggcgtgtggaatccaccgtctcggactgcctttaacgcatcatgcatgattacaagatattttttcttcagtgtctccgccttttcatcaccgtttccatatttatcgatcagacggtagcccagaatcagtcttttaaagcagaaggaagtgtcggcagcagactgaaaattacaggtagggtaatcaaatgacccattttcccgctgcattcttctgacgaaaccgcaggccatattgatcgcatcgtacagtacttcgctctgatagaaccggctctcttccttaaaatagaccgacagcgccgtcgccatatggtagatggtcgtctttgcctccaccacatcaccgtgcatacctccatactggatactctccggattcttgtcctgacttcttaaaaagctttctgtcctgatctcggcacctttcatcagatggtttatataacgtttcatctcgcattcctccaaatattattttgcagtaccatataactgatataaaatccggccatgcagaccggcagtatcataaagcttaaccggtatccgatcactcccgtgatcactccgaagagcaggttaaacacaatatccgcgaccgtcgccacactgataatcgctcctgttctggtcgccgcgacctccgtcgggtaaatctgctgtatcagcagcaccatagtgggataaagtacggagattgccagaccggaaatgcttaagagcaggattcccttctccccggtcaggatccccgcgcaaaacagcagagtaccaatcattccaaagattcggatacttttcaccgttcccaatttctgaaccacaggagcaaagatcagccttccggccgtcattccgccccagaacagggataagtagaccgaagccttgccgccgggaaccgagaatgcctggatacagtatgaaaaaagccagttcatgattccatgctctccgataaagtaaaagccgatcatgatacacaggagtataaataccgcctttccaggattctgcttcatcttcccttctttcgactgcgtcatttcactctgctgtcccttaaagggaacagcttttgacggatttcctttctcctttttttctccatccagcggagtcagaaggagaagggctccagccgcgactccgatcagcagcagaagcagacttactcccttaaatccagaataactgaggccataccgtcccagtacaaactgactgccgctggttcctattccctgaatgaagaagaatatatttaccataagtcccgcatatccgctaaaaaccaccggcgttaaaatattgactgtggtatttagaagtgtagatgctcccagcgcaaaaaacatggagatcagaatacagggatagctgccagacaccacatttaaaagcatggaaagtacccagattccggtcactgacagcgccaccgtctttcgtccaaacgtatcgagaagctttccgcccagactcagaaacaacaggtttcccacatagctgatggtaacaatcatggacagctggggatcgctcagcgcataccggttctgaaacacgggggcgaatatccctctgagagaatcgctggagcccagcccgaacatcagaaccgcaaaacacaaaaatggaactgcttttttccacattttcattcgtttatccataccctctcgttttttctatcttttttatttcatagtagagtatagaggaaacaccagacaatatctattcccttcttgctctttttttcatttttatattacatattttgcttttttgcatgatttgtagtaaaatagaactacaagaaaaggagaatttttatgatgaaaccataccctgattccgtcttaaactacgaaaaggggttttcaatcatcatcaatgaattgaaaaccccggtggaaaattccatctgctattattttgattacgatgcgcgttcttactccgtaaacatggaattcccgcatatgcacatgttttatgagattatgattcttttgagtccgaaggcatatcattttatcgctggaaaaccatactccattatcaacaatgacatcgttctgctggctccggccattttacatcagacggagtacttacccggacctcccagcgaccggatcattatcaatttcatggttcccaagcatcttctgcttcatccgggaggatatgacaccattctttctgtctttaacgatcctgtcccgattttccgttttgacttagagcgccagaaaacgctgttccagatcatcaaccagcttacggacctaagccgtaccacagaagatcccgccgtcagaaatatgatgatccataacaaattcacggaattcatgttcacgctctatcagatgcggaaagaaaatctctatgaagaatacaattccgagagaagcatcaaagaaaagatatataccatcaccaactacatacagacgcactatcatgaagatctttcactggcgtacttagctgacaaattttttatcagctccttctacttatcccaccagttcaagctggtgaccggattcaccgtcgtgcagtacatccagcagacccgcgtcaaaaacgcccagtacctcctgctgaataccagcttaaagatcaccgacatcgccgaaaaaatcggattttccagcttttcgcagtttaaccgcgtgttccacagattctgcagcatgtcgccgtctgaatataagaccttttataatcagaatgccatgcgggtgaatgcgccgatgatgtctgcgaagagtaatctctgagaaagaatcccgcaatcgggattcaccgcctgcggcggggcgcttaatctggacgttacctctgacatggcatatctggatctccttccgcacccggaagcattttttctccccggatccatgcttcatctacacatacatatttaatgcagcggcggttaccaaagctgtaggccgcatggatttttccgtcctttgactgcatcataaccggatattcatatcggcggttattgatgtcgttaaattctcctacaaatccttcccccagctctataatccgtttatagggccacgtctttccgccgtcatcggaaacagcaaaggtaaccggacagcgctgattcggccagactgtcttttctgtatcatcgttaaatttcaccggattgtaaattatggccagactgccactctgtaatttcatcgaggaaatggaagaattattgtttggaagacaggttggtaccgggcttgtccatgtatctccgtaatcctcactgtacgcaatataaatataatccgcaaagcggcttctaaacagagcagtcagcttccctggagcagtttctatcagattggcatggacacggccggcgctgttggggatctctgtctcacgccaggtttttccctcatcgtccgaaatctgtaccaccgtgatatcactgccgtttcttgattcatcaggaaagcagatccagtttccgaacacccaccttccattggataaaatctgaattttctgacggcagaaggaacctggtctggcaaacatggtctccgtaggtccccaggtatatccgttatccttagatatttttcttcgtatttcagccgtatactgcagattaaaattcggattgtcatccgacgtccgagaagtctgcgccgtatacatcaaccagatctccccgttaggtgctgcgaaaagggaaggattctgttctgatcgggacggatcatccgagacgatctcccccacactccatctgctctctcctgcctttaatctggacacggcaatgctgatgtccgcgtttccctcatcactccctgcaaaccagcaggccagcaagtcaccgtcaggcagctccagaagatccgccgcatgcacactgtcaaactgattgggaatcagcgcctctatcgtatccagcagattattgtgatataatctgccatcttcttctaaacagttcagttccacatattctctcatagctttgtcctcactctcaaaacctgcaggcacagctgctgcccgcggcttccatttattgttcttaaccctttaccgccccaatcataataccttttttaaagtatttctgtacaaaagggtacaccatgacgattggcagcatcgatataaagatggccgctgcctttaaattctgctgattcaatgtaatgccatttaaaataacatttttaaaggccgtactcgttcctgcatccgctattactacttccttcaacacctgctgaatcaccttaaaattatccgtcttgagataaatctgtgggatcagatactgattccatatcgataccgcataaaaggttccaatggttgccataattgtcttcgacagaggaaaatacagtctggtcagaatcgtccagtcatttgctccgtctaccacagcagcttcctccagttcccccggaattccttcaataaaggtttttgtgataatcaaaaactgcgtattgatggcacccggaataatcattacccatggattatcaataaatcccagtttattataaataatatactgcggaataattcctgcatcaaagacccatgtaataatgaatgctcccatcaggaagtatctgcccttcagccggggtctggaaagtgcgtaagccgtcacataggttgtcagtattgcaacaattgttcctcccaaagtatacagaaatgaatttctcaggccagtccatacatgaaactttgtacttcccataatatatttaaaagcctcaaaattaaatccctttggaagaaaggtgacctcccctctctggagatacgttccgttgctacatgccacaaaaaaaacatacaggaaaggatagatacagatcactgctaccagcaacaggattatattattaacaatatcaaaaacctgcactttttttcttttcatacttgagttctcctttcctaaaatagtcttgtctctgcaaaccgatccgccattttgttcacgaaagtaaccatgacaaaagcaattacagactttagtatattcactgctgttccatagctgtaatcaggaaatccttttgactcaaacgcgattctgtatacataagtctgaataacgtcggccgtatcataaacactgctgttgtacatcaaaagaatacgatccagattaactgtgaaaatatttcctacactgataatcagcatgactataatggaagttgaaatacagggcagtgtaattcgcagcattttatcccaccggttggcaccatccacttctgccgcctcatataaagaaggatcgatattcatcattgcagcaatataaatgattgcggagtaaccaaatgtctgccatatttccaaaattacatacagcggccggaaccagccgggtttggccataaaattgacagagctgcctcccagactcctgattatgttatttacaattcccgagctcggagaaaggatggtatagaggatactgaccatgactgccgccgaaataaaatagggaagaaaacttaaagactgcaccgtggaccgaacccacttctgcctgatttcatttaaaaacagcgaaaaaataattggaatcgggaatacgacaacaatagtcagtacagccagtataatggtattcataaaaactttgggtatatagggatctgtgaaaatccgcttaaaattatccagtccaacccacttacttcccgttatcccctgaaaggcgctaaacttttcaaaggcgattaccatgcctccaaccggtcctattttaaacaggataagacttagaaggccgggaagcagcagcagatataaaatccagtttctcctcatatcctttacaaacctttgtgataaacttccttttttctgccggggcggcaaagccgccccttcttttctctttccagccatcctgatctcctttcaaaacttagttatcgaatgttgcccgataagcatccagctgaatctcttcaattctggacagcccaagactgttcatctcgtcctggaaggccttccatgtatctgcattgaactctttatttcctgttacaaaagatacaataccggcaatttcagcatcaaacaccgtagcaaccagattggacaactcctctgtctgttctgctgtatacttaatattataggattccatcatattttcttctgtattgattctctcagccgcttccgcaatcagaggagagttccatgcaaagaatgcctcattatccaccggcttgcagactgtgaatctgtcacttaagaaggaccaccgtttctctccttccggagttgcttcctctgcagcataatcaacgataaatttcctggagccatcactttcggtttcaaagctctcgccttcaacaccgtaatttgccaaggtaattccttcctcactgtaaaaataatcaataaaggtaagaattgtttttattttttcttcactgcactgggcattaactgccgtaacgcattcttcgttatatttacagctgctggttccttttaatatttttccactttcatcctgaaacatgttcattacacccatctggtaatccggatctgcttctgttccgccgtttgccataaaccattctgccctgttgtaataatcatattcaaaggttccgtttccattgatcatcgcggcctcccagtctccctctgtacgggtattggctgcaaactcaggattgatcagtccttcatcataccaggctttcatagtctcgaccatggtataggccttgtcatccataatatccagggacccgtctttctgatgaccgacgtatattccattggattcttccgatgaaatattactcgggcagccgaaccatgccgcaaagcgaataggattttctctgccttccagagggtagtagtttggattgtcctttccgtaatgcgctttcagcgtgcgcatggcttcggtaaagtcattaactgtcttgatcgaattcacatcaatccctgctttttccagatgatctgcgcggtaagccagataatccgtaaaaatcggagattcctttaccagaccgtagatagcgccctcctcatttgtaaccagcgctttgtagtccggattatcatcaatatatttctgcaaattaggagcatacttttctatataaggagccagatccacaaatgctccctgcggtccgtaaacattagtctgtgtcagttttgtcatcactgcatcaggaagggtcttagagataattctctggtcaacctctgcatacacgtcattaaaatcatcaggaccttccacatactctacatgaatgccagtattggcttctgccgcatcataccatttgagttctttaatccagtctacatacgtattccgcataaacattgtatagctgttgtcaccggcggccgtttctttcccgtctcctgctttttcagttccggattccccctgtgtgttcgctgtactcccctgctgctctgccgctttgtttccgcagccagccagcattgttcccatcatagcgacagtcaaaattacagataccattttccttctcattttcgttcctcctgggatcataatatagatatactttttcgtctgccgtctgcaaatctcactgcataatcgaccgcattcaacaggcttaattcatttgcagttccggtcccggcctgatcaaaggccgtcccatggtccacgctggtcctgataatcggaagtcccagagtgatattcactccttccaccgcgtcccatttctgttcttcctgattgtatacaaatccgaccactttaagcggaatatggccctgatcgtgatacatggcgaccactatatcgtaccagcccccccgggccttcgaaaatacggtatcggcaggtatcgggccatccgcatgaatgccttccgctctcgcttcttcaacagccggaataatctcttctatctcttctcttccaaacagtccattctcaccgcagtgaggattgaggcccgcaacgccaatccgcggattcctgattcccatatccctgcacgcctgttccgcaatccggatcacctctaatatccgatcttttttcacacggtcgcacgcctctctcaaggccacatgggtcgaaacatgtactacacgcagatttttatgtgcaagcatcatcgtatactttttggttccggtaaactccgcatagatttccgtatgtccggaatagtgacgccccgccagattgagtgcttctttattaagggcattggtcacagtcgcgtccacctctccggccatcgccagctcaatggcttttttcacatactggaaggccgcttctcccgccaacgcagataccttaccgatgatcagcgcctccggatctacattcttcatatctatgacatcgatacaaccggaacggtacaaaccgtcagatggtttttcaacagtattaatccggatctccggtctgccaacgatcctcgctgcattctttaagacacaggcgtctccaatcaccaccggccggcacgtctcatgaaccgaatgatctgccagcgccttcaccgtgatctctggtccgattccagccggatctcccagtgtgataccaatcaaaggtctcatcttcttcgtccctttctacttaattcccgcttcccggtttacttcaatcacccgtctgatagcctcgattccttccggcggaattctgtcaaacggggcgcggcattttccaaccggatatcccagcattgcaaccgcagtttttacgatggtgttgggattgccatatttaaaacagtcacggaaggagcgtatggaatcctgagctttcttcgccccttctaaatcgccctgctgaaaccgttcatagattgcagtcattgtctccggatagacattggcacagccggcgatgcctccgcctcctcctgcaagcaggttccagtaaatcagggaatcgttgccggagagtatcgtgaagtcctttcctctcgttctctccagatattggagcatattatcgaagttgccgctggaatccttggcgcctgcgatatgatcaatctctgacagccgctctaccagggccggagaaaggctgttgcccgttctggccggaatgttgtaaagcacaaccgggatttttaccgcctctgccaccgcacggtaatgttcgtacagttcctcatcagacgctttggcaaaccatggcgtgattacagacaggacatccgcccccagcgactccgccttccggcacatccggatcgtgtcctttgttccaatacagccgctgcctgcatagactggaacccttccaccggtttcttcgattacgatagacagaaccagttccttttctttctcatttagtatgtagccttctccgttcgttccaaatggaaacaacccgtgtacccctgcctcaatcaggcggttcacctgccgtctcagttcagattcattgatggattcatcctcattcatcggagtaatgatgggaggaataatacctttcagaaccgtcatcaaatttcccctctttccctctaagtctgccgtgccggatataatcaattcataatttccaaatacagcctgcgggcatcctcatgcgtaatctctttcttattgttattcagcagccgcttcacatccatcccggcattcaccagttcttccaacgcctcagtcccaatcccgaatgaagagagcgaggatgggatctccagcctcctgataatctcctccatgcgcaccagcagccggtccgctttctcctcgtccgtcatctgctgattccggcccccgttcccctccactgcatcaaaaagctccgcaaattccttcaaacaggccgatttgttaaaacgcataaccgggagcagcagcatggcgttggatactccatggggaatatggtactttccccccagcggataagacagtgcatgtaccgctgtagttccggaggaagagatcgccgcacccgcgtaaaatgcggcagtcagcatattcgttttcgcttcctctgcttcgggctcttcacatgccgcttctatatttccaaaaatcagcctcgcagcctcctttgcaaacagattgctgaatggatttgccttattggatgtaaaacattctaccgcatgcgccattgcgtcgattcctgtagatgccgcaatttttttcgggagattcgtaaggaggctgccgtccagaatcacgtaatccggcatcatttcccgattcacgatacctactttcaattgctgttccggtaccgccacaatactgttcatcgtagcctcagatccggttcccgcagtcgtgggaatcataaggacagggatactttttcttcccagccccggattttccagcagctgccttaccgttacagatccgtccgctgtaatagaagccagtttcgccacatccatgacgctaccgccgcctgcggcaacaatcaaatcagcaccggtccggcggaaccggtcgattgcctgctgggcctcatcacaatccggttcagccggcagatccgccagcacaacggtctctacccccgcctcatgcagcagctttatcggggtccttaggagaccggcctgttccacccccttatccgtaaataaagcggcttttttaaatcttccttccgtaatttctctgatcttatccagcgctccccggccgctgtagacagttcccggcattgtaagcgaatattgatccggcatgttttcttcctccctccaaaaaacgatgtttcaccagctgttccacttccatcaaaagctcctgatccccaaaaccgcctgatttcgagataatccactgctcttttccttccgtttgtatcgacgacagtacagttccctgttccagttcccggtaaatggtaatctcgccgcagtccatctccgtgataaatccagccagtgtgtcacctcctataatcataaaggtggcttccagccccatttccagaagctgttttaggatttctcccagcgtctttgatatggttacccgcgcttcctccagaggaatgtgattctccagccggtactctgtcatctttttcatatcagaaatcccggtttcaatcacacaggtgataccattttcacaatcccgcttcagaccgcagagccacgttttcccctcctctgagcttaaatatccctgggtaaactgctgcagcggcgtcatggtaatccgtttcatcccatgcatttccgcatattcaatctgtctcttagtaatttcattcatgcttccgcatacaatgatcatcctgtctgttataacaggaatttccaccttgcgtgtttccaatttcaggaaatctcccagcaccgatgcgaatcccgcacagccggccatgactccgagacgcttctgcctcatcaaatcctctgtaatcttttttatctgcaactcacttgacgcatcaaagataccaatttccttatccccgcctctctcatagtgcccgctctcctggtacaatacagtcttcaccgatgaaccagaaaacagtgcttccacactgggcgagaccacaggttcaaaaggatcacgtccaaacacactctcatggataggaactccttcaacataatggactcctccgactgtgatccggtccatggccggcagtgccgggataaacgtcaggtactgttctccactggccagaagtgccgcttccagttcttttccaatgttccctcttagcccggaatccgttttcttatagatatagggaacgcctgcttttcctgcactctttaccagatcaaaaactttccggtacgcttcctcgccctccagatgtcttgtctgtgcatcgatcaccagcacttccgcctgtaaccgtttcagtgtctcttcgtcctcaggaaaatgattcaggactttcgtcgtcattcctttcccggcaaactgcactccggtatcaagggctcctgtaaaatcgtctgcaatcacaagaagttttatcattttgtttgcccacctattattgtttcaattttaaacagtttatttttaacagtttcgtttgtttccttttgtttgtttaataataccaattaaagttctgtttttcaaggattctaccactattttttcttaaaatattgttttattttgaaacatttatgttttatattgtttttaataagttcatatgatatatttgttttaaatagaaacactgttttaaagaaaggtgggtattctttatggataaaaaaacgaagatactgggaatcgcaccatacgagggtatgaaagcattgatgatgcgtctggccagccagcgtgatgatattgatctgacggtatatgtaggcgacctggaggccggagccgaaatcgcttccagacatacctttcaggattacgatgtcatcctgtcccgcggaggcactgccgaaatgatttcctccatttccccgattcccgtagtggaaatccaactgtcggtatacgatattctccgtgccatgaaactggcagaacataacaatgaccgctatgcaatcgtcggtttcccggggattaccaaaaatgcacgttttctctgtgaccttttacagtatacgattgatatttacactatccacaatccagaggaggtccaagacacactctcccgcctgaccgaagccggataccgtatggttttatgcgatgtcgtgaccaattcccatgcccagaggctggggatgcgctcaattctttttacttccggttccgaaagtattgaagcggcatttgaccaggctgtcaaaacagccggcacgtaccaggctctgatctcgaaggccgaatttttccggacgcttctggaggactatccatattatgtatttgtcttcagtgaaaaaggggagttgatctatacatcgaaggaacataatttttcaccgtctgtcatgactgccatgaaaaattatgtaacagagattctttcggaaaacagcaaaaaattttacagagatgagggcgatctgctggttgccataaaaggagtcagaaaactgatttataaacagacgtatgttgtctattacgtgaacacccgaaaagttcctctgtccctcataaaaaacggggtgcgttatattgacaggagccaggctctggaacagttctactccagtttctacggacttaccaatccttccggaacctacacacccactctggatcagatgaaccagaccggtgctccggttatgattctgggggaagacggaaccggaaaagaagaaatggccgcatttatctattctcaaggcaaatttcagaataaaccaatggcaatcatcgactgttcccgtatcacggataaaagctggcagtttctaaccggacacaccaactccccattcagcgataccgataccacgatctatatccgtgaactcgagtttctgtctgatccacagtttaaagagctgttttccataattcgggatttgaatctgcaccggcagaaccatatgatcttttcctgtactacacgggaaggcgaggaaccgaatccaaactcccagcttctcatgaaccactttaactgcctgtccttcacgctccggccgctccgggccaacagggatgagattccggatcttgccaacttatatatcagtaatctaaacatgcagctggccagggagatcgtcggactggagccggaagcggtatcccttttaaaagattacagctggcccggtaattataatcagttcaagcgaatcatgacggaactttttgccataacggacacctcctacatcaaagccgcctcagtttccagacttttgctcagagaacagcccgccgcttccaccggcggcggtattcccttcgatttaaaccgcacactggaggaaatcaatctggatatcgtgcgccgcgttctggcagaagaaaaaggcaaccagagccaggctgccaaacggttgggaatcagccggacaaccttatggagaatgatgcagaatattgtgtgaaaacgcctgtttccacgatatccggccgtacatgaagcacaaataatcaaataataaaaggaatgctctgttcaaacggtttcaaatttcttaatacagtttcttcatcgtatatttatgtaatacgtcacaaaagcttttaatacgaagaactggcagaggcagaaaatgcagtcgcagatttctatcaggaaacaatttccgaaggagaaatggcagccaacacttcagtaacatggaaaggcattgtatatcaccttggggcggatggcgtcatggcagaataacagaacctcaaaattatttctgcagttataatgatatatgtaagaaaaggaccactgcacaaaaacaagatctgtgcggcagtccttttcttatattcttcatttcctgcgaattacccgttctgtttctctttcccagccatacatgctgcgatccgttccacctccagtttcggcgttctgtctgcatacagaagcccgttcgtctcctgttccacatcggtgagctgtgtataacagaagcctgccaggccgtttatcccgttcaccgcactggtcagtcttctcaaccgctcttcaaatgcttccggccctgctgccttctcatgatatccccaggactccttctttccatcttccatggcgatcccgccgaattctgataaaaataccggttcccctccatagctgtgaccctcactcaacaccattttcccgaccgccgtccagcgcgccagttcagccacgtcaccaaacttcccggccaggacttccccgtcactctcataatcatgaattcccacaaaatcggcttttacagcttcccagccatcattggtgctgacaagacgatatggatccagcgcctttgtgtagtggtaaaacgtctccgcaaaatgctgctgcgcctgatcaaacaggacatttcggattccccagctctcattgaacggaacccacgtaatgatgcagggatggttgtaatccctctctatcacctctccgtactcatgcagcagcgccgccatgccttcccggcagaattcgtaattggagggcatctcctcccacacaagaattcccagatgatccgccagatacagaaaaaccggatcttcgattttctgatgcttgcgcactccgttaaagcccattgcccggaccagctccagatcctttaaaagtgcctcgccatccggcggcgtcatgaggctgtccggccagtatccctggtcaagaaccaggcgctggtacagcggaaagtggttaagcagaacatgattccctttcacttcaatggaacgcatgccaaaatacgtctccacccggtcacagaccgccgtctcctccagatactccagttccagatcgtaaagctttggattatccgggctccagaggtgtaccgtattgtctatgggatcctccggctgaatggctatgacaaattcgggacgttttccctttactgtcacagtccctgttccgatattcctgccttcaaatttcagcttccatcggaccgccccgcagatctccggttccgcaaagctgattttcaccttcacttccccctgatccggaagcggagtcagccagacattctccatgcggcgcggacccgtgatctccatccagacactctgccagattccgctggtggccgtataccagcaccggtccgtctcgatattccagtgctgttttcccctgggctgggctgtatcgtaactgtcgcggcacataaccgtaactctggcagttttctccacacggcttacaaacggcgtcatttccacagaaaatggtgtatggccgccgctgtggcttcccgcccattgtccattgatccagactgccgcctcataatccacagccccgaaattcagccagagtctggcatcctccgcctgctcttcccacgtaaattcccgttcataccacaggcacgtatggctttccgtctctccaattccgctttttaggctctggtaacagaagggtactgtgatttcccgttcataggaatggccattctgccagccttccctcattccatcattattatcatcaaatgcgaatttccatgttccattcagactcctaaagcccctccggtaaaaatccggccttgggctggctgctttttctctgtcaatcattgtgattctcctctatctcattttccccgtccaaaaacatgggatcacacccataccggcccatccggtttccatagatgatacagccgccatcgtccgtttcaatcaccagttccgtattttcttccagctctaccggtatatcataccggaatccgtagccgtacgtcccggtccggcgataagagacactcccctcttccatcgcccgggcattggaaaacaacgcccttttgtcccacggctgatccggaagaaggaactccccgcacagtttcccctgcacgtagattcgaactcctgacggatacctcttctcatcggtcagtctggttccctccagacactcgcaggaagacatctcaagccttaatctccggcttccgcagaaattctccggaacctgaacatgccaggtggcacgccctgaaccagacgcccaccagacgcggcgtttatccgtgaccatcctcccggtaaaaccggaaaacacctctctgtccggtttcaccggattccagtaaaagacttccggatccgtctcctcctccgcctccacctcaaactgaacatcatgctcacacagagtatctgcgccgtctgtaatccaggcaaacagccaggctccttttatcccttccggtattttcacttcgatttgccccggatcccccgattccagccatgggactttcatcgccacctcgcctccggccagttcccgcttccagtgtcccagataatccaccccggccaggctccagcatatgcgaagctttttgccttctggctctcttccccggattccggcgtaaaccggcacctttataagcgttcccgccctcacttccgtcagccacggtctcgccaaaaagataaaatccgcctgatttgcctgatcatatccggccggtgtcatatccccatgcataaatccgaaatctcttctggttcgcagagaggtaaacggactggtgtcctcgttctcctgagatatcagattcatccgcacatatcccgcaaaccggcagatacggaccaggcgctcaatctcattggtatgtacaaactcactgatcatgaccggttgtcctctctggcagtcatttcctgtaaattccgtctctttcagcggatttctgcaatttctctgcaggagatcagctgcctcgtccttcttcatcaactgtctgttttcttcgttataacagttaaacaccgatcccggataattctgttcctccagtcttctaaaaaagtccatcgcatccgcaaactctatgggatagctgtgataatcaagaatatccgtctccccggtctttccatacccggagttatccactatcagaattcccggcgccatctttttataaatccgtgcggaagtacgaatccattcctgggcctccctgttgtcccacggacttcgctcgtggtcccccagaatcccccatgactcattaaaaacagagcacatcactacactggaatgatagttctgtttcttcgccatagccttcatccgccgcaaatgcagtccccgccacaacggatccttccacgttccatagaagcaggaaggaatctcgtcccataccagaatgccttcgcggtcacaggccgtgtaccattccggctcattatccttgatatgcatccggatcatattgtatccgcattctccggccgccctgacatcaaaggaaacactacccggttcccctcccgtcaaagacggatatgtatagatcccccacggattatatccctgatctaaaactccgcgcagatagaccggttttccattcactgtcacataggcagttccgtctttcacagtcttttgtcccaccctgcggaatgcggtccatcgctcatacgtcccctgaaaaccgtcttttccataaatggaggctgagagcaaataccggttcggtgcttcgggaccccactccgcaagcccctttccagcgatctcaaatgccgcctccagtataccgcggctgttaactttcaaaggtttcacgatttctgccattacgtcttcccgtggaatatgaagcttcagttccagtgtatcattcagttccaccggccctgccgtaacacgaagaatctctaaatatcctgccgaattaacaagccgggcccgttctgacattccagtggatctcacatagacagtcaggcggtcatccccatcgccgtatgtcgcgtcaaactccataagaagtgaagtctctcccaattccagtactgcctccgcgcgtcccttcggcgcccggtaaacgaaatccagacggtatagaatatcactttcggtatcccacgtaaaattccatgaccgcagttctgtatctgatctctctgaaaaaatcgtacgcaccacggacatgatctccggatttacctccgcctccactcttccgcagaaacggattccatcgtcctctctgcagtaattatccaccagtatatcgctgatccgaaccttccgttcttcttccagccagacattctgccagatcccggggctgtccgtaaaccagaatccctgttttccaaaacagcactgatctccttcaaacggatacagaaccttaacggtcagcgtatagcttctgcctgccttgagccgtcccagccggaaacggcagggcgaataaaagtccacggtacagccaatttccttttcctccagccagacctttgcaatacccgataccgcccccagcaccagctgaaccctcgtatcgttttccacggaaatcgtcgtctgcatccaggctgtactcccctgttctctccagttgcaccgaaacgcagacgcctgatgcagagaataatcatcggccagaaattcttctccaaaggctcttaaagactgccaggaaccgggaatccggattctctgttcatatatgtgcccgtccggcagataccatttctccttttctcctatctccaacggatccagtgagaatttccacactccatttaaggaggtcaaaaaacagtcattggttatctccccctgcggaaccgcttcacggctgtcctgctgccagtacggctccagacaccatcggtacgcgccgtcttcctgtcctttcagtacatattctgtctcatattctgtttcgtgtccctccctgtcttcagacgcaaagcatgcagtgatgccatgttccaccaaaaaatggcagaatcccttcccctctgccccgccaatcatctcatattctccaacaggcagacagccaagatcgaaacagccggtttcatcggtaagtccatcatgcccctggataccggctgcatgaagccacacctgggacagcggtcgtcctgcgccgtctacgcatatccccgccatccgtactccgtgttccaccccctgcacccggtatttacccatggctgtccccgcttttggagatgtgcccctgtcattaaccgccatcaccgccagccgtgcatacggtttcctccagggaacagcaatcaccgtatgcccgatcaccgtctcaccgtcgcaggtcaccgaaattcccgcttccgacgatgcgattcccaaccgaaacggtgtttttctggtaaatggtgcggacgcggctgtaaaccagcgtttcggtccgtcataacggaacgtatcccccagcggtacgccattcgggatccgcagctccatcattccatttcccacaacagccagaatataccggtcaaaacagccgtctccaaagtaaaggccaattcctgctccatcctggatatcaagaatctccgtctcaaactcacaggaagccgcgtccacaaaaaacgaggaaagaagcaggtggccgtttctgcatctgtcgtattcctccagatagatcgtgccgtcctccagataatgacagaataagtctgccgggctgttcatattcagaaaattccactcggccttattgaaagcttcttccatgcttctatccccgttcctttctttttgttcactgccgtcttccggcgccttaattctccactttcgccatctcgtcgttgaattcctgttccatattggcaagcgcctcctccggagttacctttcccgccatggcttcctgaatatggaattccatcacatcgtttagtttagacgaaatatacggtacatccacgtcggccagcgtctttgcatactggaaggattccatcagcgcgccgtacagctggctggactgtgcgactcccggcacctcataggtggaagtacggcatggatccatggtattttcaatctttaacaattccccatcctttgaggtcataaattcaatcagcttccaggccagttccttattttggcttcctgctgatatacctactccccatcctccgagaacaggggtcttaccgggagcaaccgccacgccaatcttatccttaactgcagaagtatccgactggcatgtcagccacaggccgggccactgctccatcattgcggcattgccgtttgcaaagaactgattggcctcatcccagcccatctgcatccactccttcggagcatattcctgaagcttcaatacacggttcagtgcatcaatgcccgcttcattgttcatgttcggctttaaattctcgtccacatcgtcgccgccgcggttgatccacagcagtctggtacagcccttcagcatattagtggaatagccatagtccacaggagattccggattgatactctttgtaaaaaattctgcaacctgcatcatctcctcattcgtttccggcactttaagctctgtctgatacttctcctgataggccgtttttaaggactcatcctcgaacaaatcctttcggtaaaataacagctctacgtcaggcttataaggaatcgcacagagcatgccgttataatttccatacgtatcatacagtcccggaaggaaatctgaagtatcgtaggattcgcccgcatactcgctgatcatggcgtcaagcggctcgatcttgtccgcctttgcgaagctgtgcaggaaagcaataggtgccagcaccacatcgtaacgctttgtgttgtttaaatccagctgcagcttatcggtaaactgctcacccgggatcgattccaccacaactttagctcccgacaattcctcaaacaacggaaccacatcactgaccgccttttcaaaatcgcccgacatgaccggaaccgtaagcgtctgtcctgcatactgtccgtgaagtgttccgtccagatcgatattatcgagcgtttttccgtacttttcgatggttttcttttcagggacttccgtccccccagccgcttccgtaaccgccgtcgtctccgcagttgtctgcatttcctcagatacggccaccttacagcccgtcaggcccatcgctacaactgccgtacaggccgctgccgttgctactcgtttccataatccattccttctcatcatcactttcctcctcgtttgatatgtcttttttgctactcccttaaccttttacggcacctgccatcgtaccctttacaatgtatttctgtgtcgtcatggataaaatcacagccggaatcatcgcgatcacacccgctgcggccagcgagccggagggagtatccttatgggtctgtaccatactcgcaatgccgatgggcagcgtcttcttcgcatcagaagactgaagcaccagtgcaaggccgaattcattccatgcaccgataaacaccagaatcgcaattaccacgagtcccgcctttactaacggcaatgcgatcttcatgtacatcccgtattccgtgcacccgtcgatctcagcggcttcatacagctcgtccggtatttcataaaagaagctgatggacagccagatcgccagcggcagtgcaaatgatatgtatgccatgatgagtcctgtcatggtatccagcagatggattttactgtaaataatataatacggtatggtatacaccagagccggaatcatgcggactgcgatcacactgtttttaatcattttatttcctttaaaatgataccgtgacagtccgaaccctgccatggtagccagagccagcgaaataaccgtggtacttaccgccaccagcatactgttggagaagaatgtggcgacataggattttcggaatatctcaatataattatcgagatagagcgtatcaatccataaaacaggccgttccacgaatacctgcgccttcgttttaaacgatgtaataatcgtccagtagaccggaaagaaaaagagcacacccagcaaaagcagaatgataaggagtcccgcggactttactattttcttcttcataattatgcctcccctattcttcttttccggtaagcttcataatcagcagggagaacagcacaatcagcacgaaaaagataaatgcgcctgccgagccctcgcccacgttgtaataccggaatgccatcttgtaaatggtagacgccagcgtctctgtcgatgtccctggcccgccatttgttaagttgtagacaatatcaaacatacggatagcatccataaaacgcatggtcagcaccagaacggtaaaattccgaattaacggcatggtcacctggaaaaatttctgtctccaattcgcaccgtcgatggtcgccgcctctaaaagttcctctggaaccgtcttcaatgcagccataaagatcagcatgcaaagcggtgtcgtagcccatacctctacaataataagcgcgattctggccggaatcacagcggacagccactccacccggtcaagccccatggaaaccagcagcccattgagcacaccgtaaataggcgaaaacatcagcttccagatagtggcaatgacgatcggtgcaatcatcatcggtatcgtaaacacagtcttcatcactttcgacagcctggggagaaaattcgtcgtgagaaccacagccagtgtcataccgaacagcagattcaatgccacggcggagatcgtaaagataaatgtccagcaggccgaatccagaaactgcctgttcgtcagaacgctcacgtagtttttcagtccgataaaccgtatggtatctgtgttcatggatgtgttatagtggaagaaactgattccaaacgaatacagcattggtataactgaaaatacaactaaaaataaaactgccggagagataaatacaaaagccgctgtccgttttggcttattcagtctcctgccctttccctcttgcatctgcaacaccttcccttcatctggactcattatactatttggacagtgtaattaatatactaaccttagtataaaatggattatcttctaattttcccaggtattcgtggcctgttttggatattttttacaatatacttgctttatttttccaatctaactataattatggtatgcaatacctttcaccccttatccgtaaatagtatactaagtaaggagtaactgattatgaacagcattccactctataaacagatcattgaagatattctatccagaatccatgacggcagtctgcagcctggagaccggatcccttcagagcgcgaactggccgagcagtatctggtgagccacatcacctccaagaatgcgctggcagaactcgcagacaagggttatattaccaggcaaaagggcaagggttcctttgtaagccccatggagcagttacagatgattgcagagtttaacagtaccatcaatcaccggaccatcctgaaagcaaaaaccatcggcctgatcatgccctctatgaagacaagcatcgatcagcagcttctcaactgtatcgaagaagagctaaatgataccgattatattcttgcggtcacgatcaccagagaaaatcaggagctggaatctgctgccattcataaactgaaggaacgaggggtcagcggtctcatcatctttccgacagaacacgaaatgtataacgaggacatcttaaagctgaatctcaccgattttccctttgtactcatcgaccgttatctaaaaggaatccgatgcagctgcgtctataccgataacgaggagattacaaaaactgccgtccgtcatctcctctcccagggtatcgtccagccggcttttctgtccccggacagccataatacggtgacgagcgaccggctgtccggctttaaggcggcgctggaggagggcggtttacttctgcctccggaacatcagtgtctgattcccctgtccgtcacggaccccgccgaaaaagaggcacttttggcaaaatatctcgacagtcatccggaaatcgacggccttttctgtgtcaaccgtgaattcacgaaatacatttcccggattctggaccgccgcggctggtgggaccgctaccggattacagcttttgattatcccgatgaccgacgcatctcccatgtcagacaggacatccctctgatcgcccaggcgtgcgtaaccagactgatcgaactgatccagggaaagaaggaatacggccatatcgttattcccgcatcatttgttccccaggacacgaaagttccctctccagccaaatgaaacgtccggcactccggacaaaaaaatcctttccagcccgccgtctttcttgccggaacactggaaaggattttttatgaatttattttattcccccattactgctgcacagacagatagaaacgggcaccgtttgatttgacattcatacgatacccgtttctacactatctcatccattggacttgatacctcttttctctcatgttttttgtacctggtactttctctaacatgatctatatgaaatttttccctctctccgttgcttttctacctcatctatgtttttcgtttattctcttactttttcattcttactatctgttcatcatttcgtatttcaaaattttctttcattcctcattatactttctcgtcatataacaaagatgattattcttttgttctactttttgaatcaatcatagttctttaaacatttcatagattttatcttatacttttgatatcagctctttgatgttcctcttttgcttttatctgataagattggttttccagcatcggcagatcggtttttccttttgcctaatttataatattaattataaattaagctaaattactgtttctggtggactgtacctccttcttctatatttttgattcttaagagtttgtttcttctcctttttctttaggagtttttgttttcttatctcttatcttggctttattatagcgtatgagttttgatttgtcaacactttttctttattttttcattgttatttgctaattttcgaattgtatataattattgcaattgtttctatttttatccctttatttttcagttttgcaaggtttgttttttgaatattctgattttattgtctttttttctttttaagcactgccctttttccgttttcatgccgggaatctatcaacagtttcttctataaatccggctgaatggacgaatgacctgccgtctgctataatacttataaaaatgatccaaacagcgggtcattaaatagtttagaaaacctgatgatatgaggaggtacgaaatggagaagaaagatatcgtaaaatatttctacgagactgtagtttcagaaaacctgcttgatgaagttccacactacgtatcggaagactgtgtggtaaaatccggtgagaccctcctacctgtgggagtcagcggtatgaagcagcatctggcggaggtaaagaagacttacccggactatacaatgaagattataaagcagtatacggatggagattatgtgatatcggaattcataatggaaggcacccatgaaggagaatggatcggcataaaaccgacacacaaaaggctttccttcacaggtgttgatattgacaaagtcatagacggaaagatcgttgagcacggaggcgcggtaaatacctttgacactctgtatgagcatcatctcataaaaccggtatagcgaaatggcatacaaaaatgggtctgcagtgtctctcacacgccctttttcttatcacagatcacaaatctctgctgatcttccactttcccttcagataaaagccgagagacagcaccgtggcaatggtccagccaatgggccacgacatccagatccctttcgcgcccaacggtccggcaagggcaaaggaaatcaggacacgaagaatcagatcggcaaatgtggcaatcataaagcagcccatggcaccggagcccctcagtacgccatccgccatcagcttcgtggcgaccaccacgtaaaacggagagacaatctttaaaaatgtaatccccgtattcatggcctctccgccggtctgttccataaagattgtcactgacggcgcaccgaagaaaaagaacaggaccgtaaacggcacggccacacagaacgccatgaaccagccggccttaaacccgctcttcacccgttcctcctgccccgctccgatgttctgggccgtgaagctggaaagtccgtttgccagcgtcgtaaacgaggtaatcgtgaaggtattgagcttcactgccgcgctgtagcccgcaatcaccggggagccgaagctgttgaccagtccctggataaacatatttcccacggagataaagctctgctgaagaatgctggggactgcaaccacactgatctttttcagcatgttccaggaaaacagcggaaaactgccttccgtctttacctctgcaattcttttatgtacagtcagaagtgccagaacacaggctgccccctgggcgataaaggtcgcccacgccacacctgcgacaccccagtgaaagacgatgacgaaaatcatatccagcagaatattccccagggaagatccaatcagaaagtaaagcggcgtcctggaatcccccagcgaagtaaagatacccgtacatacattgtagagatacagaaacagaaatccgccgatatagattcgcagatacagcgccccatccgaaaaaatgtcctccggcgtctgaatcaggttcatcaccggatggcaaaagataaatcccagagccatcaggccgagactcagcgcgatacaggcaatcagcgtcgtatagatggccgtcttcatctctttccaccgttttgccccgaagagctgggaaatgacgactgcacagccgatgttgctgcctaccgccaccgccataaagatcatggtgatgggatacgacgccccaacggctgccagagccgcctcacctgcaaatttaccagccaccacgctgtccgcaatattgtacatctgctgaaagatcacgctgacaaacatggggatggagaaacgccagagcactgacgatggttttcctaccgttaaatcctttaccattgttctacctctttcctcacttttcatacaaggatagattatactactactttcaggcgatttacaatggatttttcatttttctcactccagaaccgtcagcccgaacggctctgtctgaacggtcctgcggccggatggtgtgcagatcactgtttcctgttccttcccgctgttgttgatcaccaccagtttgccggaagccggataccaggcacattccgtatcggaactgtctgtcaggtaattctggtttaactccaggcccatcccgcttatcatcaggtttaacagcattctggtattctccggcgtcacctggaagctgctgagatagaacgcagtaccgcttccgaaacggtgggatgtgatgacaggaaggccgtcctcttcccggagcacctccgtgtccgcgctggttaaaaagattccttttctgccgcgcacggaagcaccggccggaatcaggccgcatgactccgtcagttcgtatgtccggcgtccatgacacactctggcccccgtatcttcatccactcccaaaactgcagccatacggaaatacgcggcagcccccggagccgccgacggctcgcccactccgaggaatacgccgccctcatagacccagcgcgagatttccccggtaactttactgtcagcccaggccatcccgccgctccaggcgctccctgcagctccggcgttaatcaggacatccacgccctccaggcagcccgccttcacatcctcgaaatttataaattccacggaaaccggcagcccggacagagcctcgttgatatggatcagatcatgcatatacgtttcgtgaaaatggccggaaagcgtccaggaacgcagcttcccccaggaatgaagaaccgcagcccggatcggcagtgtatacacgcctccctcttcatgaaaggacttgatcagccggaaatcatccgcgaccgtctccatgtaactgcaaaagtccggaaactcttccaccagatggagatacccgccaaggccgatccggtcaatcttctctctgagcagcgcacggcgcacgcggatccagtattctttcgcatcacggaccggatctcccccttcacagaacgtgggggctccccccagtcccaccgggaataagtaaggatgaagcctcagctcatgcgtttccacctccactcccgcgcagagtctggcctcatagccggaaaagacgcatttgatcagaccgtcaaaaccgaactccttaaaatggtcatgatacggttccagacccacccagctgtcgtcatagaatacgtacgccttctttccatagctgtgcaccagttccaccagacgcttcccgaaatccacaacaaaacgatttacaaatgccatgtaatccagctggcgcccggaaggcggcatatgggtgacatggaatttcccctggttgatgaagtcctccgcagacagactgtagccgtactccgcctcaaacgctgcgagcatcgcaggactgacggtaaaatcataggagccccagtccgtaaacagatttctctttttttcatcactgccccacatccagacgaaattgtaaaacagtgaggtaaagcggacgactgttgtcaccggatgagtatcacaccactccttcagccatccgtataagtattccctggtttcctcatgaattgggtccaccggcatcagatgctctttctcccagttatttgtcacatggttatacatcgaaatttcttcccagatgcgatatgccagaaagctcaccgtatagtcatgaaacgcacgggcgcccttcagaaccacggttccgctttctttctcataatgccagaagccgcggggcacctccctgtcttccgttcggtcgtagacctgccagcgggcgaacgcctccgggctgtcattgacttcaaactgttcggcaaaaaagtcctccatcaggtgaatcttcagttcatctcctaacgccgtcctgggttctgtcatcagaaacgtctgctgaagctggtccctgtgggcccttgcccaatcattgtggtcacgtatcagacagatggtggaatagatcccatatcctgcacttgtgatctcctccgacagctctgtaccgtcactgtccctgatcacatcggctccccagcgctccgccagtttaagcgtcagctcctcataaccggcctctcccggcaacgtaaaacttccctttttcttctccatggttcctcttctccttcatagtctttctttcctgattatataaaaatggccgtgctcatttccagtcagagcacggcaaaagctttgcaatttcgatcatttatagatataatggtattataaaaaaggaggcgccccatgcccagacataagaaaccttacatcgaattccgtgactacaatctgccggcccgttttcctgttctcctcttatccggggaagagtggcggatctctgatattccgtctccgcggcttcatatccacaactgcctggagatcgggctctgccgctcggactgcggcaccatggtctttgaagatacgaaacgtccgtttaaagccggtgatgtaactgtgatctcctgcgatgtcccccacactacctacagcgcaccgggagcagcaagcagatggtcgtacctgtttgtcgatttaacgggactcttaacccctttatcttccggatcagatcttcgcattttcaatcttttaaacacactggagcaccggatctgtctgattctggacgagcaggagtatccgggaatccacgccttaacagcggagattatgagagaactggaacagagggaggaatattatgaagtttccgtgcgcggtctcttcctggccctgctgacagaccttgtgagggcagtcctgcaaatcgcaggtcccgatgaaaaaaaagatgaccagccgcctgaaaatgcgctggtcatcgctcctgcactggagtatatccgctgtcactatatggaagatttttctatggaatacctggccggactctgcagcttaagcccggctcatttcagaagacttttctccgctgtcatggagacaagtccgcttaagtttctgaatgtcacccggatccggcaggccgccgccctgcttcgcacgacggaagcctctgtgctgtccatatcggaggaggtaggctaccgctccgtatccagcttcaaccgccagttccgtgataccatggggcagacaccacatgagtggcgccgccgcatgtcgatcctgaaagatcagtccgtcatgaaataccggggttttctggttcccgaaactttgacgccggatgaaccggaatccggatttagagggactcatcctccctgctgaagatatccataaattcctctccggtaatcgtctccttctccagtaaatactctgcaatcttatgcagctttccctcgttctctttcaagatctgaagggctttctgatgctgttccctgacaatcttaatcacttcctcgtcgatcagcttcgccgtatccggagcacaggccagagatgtgtcgccgcctaaatactggtttgtcaccgtctctaaggccaccatgtcgaacgtctcgctcatgccgtagcgcgtcaccatggctcttgcgattctggttgcctgctcgatatcgttggaagccccgctggtcacggaatggaagatcagctcttccgccgcacggccgccggtaaaggtggcgatcttgttgagcgcctcgtcctttgtaagcagataccgctgttcctcatctacctgcatggtataccccagcgcgccggaggttctcggaatgatcgtgatcttatgcaccggagcggagtggctctggcacgcagcaaccagcgcgtgtcccacctcatggtaggcgatgatcttccgctcgttgacgctgacaccggaatccttcttctggtatccggcgataaccacttccacactctcctccaaatcttcctgggatacgagttttctgcccatacggaccgcgcggagcgcagcctcgttgacgatgttggcgagttccgcgccgctggcgcccgctgtagccagcgccacgtcatggaaattcacatcgtcggacagcttcacattctttccatgtaccttcaggatcgcctcgcggccgccgaggtcaggcagttccaccggaatgcgccggtcaaaacggcccggacgcagcagcgccttatcgagcgagtcagggcggttggtcgccgccagaattacgacgcccttctttccatcgaagccgtccatctcggccagaagctggtttaacgtctgctcccgctcatcgttgccgctgaagccgccgccgtcacgttttttaccgatcgtatcgatctcatcgataaatacgatacagggcgccttctcattcgcctgcttaaacaggtctcttacctttgacgctcccatacccacaaacatctccacaaactctgaaccggagatggaaaagaacggtacgtgtgcctcgccggccaccgctctggcaagaagcgtcttaccggtacccggagggccgaccagcagtgcgccctttggaaggctggcgccgatatctgagtatttctgcggattatgaaggaagtctacgatctcctttaaggcgtccttcgcctcttcctggcccgccacgtcggcaaaggtcttgccggtctctgactccgcgtaaatcttggcattggactttccaaacgtcatggcattgccgccgcccatacgcttctgcatctgcttcgccatcatatttcccaggaaaacaaaaatcagaatcgggagaatccaggtcaggaaaaaggacagcagcggattcatcggctccacaatcgcctcctggaaattgatttccttatgcgccatgagccgttctgtcagcttctcatcgggccacggcccggttttatacgtcgcgtatatctctttcccattcttatccttctctcccgtgtccgcgataaactgaatctctgaatccgtcttggcgacatcggtcacctgtccggcttccaccttttcaagaaatgtactgtacggcacctcgatgatggttctggactgaatccacggcaccatcagtgcattgaacagaatcatgacgatcatgacgattaaatagtaataaataaatggtttccgcggacttttattgtcgtcctcgttctttatacccatggtttttctcctttatctgccggttaccttatttaaaacctcttccacaaatgcttccgcgtcctggaaatctttttcatccggatgaagcattccctcctcgtacgcggctatcattgtccggatctgaggcgaatcattgatggcctgcatctgtttatacctgtccagcacctgcggcatcatcttgccgccgcagaggaaacagccgagatagtcgttatcctccggcacaaaaacagacacccggttctccacctgtttaaaatactcactgcttccgcccattccgcaggttccgaaaagggctaccttcttcccgtggagcccggaaaggaattccatgacacggctgccgcaggtgcctctgtcattccagaatcctacaaaatatgtgtccgcttccccatcccgcagttcctccagtctctgaatatcctttgaacggcccggaatcgagtcgaatattttcatcgctactttttccgtattgcctgtattactcgtataaacaaccagataatccatgttcctgcctccttgccacttttacgcctggctttcttctgtatataaaatatacctaaaattcacagatatcaagatcaaatcggaaatgtttatctactttatgctttttttagattctccggctccagtcttcagaaacagcctccgtcatcccctccactgtaaaccgggaagcagtcacatctgcttttcttccgtgttcttccagctttttcgccgtaatatcgccgatacacaccacacggattcctgccagaagcgctgtcacgtcctctcctgcgttttcaaagaaagcatccactcccgaaccgctggcgaacgttaagtaatctgccttcttaagggcctctgacagttccttctctccctgcttccgctctgccacattgtaaaggacaacatcatcgtaacggataccggcgccatccagaatcccgttaagctccggggaaccttttaaagaccgcggaatcaagaggcgttccccgtcctttacaacctccttaagcccccgggcaagagcggccgcacagaattcttccggtatataatccgtcgtaaatccataccggagaagttcttttgccgttccctttcctacggctgcaaacttcacgtggcctacgctgcggttatctcttccgctctccagaaggccgagaaagaattcacgcaccgcattggcgctggtaaagacaatccagccgtaatccgccagcctctcataggctgccttcatcgcttcaccggaccggcaggattccagttccagactgagaacacactctgtgctggcccctgcctcttccagactttttctcagtttggcagccagtaaaccggttcccgtcacagccactctggcgccttttaacggctcatggtacgtggaagaaaaattgagggcagccacttctcctacaacgatgatcgcgggcgtgccgatcccttcttccgccacccgctgctcaatggtgtcaagagttccccgcacgacccgctggtccggcagcgtgcctttttcaatgactgccgcaggcgtgctcccggactttccgttctccagaagcccttttacaatgagcggaagatgggtcagtcccatgagaaaaatcagggtgcctgaaagtcctgcaaattccgcgaagtccagagggagttttcccgcctccgtcatggtgtggccggtcatgacatgaaagcttcggctgacggcccggtgagtcaccggaattcccgctgacgccagtgcggcgatggccgatgtcactccggataccacctcatagggaatcccttccctggaaacggccatcacctcttctccgccgcgtccaaagacgaagggatcgccgccctttaaccggaccacgttctttccctctctggccagatccactaacagccggttgatctcctcctgcttcatatagtgacagcccgccttttttcccacgtagatcttttggctctcttccggcacctcatccaaaaaacgctcggaggccagatggtcgtaaaccaccgcatcacactcccggagtctctttaaccccttttctgtcatcaggcccggatctccgggtcccgctccgaccagaaatactttacccgtttccttcatctctatctcagtcctttcgccgcgcgttctgccagaagatccagttccccgattccgcctgtcagatacacccgtttcgtttctctgtcccgcctgctgattccaaatacttcgatttcttctcccctgattctggagtacactccaaccggctcatgacagcccgcatccagcagtttcagtatcttccgttccagcatgagacacgtcttcgcgtcctcatcctggatacggaccgccatctcacagattctgtcctcaatccgcccctccacggccagaatgccctgccctccggcgggaatgaacgtttcacagtcaaagtaatgaaaatcatacatcccgttggtctcaaaatactcttccaggccgttctccgcaggatttgccagcttcattcgttttaaacccgcagcagccagtataatggcatcgtagagtccttcatccatctttctgattctcgtctggatgtttccccggatatcctcacaccgcacggctgcgccgggccacagcttctttcccagggtctcgatctggagccttcgccttaagctggaggtgccgatgacaatctcctttttcacgctcaaatcggttcctgccggtgtcatcagcacatctctcgggtcctctctcggaggcacggccacgatccccagtccatcctctaaatccatgggaagatccttggcgctgtgtaccgcaaaatcaatctcaccgttttgcagcgcctgctcaaactccgtcacaaagacaccctttccgccaaactccagcaggggtttatttaagatgcggtcaccctctgtcaccttcgtcacgatccgggtctcaagccccggctgtacctgcttcagagcttccgccaccagttctgtctgcaccatcgccagagcgctcttcctcgttccgatacgaatcgtcttattcatgatctttctccaattcctctaactttctgtcaatcaactgctccgcctgttccctggtaaacattcccccctgccggattccttcctcaaccatctctttaaagatctctgttctgacagacaggaccggaacccgctccttcaccagctcacggtatgttcccagctctgcggctaatcttccgaagccctccgggatcgcggcgcgaaacttcgcctttaaaaactgagcgatggtagggctgcttcctccggtagagattcccacggtaatatcctcatccttgatcagcgccgggaagataaaactgcattcctctctgacatccactacattcaccggaatccgccgttctctgcaggccagggagatccgtctgttcagctcctcatccgccgtagctgccaccacaaaatcaacacagtccaaatctgcctcctgatattccctgcgaagaagcgtaaccttaccggccccggtctcttcgtacgcttccatacgctctgtcatctcaggggatacgacgacgatctccggtccatagtccaaaagaacctccaccttccggcaggcaaccacgccgcctccgacaatcaggcaccgctgcccttctatatccataaaaaacgggaaatatgccattgcttttctcttccttctgtaatttttatacctgtctattttaccatataattctcagttaagacagatgtttgaaatggaaacccggacgagccggcaggcttttccatgatataaaaaaagcgggagctattgagggaaaattggactcacgttttggttaagggatgtgagggggaattttataccaattttcggggtacatgcctttacgaggtccgtgaagatatctctgaggaggcacagtatactcaatctttcctgcttttttatcgcatcaatacaaaacagggagggcgcggtggtctgatatagatggcgcgccctccctttcaattattatttctgattaaatgtatagtttgcagtctcagccgggcccgcatgcttatgctgggacagcggcatgacgtgcatattgcctctctgctcgttctcagcccagtagatgtcatctgccatcttggcttccggattgaattcaacaccctcgaaaatgtgcttcacgaattccttgtatcccacacggtcgattaaatggccgccgtgtaagtactccggcttgtagtcaagtgcccatgcagagaatttctgccagtttgcgaacatgccaagaacgacatcctcggttacccagtttaagaacagcttgcctgcacgaggattctgcttgccggtacggccgcccagagtaacccggtataactgcttgcctctgctccatgcgccggtcgggcagattaaggaacattccccacagcctacgcagcagcatgtatccttgtcaatcttgccgttggcatttaaggagagaacgccggttgcgtgatgctcacaggcatctacacaggaaccgcagccgatacagcggtcaatatcataaatctgcttatggatacccattacgccgaaatcgttgaagtttgccttcacacagtcgtttggacatccggcaacagcaaccttgatatggtagtgggacgggaagatcagcttctcaatctttcttgccagcttgtaggtatttacattacccttaatacagtgtgcgtttccgatacaggacatgatgttgcgggcgccgatggtcgggtagcctgcgtcattggactccatatccacgttacacatctcaatatcaacgtccttgatatagttcttgatgtatttgtttacttcttcgatgttctcatacttgattcccgggatgtttaaggtctgtcttgttcccatatggaaggttccgttgccccatctctggcagatttcctgcaccatggttaaatgctttgcctcgattaaagcgcccggaacacggagctggagcatgaactctcccgcaactttagactgtctgaaacagttaattcgtacttttttgatatcaatatcgtgattcattccctattcgctcctttccttagtcaaccagatatttggcctgtgtatagttgaataccgggccgtctaagcaaacgtaaacctcgtcaatgcggcagtgtccgcatttgccgactgcacatgacatcttacgctcgaaggatacccagatcttctcttccggaacgccgcattttacagcttccagaccggtgaacttcatcattggcggcggtcctacgataacgacctcataatcgccgtcaaactcggaaaatggaaccttggaaacgaactcggtaacaaagcctgtgttccagccgtccttgtgatccttatccagtgtatagaatgtggtgaatttctcattccacttttctaagtcattcttgaaaatgatgccctcttcattcttgaaaccgctgattaaggttacgctcttcacataatcaggattgtcatagaacatgtttaacatgctcttaactggagccagaccggttcctccggtgatcactaccatgtgcttgccctggaacttctctaccggccagccttttccgtaagcgccgcgaaggaataaggtatcgccaggctgcttctcgaaaatctcatctgtaactttaccaacggagcggattgtgaaatccatccagccgtcgccgaaagagctgacagagattggagcctctcctaccttcgggatagagagctgtaagaactgtccgtgctccggtcttatatcggttgcaactttaaatgtatactcatgtaagctttctctcttaacttcaagaatcttgcatgcaacaggttttactatgttattcatctcttcgtccacctctccctatttattctcttccgctgcgatttcatcgattgcgttagccatcttcttcacagtagcagcgatggaaatgtactctggacagcggtcaatacatcttccgcagcctacacacatatggtaatctttgaaacgttccttgtaatcatggaatttatgaagcactttgaaacgcattctgtctccggctgtattgcggaagctcatgccgccggccatatcggtaaagccctttacctgacaggaagcggttgttctctttctctcgcctacgtttccgttctcattatagataatatcggtggtggtgaagcaggtacaggtgctgcaggctacggtacaggcaccgcaggaaacacagcgcttgttgtattcattccacatcggatgggattttaacttggttaaaacctctttgttcgggatctccggaacttcaacggtcatctggttcttctcgatgtactccggtttgaagccggtctcgttctttccttcaaagtaaggagcaaacgcctcatccttcacatccaggcttaactcgccgtctccgaaacgaactgccatggaatagtcctcagacttgttggttcccatgcttacgcagaagcaggtatcccagcctgttgtacattccatcatgacgattttaaccttctcgttcatgcgcttatagtacatgtcctcgaagccgccgtttgttaagtagatcttctcctgatgatgctgtgcatggatatcgcacggtctcatgaagattaagagcttcttgctggtagccttgctctcgatgaactcatcctctgtgaaatagaacagggattctgtaatcgggcttaacacctcttttgcagggaaatctgacttatccatgtattcgatctcttctaccgtgttgatcctgtcgtacttgatcatatcggtatcagaatatcttcctcttcctacaaatcttttcggtgcccagatctcatactcatcctggagcgctgcaaagatcttgttcgcttcttcaaagcttactttgtaacccattgaatgtatcctcctttttttgactccttcagtctcattggtgtatgataaagaaattctcagaagttcactgtaacccctgtatcgtatttcttttcatcgatcgtaacggtaagcttataggttccttcgattccctcaccgctgacagggaattccaccgctctctcatcgtgttctaagaatgtgcctacgcacatggccaggaacggacgtttcgtggtcggaacaaagtagtggcgtgtcgggcttccgttttcgccttctaaatttaacatgaccagggtgcccttctcgaagcttgccttgaatacaagacggtccgcctctttggcaatctttgtcttataggaatccggaaccataccgccgtcctctgcgggcgcttccgttaagaactcctctgtcactccgatactgcccagaatttcgccgcggccgaaggtgatctcatcgccttcgtcgtacaaatggagcttctccgcacggtaatagtttgccgggagatgcatctcgtacaggacaacgtcgtccttaatctctacggtaatggaactgagttcggccgatccatcgtcgatggctgccgtcatacccgcacccggcatattcatccattcgccgtttaacttgccgataccgccggaatgaacgagatagtggcctctctcatagtattcgcagttgcatatgtaacaggagaagaattcggcgcctctctccttgccgtactgccatacctgttcgatggtcatgttgtctgtatcaatatggtaaatgacaccgcgggagaaattatcttttgcttccagataatgttccttctccttggagcgccagtgtccattgtcaaagcacatgatatcgccgtttggaagtaccatgcaggcatgctgctcatactgccagtcgaattcgtccccgattggcttaaagaagtatttctgcatatcctccggccatcccgtcggatctccgatgatccagttcagtttgccagtctcaaaatcccggttgatgatggcatcctgatggcgtccggaaaatgtcagggaattcgtctttttatcgtaccataccgcattattatggaaccagtcgtgggcatcctgacttccggaaccgccggccgggtacacaggaagcacatcctgatgatcccactcttttaagatctcaccggtatttctgtccaccatgacacacacatcctctacggtaccacgggccagatgctgggtcaatattaaaatatctccattttccatctcccactcatcgtggtgatagccgcccggtatgcggaattccttatagatctttccgatcattcccatctcatagataccggtggtgtgatacggcggagccaccagacggtcagttcccacgaacagacggccgttgcggacacgctttaaatcgaatgccaggttcagcgtgttgtaccagcgcgcatcccccgcatagtcgtaagccgccgtgtaagccggcgaggtcgggcttaccatcatgacattgtcttccatatactccggcgttgtctcgatggaagtcggcttctttaactggtcggaagccttctctgtcacaatcttaaccgtcgctgtctcccccgtgctcagttcgatgactacggtattctcatagtcctcgtacaggccgtaaatcggaagaaccatctttcttgcgtctgatttcggacggtacatataatctcccgccgcttcttttcccttcaccgtgaccttagcgaaggccggtttttcattttcaaacatgacgagcgcggtaagaggcgcaatcagatatgggttgagcacgacaaaaggattcgcgatggtatggctctccttcttatactcctccagaaatctcgattccgcctcatactgctggtcaatgatatgttttacttctttgtataaaactcccataaaccctcctgaaagcctgcgaaggggggacgtctccaacatcgcggcccccttctgcagtcataatatgttctcctgtatctgttacagagtccgatcctcttagcagctgatcgtaacgcctgtctcgtacttcttgtcatcgatgatcacacgaacatcgtaggtaccctttaagccggccttattaatgttggttctcgtgtttctgtcatcggaatcaaggaatgtaccgcagcacatcgccaggaacggaaccgccgtcgtggagatgaagtaacggtgaacctcttcgccctgctctaacagaagcataaccagctggcccttttcgaaacgggagaagaatgtgaaacggtcaatctcgtcctcgattctcgcgttgcagctctccggaagcatctcgcctgacggatctaacgggatctcggtatcgaattccttcgtaacacccatctcgcctaaaatctggcctttgcccagctctaagttgataccgtcgctgtataatttcagcttctcgccgcggtagtagttacccggtacgtgtaaatcaagcatcttcttgttgtcgcagatctcaacggtgatactctccaaacggccgccctgatcctttgcaaacgcgcccagcgcctcggaaggatttccctctgaatcgtatgcgataccgccggaatgaaccatatagtgtccttcgttgtagtactctacgttacagatgtatggagagaagaactcagctcctctgtccttgccgtactgccatacctgctcgatggtcatatcgtcggtattgattttataacgtacgcctctggagtagttgtcttttgcagccagatagttctctttattcttggaaccatagtgatggttgtcgaagcacataacatctccgtcaggagtgatcacgcaggcatgctgctcatactgccatccgaagttattgccgactggtttgaagaaatacttctgcatctcttccggccagccttccggatcaccgatgatccagttcagatctccggtctcataatcgatgtttacgatggaatcaatgtgacgtccggagaaggttaaggagttggtgttcttatcgtaccatacggcattgttgtggaaccagtcatggtcagaccagcttccggatctgcttaccgtcttcggatcaaggaacttcttgtagtcccaggtctttaagatctcgcctgtgttgcggtcgatcagaacgcacatgtcttctacagtctcgctggttaaatcgtctgtcaggcttaagagattgccgtcttccatctcgaactcatcgtgatggtaaccgcccgggagacggaattctttgtagatcttgccgcatgggctgatctcgtataaaccggacatgtaatatggcatctggataactctgtgggaacccatgattaagttgccgtttttcagtctcttcacgtcgaatacacacggaaccgtcatatgccatctcgcatcacccgcatagtcaaatccgactgccagatcctcgcctgccggagataccaggatgatgttgtcctgtaaatactcaggagtggtatccatagaatagataacttccttgccgtcaaatacgtccggcacatcgatggtgataatattggattcaccgcggtaagcccggatctcaattctgttctgataatcggaatacagtcccacgattggaagcacatgcttctttgccttcgggaatgtgtggctgatatttccctgaggtgtcttgccaaggactgttacggtaactgctgtctctttttccgtattgaagcatacaactgcggataacggattcaccagataagcgttatacgttaccagcggattggcgatggtataattacctgcctcaaactttgccagcatcgcctgctctgcttcgtactgtctgttaataatatgatcttcaaatgaatattttactgacataatgatacctccccgtatctgttctttttcgtttaggttctgattaagatcttatctgtgctcttccaccagcttgataataaccggcttctgctgtaaaccctgaagacgtcctacttcctcgccttcttttaaaagaaccagggttgggtatcccgttacgccgtattctgccgttaagtctttgttctggtcgaaatcaacctttaaaatggtcaggtcatcgccaaattccttctccacatctttcaatacaaatcccaacatcttacatggtccacaggtggtagaaaaaaagtctgccagtaccaggccctttccggccagttctttgaattcttcgctgtttacttcttttaacataatcttacatcctttctatctttttgtattaattccacactgttttcccattctaagcatactgtcttcattttattgcaattttacaataaagtaaaattctaattttttatctaacaataaaattacgttatggttagtcataagaaaacaggtggttaggaatcgctgtctctgcacgcatacttcgtgcttcttaatcctctaaattctgtacgtaatgggaagcctcctgggctgcgattgcaccatccgcgcaggctgtgattacctgacgtaaattcttcgtcacacagtcgccagctccgtagacgccttccaccttcgtgtgcatcttctcgtcaacttccacgtatccaaactggtttaacacgcctaaatcctttaagaattccgtggtcggtgtgagtccgatatattcaaacacgccgtcacaggaaaccgtattctcttctccggtcttcgtggatttgaagtgaacgccggtaagctttgtatctccggtaaaatccaggatatcctgatatggataaacggttacgtgatccatggcgcgaagcttgtcgcaggccatgggatctgccgttaaatcgaacatggttacgatggtcagtgatttaacgataccggccaggaatatggattcctcgaccgcagagtttcctccgccgattaccaccacgtctttatcgcggtactgggctccgtcacagatggcacaccagctgattccgttgccgcggaacttatcttcgcccgggatatcgagacatctcggtctcgttccggtcgcaaggataatggcctttgccgtaaattccttgtcgtcttcctcgcagagaaccttctttacttttccctcatccaagatctcttttaccgtgccgtaatcgaacgcgatattttcaaactgctgggtatgttcaaacatctgataggccagctccgctccgttgatcgttccgactcccggataattctgaatttcatttgtattaataatctgtccgcccggggccagcttgtcgagaagcagaacattcatgtccgctctcgccgcgtagattgccgccgtcataccggcaggacccgcgccaacaataattacatcatactgtgccatgatacataactcctttctaaacttacattaacagatttgctaacgggacgccgactacaaggacgataatcagctccaggataacgaatggaatcgtatactggtaaacgtacttggtcggaacccattccttgttgctgtgcagaatcgccgcgaacggggatgctgccggtgtaatagccgccgataacagaacaaagatgattaacagcgttacgatcggtgccgggttggctccggtctggatacaatatgtaacgataaccggctgcagaatcataccgattaccaggctgttgcagagattggttaagagaaccgccatcgccatcaaaagaacggtgaagaccatcggtgacattccctggaaaatcggggaaagaacaacgcttaagaaagcggaaacaccggtattctcacttgtcagcacgcttcccaaaaggatcgcggcaacgatgataaagtatgcgccccagttaaagttggtggccataacctgcggaatctccaaaacgctctttccgttgagacggatcgctgccagagcggctaccatgaaaagggccagccccaggctgttggaggagaggaacgccattcccggcagtgacgggaaaaggctcggaagaagcatgcccagaatcagaatcacaaagctggcgccaatgatcttctgtctcggttccataggcggaagcggattcttattgagcatctccacatcgtaattctttaatttcgttacatccgggcgaatgacaaacttcgcaaacaggatattggccacgatcataatgagaccgagtataatggcaacgcccatgtaagccgcattattgaccacaatcgggcctccgggaagatttgccgtaatattggtaaagtttgtaagcagcgccagaccattctgggcgaacggcgccatcgggaagccgatcagggacgcgacaaccaccagggtcagcatgacgcggggaagtgcatctcccttcttataaccaacttcctcaaacacatcatagagaaccggccagaataagaagatcgcagtaaacggactgataaaaccgcccagaaaataacagccgatacagattacgaacatcagaagccatggcttgccattcgtgaattttcttgttaaaaagaaacggcctatgtaaagcgtaatcttataataaacaagaccgccagccataatcagcaggaaaaatacctgagccacaaccggtgctccgaatgcttccttgagcagacctgccatcggcatataattcgataaaccgaccatagcgatggacattaaactcccccaaagcggatctacaaaagtccaaagataaagtgttccgataaagattcccaatacttccataccaatggaagtaacctccgggagattcagcgggaggaaacggaaaaataccataattcctacaccgatcagagaatgaattaaaaacattttttctctcttacgctcattttgattcgccatgtcttgaaaccccttttctaccatattgttaaaaatataacaatgagggcacaataaggcccgaaaacataccttttatatttttccggctcatttactcccatacattgttgatttaattttatcatatatctgctcatagaaaaataacacaggttataaatctggttattttgacaaaattatgatatactaaatccgatcttttattactatcgcagggaacggagaaaacatgaacgaatcactcttaaaaatcatcacagacagcggaacgcgcatcacaatgcccaaggacattgttcttaataaaaagtatgacaagtatatatcaaactatgtctatttgctggaagaaggaatctgtgcactcaacagcatcacgaagcagggggaagaaaaagtatatttatacttccgtcccaaccgcctcatcggctttaaccagtttgtagtcagtgcggaaaaactcaacgccagtacgccggagttttcggttgtcacaaaaaccacatgcaccctttgccagatcccctattccgcctttcaggagctgatcgttaagaacccggagtttaacgcattttttatagagacactggcggacaactataacgatgctttgatacattttcacttaatgcaggaggaatcggttgtggtccggctgtgtcatctgctgtttgaagtatcacagctcaggggggggaagcgggtcgttccccgtttttttacatacgcggaaatggccaaatacctgggctgccactccgtaaccgtgtcacggattatggcaaaactgaagcagaaggggtatgtgacgaagacgccgtctggaattgcgattgagcaggaggacgcgctgcaggaattgattaattcggaatcccgctttcagtattgaaagcgggattctcttataagttatattattattttttacaaacggtcttaatccagttaaaaagttcttccagatcataatcgcctgcgtgaggaactccccatggcagatgatagtccactaaaagtccttcgtttcgcagtccagctgtcagtatggcggaaatcgcaagggatgtgtcccggtccgcggctccatgacggattcggaaatactttgctttctttgcaatcggatcctgtatgtaattcatgggattcatctgtctgatctgaacttcgtccgccattttcccggaaaccgcagaatgttttaatgaaaatgatgtaaaatgacgacgctctgtgtcagaagaaccgaacaattcattttccggggtggcaagatgcacatcatcaaaggctggagccgtcttcattctcgtccggtacttaatgaaagaatcccagtccagccccactggacggccgttttccattgtcagccaggtcaatacttccaggtcagtaccgcattctgccgcacgatcagctgacttaagaacatactctgcaatatattccttaaagctcccgtttccgtcttccttaagggtaagctgtctcccggaatctcctaccagtttcaggctgtttaaataagatggaaaaagcagtttctccatggcagatagtttcttctgctcttccgacataacaccgcttttctctccccagtagtaatcatcgaacccacaaaattcccattcatatgccatatccgcatgttccaaatttgtaattggacagtaacaggaggctgcatacacatcgtcggtttcctccgcggctccgatctcttctaaatatggttcgtaatccgggtgatttcccgttgttcccaggagtgctgataaggctccgccggcgcttgtcccattggagataatcttatccacatctcctggtatttggtcccggttatgcttaagataacggatcgctgcctttaaatccacaatacaggcaggtgcatttccaataaacgcgcctttttcatccttcaagccacggcctctggcaccgggagagactacaacataaccatttaaaatggcataaaacgacgcgttgggctctccactccggttgggtcccggcggttcaggcagtcccggcatataaccgcctaccgtattcggaaaaaacacaggcaccttttttaactgctctttcccgtccgcttcctcatagtaccactcgggtacaaaaatactcagactttgatgttccctgtccaccggctttccagcatagactatattctcaaaggcgcggtatttgatatgcttatccagtatgctgatttcccggatcgtataattttcctcatgaaacttaagtgatatgctcattgtatcctcctgtcagttataaagccaggaagatgcttcctccgtatacgtcacatctcccgggaatacgatataatcatctttcgttctgacattctcgatccctttacggaaaacgtaataatttgtcttattcataagaggataaatcggaatattctccatgaaaatagaaacaagctttgacactttttcattatccccatcttttaaagcttcgtccagtacattctggaattcatcatcatcccaaaatccgcggatattcttattgcggtttacctggttgccaaagaagaacagaattgatcccttggttgtatactcgttaatctgcatgtcccaggtgtccttctgggtcagaagtgtattataagaacctgcgtcaaaaatgctgatttccacttcaatgccgatctgctgtaaatacgtctggataatctccgctgccgctttatgagtgcttacatcatcggtagcaagtctgagttttagctctccaggctggtatcctgcttctgccaggcaagtctttgccttttcctggtcaaacgcataaggattactgttttccagatcatcgctccattcaggattatttggagtcaccacagaacaggccggatgagcgaagcctttatatacggccgccacaattgctgaattatcaatagcacatgaaatggcctgtcttaatgatttgttactgcaaacacttccttcagaactgttaaaataaagactgggtgtgctgctggttttcacttcaagaacatcataatcgctgttgttcatcaatccttccagctccgtcagcggtggatcatagacaaaatccacatcaccgctctccagggaaatagttctctgagcttcttccggaataaatttataaatgatacggtccacgttcctctgctgaatctcggtttgtcctgcattccagtagttctcattcttctccagcacaacttccacgcccggtgtataacctgtcaccttgtacggtccggtacctacgggggtagtaatcatctggtctttactctcctcaaaatcggcttttgatacaatgtcaattctcgtaatatcgttccagaacagtacattctgctgcagaatcggaattaccatggtgtaatcatccgtgatttcaatattatcataatcgatattggtggtatggcgcgcaaattctgcagaatcctttgcgtattcaaggctgaatttcacatcttctgtggttaatttctttccggaatgtgtagtgatattatcataaagcgtaatctttaaatgaagctcatcgatccattcaaagtcctttacgagcagaggggatacctctccattataatcccactcgaacagactttcgtagtaattcatgcgctgttccataaatgcctgttggttaatggtggaaggctgtaagctggaaggatcattggtaatctccatcacgattgtagattgtccttcttcctttgctccattctgggctgtctctgcgttcttcgtatccgcagttccagccgttcccgcagtttcaccgttccctccgcagccggacataacaccagccgtcattgctgcagccagcagcagggatactatttttcttctcttcataaacttttcctcctaatttatctcttttgccctgatacaggaaacaaaatgattttcactcaattccgaaagttcctgcggctttttgcatgcctctgccgcatagggacagcgcgccataaagcggcagcccggttttggctctatgggagaagtaacctctcctgtcagtttgacaaaatttctctttgcatggatattgggtaccggtatagcggatagcagtgccttagtataaggatgaaccggatttctgaacagttcttttgtagccgcccgttccaccatctgccccagatacatgacgcagatctcatccgagatataccttactacagataaatcgtgggtaataaacacgtaggtcagttttcgctcttcctgcaaatcctgcatcagattcaaaatctgtgcctggattgagacatccagtgccgatacaggctcgtcacatactacaaaatccggattcagtgccagtgcccttgcaatcccaattctctgtctccgtccgccatccagttcatgaggataggaattacccaaacgtttatcgattcccaccgtctccatgatctttgctgtctcagtctcaatctcggctgcagaatagtgttctgccagctgaagcggttcccggattgtttcaatagctgtcatacgcggatttaaagaagagaacggatcctggaatataatctgcatgttctccctcagttccctgagctttctggtactaacccgggtaatatcctcccccttgaagatgatcttaccttccgtactttccaacaggtggatcatggttctgcccagtgtcgattttccgcatccggactctccaacgatccccactgtcttccccttttctatggaaaaagacacatcatccaccgcatgaagcagccctcttggggtcttaaaatacttttttaaatggtgtacttcaataattttttccatatcatgtggcctccttccttccgcggctgcaccgggtatagtgtcctggttctgtttctttcagcggcggaaccgttttttcacatgcctcagaagcatacgggcagcgggtgtgaaacttgcagccttttggaagcgccgtcggatctggaaccagcccatgaatcggtgtcagccttgtctgatcatcggccaggctcggcagggcgttaaacagccccgtagtatagggatgagcagggcggtcaaaaatatcctccgcagatcccgtctccacaatttcaccagcatagacaatggccaccttatcacacatctgagctacgattcccagatcatgggtgatcagaatcatagccgtattcagctgctctttcagtttcgtcatcatttccagcacctgtgcctgtattgtgacatcgagggccgtcgtgggttcgtcggcaatcagcagttcaggattgcatgccaaagccatggcaataacgactctctgcttcataccgcctgaaaactgatgaggatactctccataccgttctcccggtatccccaccatttccagcatttccacagctctttttatggactccttaccttttaaattttcatggatcttcactacctcggcaatctgctcaccaacggtgaataccggattcagtgcagtcatcggatcctgaaagatcatggatatcttctttcccctgatcttcctcacctctttttccttcatggccagcagatccttttgtccatacatgatcttaccgtttttaattttcgcgggcggatccggaagaatgctcatgattgccttagctatcgttgtctttcctgcgccggtttcccccactaaccccagtgtttcacctttattcacggtaaacgacacaccatttacggcacataccgtctcttcactcaatacataccggacttccaagtcctccacgcttaataaagcgcggttttgatgattcgcctccatggctatcctcctttatcagtttttcagtctcggatccagcgcatccctcaatccatctcccaacaggttcaatgacaatactacaatcatgatggtgattcccggataaataattacgtggggattactgcggatatagcttctgccagcagacagcatggctccccactctgcctgagggggctgtacgccgagcccgataaagctcaaactggctgaggtaagaatagccgtagccacactcatggttgcctggacaatgataggggaaatcgcatttggaaggacgtgcttaaaaatgatcctccgctctctcgcattaatagagcgggccgcctccacgtattccataccctgaacatttagacacgatgccctcgtcattcgcgtaaatccgggtatctgggaaattgtcaaagccagaatacaattcatatatccgggcccgagcgtggcggatattgcaatggccagtaaaatagcaggtaccgcctgaagcacgtccagaagacgcataatcaccatatccacctttccaccatagtatccggacacagcgcccagaatcactcccagcgcggcggccagcgccacagaaataagtcccaaagtcagagaatttctgcctccgtagatcaatctgcttaacatatcacgtcctaaattgtctgttcccagccagtgttctctgctgggtccagccagtgtattgaataaatcctgttcttcatatccatatggagcggcgatcggcgcgaaaaccgccagaagagcggttatgataagaacgatcagtccggcgacagccagcttattttttgccagacgcttccatgtcataaagaacatactctcttttttcttcatcgtatccatcgtctactccttattttacagtttttgccgtcttataacgcgccttgattctcgggtcaatgtatgcgtataatatatctaccgccagcatgaccaggctgaatgtaagggcgatatataggacgctcccctggattaccggataatctctctgattgatcgccgtaaccatatacattcccagacctggtatggagaaaaccgtctccgtcacaacaactccccccatcagccagctgagagttcctcccgccgctgtaaccacaggaatcagagcatttctcaacgcatggacataggtaaccttaaactttgacacgccctttgctttggcagtaacgatataatcctgccggattacctccagcatactggaacgcgtctgtctcgcaagaccgcccgcagctcctatcgccagagatatgcagggaagcagggattccttaaacgttccccagccgcttgaaggaagccagccaagtttcagggcaaagacaattgacagtacaagtccaatccagaaacccggcatggaggctcccactagagccgcaaccatggaggcattgtccacccaggtattctggtgtgtggcagccagtacccccattaccgtgccaaataacactgcgataatggtgctctcaaccgcaatagcaaaggatactttaaaccgtgcaacaatctccgttgacacctcttttttatttacatatgaaacgccaagacttctgtctaccagaagctgctttaagtaattgccataccggaccagatatggatcatccagcccccactcatcccttaactcctgtacttcttcttccgtagcttccgcccccagaagatttctggccggatcgccatttgcaaaatagagcagggtgaaaatcaacagtgttactccgaacataaccggaatcatcatcaaaatccgctttcctatgtacttaatcataattccttctccacgtctccctttcttttttttctaataataaacgtgccagtcccattttcgactatactccttttcctcccttccccgcgcctccccataatattatgcacttttatcattcttttcttttttccgtccgcgttatcttgtgtatttaagataatcaagactggttagaagcggtttgcttgtctgtttttactgattatacgctaccattcttataagtgtccaatacccgttttcaatttgtatataaaatgtattttataataatgatataaaaccattgagaattaattacttgacgtgtcgcctcatcctgattaagataaatataaatttcatatttcacaggaggaggagtaccatgccattccaacacaaaaaagcactgcaaaactacgttcccaagcagatacccgcagagaacaaaaaaggttataaaactgaatatatctatcagggagactggtatgtctgggactgcgaacctaaaaagctccgtttcttccggatttgttctctgaccactgctggtctcattgccggcttcttccttgccggagcgcttcagcggacgttctgcaataccatttctttcgtggcagtaccttcgctcctttccattgtggcactcatgctgggaacatatgggctgttttccccccttttacgtgttcccaggcttcctgagtacgattttcgttccatgcatttaatggtacaggccggattcgcggcctataccatcttaattttcattgcagcggcagcctgcttctcctctattgcctctggacgctggacctccgtcagtcgtgaactttttactgccctctgttacctgacctgcggtatgctgtcgctcacaatttccctccgctttcgcagacttccctgtcatctggcggatggggggcgcagtaactgagggcaccttacactttcaaaaatgcggctgcatccgccgacagtcccggcagatgcagccgcatttttgattcatacatttccgatgctattcttctgtttctccagaccaataattatttccgggcactgccgcccgcctctaatttatctttcacatagcttaagaattttctgttcgtctcggaatttaaagtcatgtccgaccaataaagttttgatgccgtttccttcagaattcctgcctccggtatcagtacaatattctcgcactgttcataaacttccttccaggagttcgggataaatccaaagacatttccctgggaaatataacgcagcttataaaatgcgtcattggtcacaaaggcacatttcgggataaagccgctcatcacgcatgccttatattcgctttcataacctccatcctcgtcttttaaaaaacagaatttctcgtcctttaactcttcaaatgagatagattctttctttgccaacggatgattcttaggaacaataacgtaatcataccgtgaatcaatagtcagttcatggttaaacatcggaatcccctcgtaggccagaccgataataaaatcgaaggctgagtaggcgaaaggttcgcccatagtgctgccgtgcacattgaagccgatccccggattctccgctgaaaaactgccgatcagggaaaacagtttctcattgtaattcataaagccaatattgatcctctccatcaaggctttttcattggttggaaccttgcattcgttaaccagatttaaaatctgcctcgtcatgttaagaaaatacttcccatagctgttcaacacaattttccttccattgcggtcaaacagctttactcccagttccttttccagacgtatgatacaactgctcaaggatggctgggaaacgtgcagttcttccgccgccttagacatgctttgatacttcgctatccgttcaaaatactgaagctgcagtaattccatctcatctcccccttagttttcattcatttcacgattcttttattatatcactgcagtatttttttatcgagtataattttcattttatatggtaattgactttccgtattggacagatgggaattccggtttttataatagaggtatcaaaaactaaggagggttatatgtctgatatgattgaaatgaacaaacccctggaatgtgatgtcctcgtggcaggcggcggtgtcgccggtcttatggcggccattgccgcagcagaggaaggggctaaggtaatcgtggcagagaaggccaattccaaaagaagcggctccggcgctaccggaaacgatcattttctctgttatattccggcagtccatggggatgatccgtctgaatttatccgggagatggaggagtcacagatcggcggaaataatgatatggatctcgtccgacgatacgtagcggaatcctttaaccgggtaaaggactgggacagctggggcgtgggaatgcgggagcacggcgactgggaattcaacggccacgcaaagcctggtcatctgcgggtatggctgaaatacgcaggcagggaacagaagccgatatttacccgtgaagctataaagcggggggtaacgatattaaatcaccatccgtttgctgatgtgatcacagacgggcataaccgggttgctggaggcatctgtatcgatatcacgggagaggtacccaaaatgcaggtaatacgggcgaagagcgtggttctcgccaccggcagcgtaaaccggcttttcggttctaaaaccatgggttggatgtttaataacgccggctgcccttctgatgtctgtaccggcagagccgccgcttaccgtgccggtgccaggctcgttaatctggaccgtacgggtacaggagctggctgcaagtattttaaccgcggcggtaaagccacatggctcggtgtatatagtgacatctcgggaaaaccattaggccccttcgtcacaaagccgtcaaaagaatacggcgatctggctggtgatatctggcatgacatgttttctatcaaacgcagtcagggtgaacccgtattcatgaactgctctgaatgtacagatgaacagctggattatatgctttggggattaagcaacgagggaaatgtcggaacactggaccatctggcttcggagggctttgattttcgaaagcatatggtcgaattcgactgcaaagatggcggaaacatcggcggcggcattgatatctctgtcgatgcccagtgcactgtagacggtctcttcgccgccggagatgaaacgggaaatttccgtgccgatatgggaggagcagccacttatggtcatatcgcaggggtcagcgcagcctgctacagtcgtgggcagacactgattcctgccgaagagatggaaattgtaactgcccgtgcacaccattacagtgaaatcatttccagggacactgatacggcaactcccgactggagggaaatcaatgtggccatccaacaggtaatgaccgattactgtggccctgaggtgagaagcgagcatattctcaccacaggactcagccatttaaagcggcttcaggcgaaagcggccacggttcactgtgcagacagccatgaattcatgcgctgtctggaagcagaagatctggcactgctgggtgaactcgcttttgtcagtgctctggaacgcaaagaaacccgcggcaaacacaaccgcgtcgattacccattcactaatccgctgttaaacaacaagttcgtgactgtcgaaaaggtgaacggtgttccctccaccggctggcgcgataagcataaatagaaagcgaggtgcggattatgccgccaattatagataagaaaaaatgtatcggctgtcatacatgtgttgatatttgtcccgtagatgtctatgggcagaagcagacgaaaaaactgccccctgtgatccaatatcccgatgagtgctggcattgtaatgcctgtgtctttgactgtccggtaaaagcgctatctctgcggataccggcacctgcatctatagtctttgtagatgcgccgaagaaagaatcctgatcaggaaacttgattgtctgaacaaaaaaaggtaccatccggagtctgtactcacggatggcaccttttttattgtcctttatttataaaaccttactcaaaaatcccttaagcctgtcatttttcggatgttcgaagaattccttcggctcgttctcctccaggaagtatccgccatccatgaacataacgcgggtcgcaacttctctggcaaagcccatctcatgggtaaccaccaccatggtcatcttctcttcggccagatccctcataacattcagtacttcaccgaccatctcaggatccagagctgacgtcggttcatcaaacagcatcacgtccgggttcatacagagcgcgcggacaatggcaattctctgcttctgtccgcccgaaagctgattcggatacgcagacgccctgtcggctaagcctaccttttcaagcagggtcatggcctgggcctgagcctcttcttcgcttcgtccctggagttttacaggggccagcgttaaattctttaagattgtcatgtgggggaacagattaaactgctggaacaccatccccatcttctggcggtggcggtcgatatctgtcttcttatccgtaatatcagttccctcgaacagaatatggccagaggtcggctcctccagtctgtttaaacagcggagaaacgtgctcttaccggaaccggagggtccgatcacacagacaacatcgcccttatagatgtcgactgtaatatcctttaagacctctatactcccgaatttcttgcctaagttctgtacctgaatcagaggctcatccatacctcccgccgaacgtacgcgagtggtgctttccatattttctctagtgctcacttctgctcagcctcctctccagtaattttacaaggtaggaaaatatcatgaccataacaagataaataagcgccacagcgatgagcggcatgaacgcggaatacgtccggctcttgatgatatcgccgcccttggttaaatcctgcaggccgatgtaaccggctacggaagtttcttttaagagcacgataaactcattggccagcgtcggaaccacattcttgaaggcctgcggcatgatgatataccacatggtctgtgcgtagttgaagcccaggctccgcccggcttcaaactggcctctctcgatggagctgataccgcttcggaaaatttcagccacgtaggctcccgagttgataccgaaggccaggattgccgtagttaccatacccggattaatcgcaacaaagataacaaaatacacgatcatcagctgaacaaccaccggtgttccgcggattacggtcagatacacggtacagactgcatttaaaatcttcagcttatgggtattctcataagtagaccggataatagcaaccagaaagcccagaacgattccgatgagaaccgcaaaaaatgtaattttcagggtattctggagaccgtccgtaatgtatttccaacggttgtcttcgataaagttaaaataaaagtcagcgactaatttttcccacatggcactcttcctttatattattctgcggtaatatacttatccacgatcttctgtaactcgccggattccttcaattctttgatagcggcattcatcttgtcaagcagctccgtgttgcccttctttatggcaattgcatattcttcctcggtaaatgcttcatccagaatctttaagccttcattctccttaacgaatacttttgcaggctcacggtcgatgatcactgcatccagcttatcctgggttaatgccataacggcttccatacccttgttaaatctctgaacctcagcattctcgacatcatccgcataaatatcaccggttgttccggtctgtacgccgatcttcttgcctgtcaaatcagccggcgcggcgatcgcactgccttccttcacgataatcacctgtgccgcctctgcatatgtttctgtaaaatctacatttcttaaacgttcttcatttacggtcatacctgctgccgcgaaatcagctttaccggactggatagccggaatcagggaatcgaaagccatatcctgaatctccagttccatacccatctgatcggcaatcgctcttgcaatatcagcgtcgataccaacgatggtattattctcatggtactcatatggcgggaactcggcgttcgttaccataacgatcttgccgccggcgccttctgtttcctctgctgcgcttgtatcagctgcggtgtctgctgctgtatctgtggatcctgctgctgtatctgctgttgttgtctctgctgctgcagctgttgtctctgcagtggaatttgagcttccgcatgcggtcagtgctgcggccatgcatacggctgcagccagtactaatacgttctttttcataatgaatcctcctcatatatgcactttttctgcataattatagaaataagtatcagttatacattatatagcatttttgaaattattcaagtgttattttatctggtttagtactgatttatcctctctgaagttaaaaatcacaataatagaataagctgtttcgaagacgatgtttcggacagcccctaatatgacatgtacttaatgatccagccattcacccgccaccggccgcttttccgccgcttctttcctgcttgtcccggcgtttattttcatacattctgtcgtctgcaagtctcataagttcttccatatccctgcattctccgctgtatgcaataccgtaactcacccagagttcaaacggatattccgaagaattggaaagctcttttaatgcccactgggcatttttaataccggctctgacccgttcgattccatcttccgccgtcatcagtaaaaattcatcaccgccgtaccggctgacaatatcatccgctcccgccgcttcctccagggcatgcgcaaccgccgcaagataccggtctcctgcatcgtgtcccagattatcattcaccggctttaaattattcaaatcagcaaagcatatataaaaaggaattccgttttcataatggtacagcatggcctttctggccacttcacggctttgacagcctgtcaggacatcatggaacgctaactgctccaatttctgttccagaattttatgtgaaatcagctcttttctgaccgaataactctgcctttcaaaatgctgaagctccgtcagggtatgtatatggctaattccaatatagtatccaattaacacgcagatacccgacttcattccccaaagctttatgatcggttcattgctcggagtaaaataaatcagtaagtttaagtccagatagataaacagagaaagtacaaggcataaagagaagataaggttcaccggtttgtccggattctcctctttttccgcccagtcatgaaacttatgctgaagcccccaaaagcccaatccggccagaacaaaaccggctgcaatggggtacggcttcaaactggctatactgctgctgattctggaatcaaaggccgccagagactgatttacaagcagggcagttcccgaccttgtaataaaattaaaggccagaccaatcatagccccctggattccgcagaaaaggctcatagtccacggtacccggtacagcagcgcaatttccagaaccagaaatactgcaaaaatcgtccagttgataatcagataaaaccgcagctgggagatcagcataaatacttcgtagttgataataaaagtcacaacactgcgcttccattttggaagcttctttccggtcagataatcgatgtaggcaaacatatggtgattgtatatgtaatagcatacagccacaaacatggtataataacccttccaggacagtacaagactcatttatacattcccccttttaaactgcattttgttaacatacatccgccggtcgctttcccgaagcagttcttctaaatcaaaaggctctttgtgaggagcagacactaccccataactgaaagacggtctgtagccttccctgccggcggttccaagcagttcatttaccttcttaagcatggattccaacccttctttttccgcgctgttagaaacaatcataaattcatcaccgccgatcctggaaagaatatcacttttatttaagctttcattcaggctgtcagcgatcaatttcaagtatctgtccccctcctgatggccaagagtatcatttacctttttcagtccgttcacatcgatataggcgaccgttacctccagcccgtccttttgcatggattccagcatttccattgcatatcttctggtaaatgctccggtcaggccatctatataggccagcttctgtaaaatcatctgacgcttcacatgctcggcccgttcctcctccagccggtaatattctgcttcataatgggccttttcaataattctatgggtatgggccagaaaaagaataaactggatcatcaggagaatgcagcttccaattaaaaagacggacaacagagagtaaggcagtacaaagacacaggaagtgctgtcaaatatcagatatccaagtgcataccattcaaaaaaaatcagttggttaaaccgcttttcatcactggttaaaagtgtgatccagtctgtaaaaatcttttttttccacagcatattcattaaatgaatcataatcaatgtaatacacaaagtaattacacagtatgtattactgagatagacgtctcttaacatggacccggtcaccaatgatacggccgccatgctgatcaggttaacagcaatgaagcaaacgctgaaaaaattcatccagaaaaaaagattcagcctgcttctctttccaattgaccagaatgtcattccgtagccgcagaatatcaagagatatacgataaataatggcaaatgaatgtaccagcctgaaaacaaaattcccgcttttacaaaggctcttatcatatattccacttttgttcccgtctcaccttccccgatccccggcagctgatcgatcctgagttcattcatataaagaagaaaaatgattacgatccaaagcagtgcttctccgtacttcatctgccacttatcccccttttgcttattatacagctatttaatatttttcttttattgtaccaaataatattcattctgtctcacagtaaaaaaacttctttccggctgaaacatggtgttgttcacagttaaattctgagaaggattgtctgtgaatgcagaaaagagggcaaaacacccgaaatgatcttccggctgtcctgccctctctgcttaattacctgaaacaggtatttttcacccttttcatcgttcctctgccgctatctcgattctctggtccggctttaataccgtatgaacccttaccgcccgtttccccagaaattccacttcctcaaactccgcgtttatcccacgatccgtaaactccggtaatccttccgttaccagggttaacaccaggttcacctcataatccacgcggctggtcactgacgcagtcaccctgtcctctgatttctgatacgtaaaatcgaactcgccgctccctgtccttgcatgcttccattcgaaaccgcttcccggagaaaatggtttgaaattcagcgtctttgacggtgcgtcgtagcggactccgagaatctgtgtcataaacagactggcaaatactccggctgcccagccgcattttccgcagcagttcagcctgacaacgtcgccgttcttcgtatcgcatcggtacggccaccaccaccaggaaccatccagatcacagagacgttttagctccgtcataaatccccgctccccattcatggtctcctcatccacaacgcctgagaatgcagtcgtgtatcccgggaaggtcgcaccagactcatggccccatttgatgccgcggcactctgtgccgtaggtcggattctcttcactggaggaaaatctggcataatttctcaccaccggatcgtcatacgtcttatagccgtaaaacggaatcagcgtcgtgtcagactcttctccgtcgtgcatcatcaggtttattgtgtccccatttataatatcaggataaaacgtgagagcctggtccacatactttttttcatactctgatatcggataatttttctgagtatcccgggtcaggccgccgattccctccagatactgaggaccgaatctgccctctgtcaccatataggtctcaatggcttctttaatattacgggaaatcatcccatactttttctgtttctcctgatctccaaacacctctcccatgaaacgggccatgccgtcaaaagctttccacgcacagatattggagccggtatggtattttcccaaagcgagcgcatctgaaatccacaccgtcggaaacagccacacatctccctcttttaaagcaagcacctcctccagtatctcttcgaaagcgtccgccacctcccggtgggtcaggaaaaactctctgtctgccgtcgcctcataatacaaaactcccatgagaacagcggtcagggaattactcagcgagtgggccactcccccctggtactttgatccctccggacggattccatgctctaaaaaccacagacaggcctgacggaaaaagtcaggattcagcatgctgagaggaaggcaggaatagtacatgtctttcatccagatctgcctcgtagccggaaatgtgccccagttggaaccgcagatttcaccgtccctgtccataccgacagccgagatcccctgatatacggcacgctcaaagatagctgctgtcagaggatccgcatccattgtaagatttcccagcattccacggaagtaggccagggtctcattgagccagtgaagcgtccccgccgcttcgatcacttttaccgcatcagtctcgccaggcgcatagataaccatagggaaccactggccgcagccctttttcaaatgaaatggaacgcattttgctttcttcccgcattccaccatcgtttcacattccaccatcttcccgctggcatcgggaatcgtaaaataatcgctgtccggggaaaattcgggcggtatcacggtcccgctcacgtcgccctccgtcgtgttttccagatacagaccgtatatcagagcccgcggacgagtttttccgtcggcggaaacaggcgcgtatgccagcaccgtggcggtgagactggggtgggtaaatactgctctcgggaacagattttctgccagatccgactggcacggcagggaaccactgcagagagagaccgcttctccctctatggtcattccaaagcagaacgggcctgcctggccgaagtctttggagacccatactcccgggatatcatcacaggtataacagccccggtaaaaggtcacagtcttcagcgttccaaattcgtctgcatttgccagaaccttgttattggatatgtcataggaaaaagtctcgtccggcagcttcttcgcataatagctttcccggttgccgcattcatacttcccatccttcacagcgacagaaaaaaaaggattgacgggtgcatgaaccatatctttgatcgttgtcatcatctttatctcctccaaaatagtgatcgcgcttattttctcagcctttgacgcccgacatggtgataccctcgatcagataccgctgtccgacgataaataccagaataacaggaatcagcacgaggcaggctgccgccatcattaagtgccactccgaacggtaggagccggtaaagagctgaagccccagggctaccgtatactttgcctcatcgtttaaatagaccagaggccctaaaaaatcgttccatgtgttcataaaggtaaagagtcctaccacagccagggatggctttgtgatcggcagtataattcttgtaaatatctgaaaatggtttgcgccatccaaatacgccgcctcatcgaaatcttttggaatcgtcatatagaactgacgcagcagaaagatgtagaatgcaccgccgccaaaccaggccggggcaatgagcggtacaaagctgttggtaaatccgatggctctccacatcagaaaggtgggaatcagagtcacagcgaacggcagcatcatgctccccatgatgcatgcaaataccacatttctgcctttccacttaattctggccagtccgtaggcgcagaccgagctggtaagcatggatccggccacaaccagagctgcaatgaaaagagagtttctataataggtaaagaacggcagaacctcaaatactttcctgtagttcgaccacatcatcttatccggaacccatttcaccggcaccataaaaatttctacgggagtcatgagagagcttctcaccatccagaccagagggacgatgcagaagaggctgccagccaccagcacggcatatgtaatcacctttccgactgttttcttcatttttgcactcaacatcattcacctccgtagtagacccatctgttctgaaacttgaacagaattgcggtcagtatcataatgatcacgaaaagaatccaggcgatggcgcaggaattgcccattcgcataaactggaaggactcccggtataagtagtacacataaaagaggctggcattattgggaccgccctgcgtcataacgtaagactgtgtaaaaatctgaaatccattgataaagcccatcaccacgttgtaaaaaatagtaggggtcatgatgggaacaataacgtggaacatcttcgccagaacgccgccgccgtcgatttccacggcttctatcagctgcctcggcacgtcctgcataccggcgagaaaaatcaccatggtggagcccgttgtccataaattgacaaacaccagcgtaggcagaactgtagattctgaggacagccacttattcggcggcatccccaccgcctttagcaggctgttggcaaggcccacatccggattaaatatccacatccagatcgcgcccatggctacaatgggaatgatggacggcagataaaaaagtgttctgaaaagtccctttcccttcacgcttttatttaaaagagatgcaatcaaaaaggcaaatacgatcgatgtcggaacggaaaggactacgtagatgactgtcacggtcagtgatttgtaaaagtagggatcctgtccggcaaacagccgcacgtaattatccagcccgacaaaatggctctcctttacaatgctgtagttggaaaaactcatgataaagctgattatcatcggaattgcggcaaaaaaaagaaagcccaggatacagggaaggcagaagagaaagccagccacgttttcacgtttttccctgtgggtcatcttgatttttcctttcattatgatacctcctgtctccggccggactgctccgccggtatggcgggccgcccgattccaaacggcggcccgcatgcccggattgccgcagcctctgtattctgcgcggcaatcctttactatactgagatttcatcaggaacggtttccggagtacgtaccgtcaaccagcggatctacgctcgtcttgatctcagtcatcgcctcctcggctgtcttatctcccgcccatacctgctgcagggccgccttcaccatcgtatcaatctcattgaaattctttacgtcgatttctgtcgcaattacctgatgatcgtaggtggactggacaacggcatccttaaatccttccggacgtgccgggaactcctcagaagcccagaaatcaagtttttcgtcgttggtataatattccttgtggacaggaagccagatgcttctgaacatttccgtaatctccgcagaactttccggattggtgatccattgatagagcttcagcgtttcctccagatgctccgtcgccttaaagatgatcagagaaccgccgtcaaaaaacgtggtgtaattcttgtcaatcgggagcacacctacaccccagttgatgcctgcctccgccagatccagatggttccagctgccgtcgatgtacatggccgcctgcctggaggccagcgcggttgcggctgcgggcatactgttggactggattgcagtcggagccacgtgatatacattgatcagatctgcaaagttctggattacctccgctgccttcggatcatttaagccgaattctgtcatgtcttcattcaaataagcgccgccgttggagtagataaacggcatatacacattccagttcggtgcgaacattacgccgtactgagtgatgttattggcgtcgaaagccggatctttggcattacgtccggcggaatccagcgtcagctcctgggctttctccacaaattcctgccatgaccacgcgtcctccaccttcgttggcggtgtatcaataccggcgtctttaaacagatcctcattgtacatcagagacagggtgacatttgccataatggggccggcagactctgtcggcgaccagttccaccaacaggtttccagataatcatccacagaaacctccgggtcgtccttgatcagatcgtaaaagttatagatcagtccatcctcgccaaactggcatttccatgatgcagagtaactgatatccggcgtctcccccgccgcaatcatcgcgtttagcttggtaaggaaatcgtcactcggaatgtgcatggccttcaccttaatatccggattggcttcctcaaacgtctttaccgacgcttcaatcgccgttttctccgcgccgcttccccagtaggtaaaggtgatctccacaggttctcctccggtttcgctctgggctgtctctgtctttccctccgcagtacctgcccctgcagtcgtggtattcccgccgtttccgccgcatcctgtgagtaacatggtacctgccgtcaatagtgctgccagctgcatcaaatgattatgcttcataaataataacctcccatttttaatttctgattcctgtctgttatcggccgtttgattggaaaagcttttcgatacctttattttaaaggctggagccggtgacttccatatggtttttattggaaaacagcactttcattgtttatggtcaatgctgaactttccaattacaaaaaaaggcctcagaaaactcaggccgtctctcttccggcttttgttccgggagaaagcttccgagtatttctgcggtcctttttataatcttacagcagatgtatgatccaaatcctgtttatttaatgcgggagactgcctccctgtttcggaatcgtgacgaccaccgcagttccttcccccagctgcgaatggagagacacaccgtaggcatccccatacaggatcttaatgcgccggtccgtattggccactccgatggaagtaccggtaaaccggagtacttcttttaccctctgctgtgtcatacccactccattgtcttccacggtaaaatagatattctcttcatcggtttccgcgctgatttccaggatacctttttcttcagaattcttaaacccgtgaacaatggcgttttcaaccagaggctgaagaaacagttttgggacctccttgcccagcaattcctccggaatatcgaaatttacctcaaactggttctcataccggatctgcatgatttcaatatagcgtttcagccagtcaatatcatctcttaaatacaccagctgctttctgctctgactggtatactggagcatccgggacagatccacgatcatccggctggccttgggggtatctcccgccaggcacgtccagttgatgatattcagggtgttatacagaaaatgtggattcagctgaatcgtcaagatcatgatctcaaaatccttctgctgcagcttcacttcgtagttctcgtgaatcagagccttgatgttgcggctcatctcattgagcttttcgtaaaagaaggagaactcatctctgtcgtcataggtgatcatgcttccgaactgccccgtccccacctgatcgatcatatggatcgtaccgtaaatcttccggttaatatagcgggaaatcatataggaggagaccgcagacaaaaacaggagaatcaccatgatagcgatgatatagctccgtaaatttcgttccacatctttaatcagcaggtggaccggaacccgggcaaccaccagccagtccgttatctcgctctgggcgtacgttaccatatacttttcccgcccgtccatttccgttgtgtacccggaattcgtccccttcttaagcgttcccagccagtccgcctgatagcggtggctggcgtcatatgcgggatcagaactgcatatcacgtttccctctcggtcgatcaccagataatccgcgtcatttacgatgtcctttgccccgtaacgccggattaaggacatcagaaattcttccgtataattgatcaccaggatgggcttctccacagtctcactgagccgctccacccgtccgctggacacatcacagaaattcatctggcagacagcggtaaagagtgaaccgtattccacctgggtatccgtcagattactgattccgaacatttcggtatagctgtaggtcggaatccagcagaccgaacctttcgcctcccttgcttccttctcgagtctggaattcaaaaaagcgcccctgggataaaagttcttatcctcctctccgaaccggaaataggatgtgaccagatgaacggaatagatgttgctgccccagggcttatacgcatttaaaatggcagtaatccgggaattggcgttcatgagggagacttcatccgtgctgtccagatttttaaagatctcgtaaagacgggagtcgatatttaatttctgagcaaattcgtcgatatagtcaaattccttgtccacaatcacactgctcttttccacgctctgcaggaaatatccctgtgcctgctccgtaatggatttgacggaattgcggtaaatcagaataccaaaaataacaagcggcacgatcgtgagaataaaaaacaggagaagcagctgagttctcagcttccaatatatctttctcttatacttctgcttccactttatcataggacatcactccgttctgccgctcattttcctgtattcctcaggtgtcatctcatagtagcgcttaaatgcacggacaaaataattggcatcccggtaaccggtaagaaccgcgatatcccgaaccctggattctgtcgtaagcagcagttctctggccttttccatccgtatcctgatcaaatattcggaaaacgtgctcttatacgtatttttaaacagcgtactgaaataggacgggttaaaatggtatttctctgcaacgctttccagattaatctcatccatataatgattttccagatactccccacagtcggtcataatatcccgcccgtttccctctttctggcagttcagttcctttcccaagtccagaaagaaggcgtagaggcttcgtttcagcagcgtcagagtctctgccttctgcagactgctgatctgtaaattagcctcttttttaaagtttcctgagatgagaacctcgaaatttctcatgatctgaaacagtgcgaatatcactctctgctttaacagcaccggaggcgaaaagagggttttgaccccttcatcgatctcggcagccagaagttcataggcgctccgaagttcccccctcttcaatccttccacaacgggaagaacatggtaagtgactgcatcggaatttttaccgatccgttttccgatggtttcctctgagagcagtgtccccggttcatagaattcgtactggctgtaacggactgcctcctcataggatacggacgcctcctcatagagattgttcaccatgccgccgggagaacagatcattttaccagagggcagaaccgatctcatatggccctcaatgacagcccaccgagccgcactcatggggtctcctgacagcaggcagaccgccatcatatccggctgatgctcgagaaagaaggggtaggaggaacaggggtccagggattttttcatctgatatttcagatcgtttctctgctcctcactcagttctcttcctccgcccgccacatggcagcagaaaatatagcccggccgttccagctgaaacatgtctttcagcctctctttcccggcaaaatccggcttttgtacaaacaggttcatcaggtgatccatatagaccggcatcgtctctgtcaaacggttctcaatgctttcctgtctgttcctgcttttctgacgctctgaaattctttctgtgaccttatttaaaaccgtccggatctcatcgctgtccaccggcttcataatgtaatcggccgcctgatattttaatgcctctctggcatagtcaaactgtccataaccgcttaaaataatcacctcggcgtccggattctgtgccttcgctgcctttaacagttctaaaccgttcatattggtcattcggatgtcggttatgatgacatcgcagtccaccagttcaattacttccagagcagtcacgccgtcatccgcctccaacagcatgtcctccggcctcatggcagacagaaggttcataagaccttttctgtggtccgcttcgtcgtctacaatcaataatttatacatagcttacattcctttaaatgtcagtggcagcggaagattctctctgtacaatttcgatttccactccattgggatctcttaccagcataccggtccagttcaacttctccacccagaccggctccatcagtactttcaccccatacgcagtacatcggtcaaacagtctgccgatctcatccgttgtcagagccatatgacgatagatgcccttgtcatccgacggttccggatgcgccggactgtcattatagtactcaatcagttccagacgcgtacagccatttaagttaaaatacgtaagtctgtggtcccccatatccacatcatacaatttttccagtccgagcacctcctcatagaattgaaagcttgcctctctgtccgccatgtttacggttatgtgatccaggcctgtaatcatgattatctctcctccttttataaatgcttttctaaaagtcatctatagtttaccacgagtttctttcgactgtcaaaccatgaaaaatgctgactgaatcctgataatctgacaggagctgattacagctgtaagttccccattgacttatccccccactggaattaaactttagaaagacacaaacccgactgtataaatattaatctgaggtaatcaacatgaaagaattcattataaaaacagcatggatgatggttccgccacagccatattctgcttttcatatctgtattacagctgcaggctttctcattgccgtgctggcagcttatgttctttccaggaaaatggtgagaaaaactttgatacggctgcttttcttctgcggcgttatactggccggcagcgaaatttataaacagcttttcctgtattttgtggtaaatcaggaaaaatacgactggtggtatttcccgttccagctgtgcagcctgcccatgtatttctgtctgctcctgccgcttgtgaaaaacaggaagctgcagctgattatactgacctttatgcaggattttaatcttttaggcggtattatggctctggcggagccctccggcctccttcatccctactggtttttgacgatgcatggactactgtggcatatcctgctgatctttatcgggcttttgatcggattttcccatgaatctgattccagttttaccggttacgtcaggacactgccgctttttctgctctgctgcgggatcgccacgctgattaatgtaacggccaggccgctgggacaggcggatatgttctacatctccccctactatccaaataatcaggctgtattttacaccatttcacaaaagattggcgtgctgcccggaaatatcatttatctgctctcgatctgtatcggcggccttttatttcatatgatttttgcacggcttttcaggcatacagaataattgacattttcgcctgtaagtgttatcataattgcttattacaggagggatcatgatgtcagataaaatagaagaaaaagtacaggaagcacttaacaggcacaaccgcggatacaactgttcccagtccgttgcctgcacattttgtgaagaactcggaatcgacgaggcaaccatgttccggatgacagagggtatgggactcggcatgggaagtatggatggaacctgcggagccatcggtgccgccgccgttttgtcaggtatgaaaaacagcacggtgcatctggatcatccggattccaaagcggtctcctataaggcggccagacagtgcttaaatgagttcaaagagcagaacggcagtgtaatctgccgtgatctgaagggcgtcgatacgggaaacgttctgcgcgcctgcaatgactgtatcgccgacgcggtgcggattattgagaaggagctttacggggaagggtgaggaataaaccggcagtccccgtcatatccggctccgctgtattatgatataacagaaaagagcaaagcaggaggcagggtcttaaatggccctgcctctttctccctgcttattcggaaccagccgtcacggacttcttagctccgctcacacggccgcatcaatatgcggcgccgcgtttcgacaagtctgtctcatagctcatcatatcgttaaatattacaaactccggtttcggtaagagaaacggctttaccgttctccgcagttccccggcaaacctcgcgcagactgcatctctctccctcttctcttcctcatcaagcggcttgagcaggtaatccagagataaatggtatcggaatgtatcatgccaggaatgcctgattccggttacctccgccacttgatcccggtaggcgcgcagcttgtccgcgctctctttatcatggggttttaatataatcctgatctcctcacagtcctcaacctccacgaataccccttccggaagcggcacagcagcaacgcgttccttcagaatacggtcaattccctgaaaggtttcgtccgctgccattcccttcggccagtacggcgttccccggtcgatctcccggcaaagggtcagcaccgtcatatggaaggacgagggcggcaaaaatgccagtttttgagaaaatccgcactttttcagcgcctcctggactctcacggcctcatcgaagaccggccatctctgatcatttaaatagctgactatggtatttccgtaatagggaagcggactgccgttttcatcaaatttatatactgcatcctctaagatcatcgtaattctttctcctttatcctctttcttttaaagccgcgctctttctgccatatacaaacacgattgtcgccgtcgatacaatcataataatcacagaatagacgaatgtcagcatctgcgcttccggagatgaatccggactggttgcggtatttaagacaacacccaacggctggaacatcggatggaataagaacacggaaacattgtattcggccagctgctggatgaagttcagcagaaatacggacaggatcgtcggccacagaatcggaaacaggacctttaagtaagtcctggccggcgaagcacccagattcttggccgcttcctccagggagccgtccagccccgcataggcggcctttatcatcctcagcgtatagggcagttttaagataatatagcctatcagcataatgtagaccgtcccggtcagcgtcgtcccgaatgtaaacggagtcggcatgtcgaaggtcatgaccaggccgagggcgatcagggttgccggtaaaaaccacggaatctgcagcagcatctccagcgttcccgtcagcctgttgtgatatttcgtaaggattctggctatgaacagcatgatggtgaccacagtcaccgcggccgcggccgaatagagcacactggtgagaaccggcttcagtcccgtcgtcgagcggaacacagttaagtaattgttgattgacagattggaaagactgatatttccggcgtacagatcctgaaccgacataaaggagaagataaatacgaacagcagcggaattgtctgaacaagagccgcaatgtgcgccgtcactgtaacgataccgtttaaaaccggatttttaattttcattttcttaagcggggtctttacttttgaaaccgacacgtaatttccccggctctcaatataattcgagattcccagcacaagaatcgttatgattcccaaaaacagggccaaaacggccgcataattcctcgtcgtcagtgtcttggaaaacgacatgaccaggggattgatcgtctcaaagttttcgccgcccaatacctgaggtgtggcaaaggctgagataccgacaatgaaggtcaggatggaggccgcaaagatggagggctttaaagtcggcagtacaaccctgctcaggatcttttctgcacggactcccatattctgggccgcctcgatggtctggtaatcgatattctttaaagaatcccttacaaacatgatatggttggaggttcccgcgaaggtcatctcaatcagcaccgcgccaaagccccgaaaccagtacggattcatatccgggtaaagctgcatcaaattagccgtcaaaaatccctggctgccgaacaggaaattatatgccgtgacgagaaccattccgttacagattaacggggagtggaaggcgatattcagccatttggagcctttgatatcgaagtagtccagtaccagaatttcaaaaataccgagcacattgaccgtaaccgtaagcgatacggccagtacaaaggaatgaatcagcgccctcaccaccctggcggaatgcatgatctgcatgaccggcttcgcgtcaaattttccttccgggaacagcgtgattttgagcagggacagattcggaaatagcaggaaggtgaagatggcccagcccagcacaaaggtcagcagggtaaagcccagattcttcttaaaccggtaattcgcagaaagcttctccatacctaaccctccctgaaaataatgagatcggccgggtcgatgtacagaactgcctccgtgcctttttccagcttttcatcattctttgtgttcacactcttgatttccgtatcccccgcaagaaatgttctcctggtcgtaattccataaaactcttccgtctcaaatctggcctgcagcttataataccggttctcctccccagcgtggacggattccttcacattttcaactctcacgtagatatggtccgatggatttaaaccggcgcctttgttctgctcgttcaactgggtgatcagactttctgtcatacggttcgtatcgccgataaacgtggtgacaaactctgaggcgggatggtaatagatttccctcggcgttcccacctgctcaacgcctccattatgaaacaccgcgatctggtcggaaagcgtaagcgcctcctcctggtcgtgggtgacatagatcatcgtcgttccggatgccttctgtatctttttcagctccagtctcagagacttgcgaagctttgcatctaagttggacagcggttcatccagaacgatgatctcaggatttaacgccagggcgcgtgcaatggcgactctctgctgctgtccgccggaaagtgcggatacatttttcttcagctgctcgtctgttaaattcaccatggccgagacttccgcgactctcttgcggatcgcgtccttcgcccacttattctctttcagcccgaatacgatattttcttccactgtcatggttgggaacagggcatagctctgaaataccatcccaatcccccttttttcaatcggtttgtcggtgatgtcttccccttttaccacgatgtttcctttcgtgggcttgataaagcccactaaggaacgcagcgtcgtagtctttccgcagccggaaggccccaaaaaggtaaagaattctcctttttttacttcaagagttaaatcctttatagcggtaaaatcaccgaatttaatttctatattgttaaattttatcatgaggacattctcctattcctgcaatctatctgcacatgcccgattaatagatttcaagctgaatctttgccacccagtcatccatcattgaatttacgtaagcccagtccgcttcctgcggtttataatgctccttcacctctttgatgatcgggaccatactgtcctcagcctttttattcgcaaccatattgccgttttccgctgcatatgcaccgatcacttccgcactgcccagccagtttgcaaaacgcatggattcctccaccatttcctggtctttatttgccacaacggcaatctgattcgtattcgtaggctctcccacctcggtatagacaatcagtggttttatgttatagctctcgctctttccttttaatccggaggcaaaggtaaatgtaatcggcactttgccggaggccatatttccaaaatcattctctccctttggggtcttatagccattgtcaaagtaagcttttatcgccttccagccctcgtcggaaacgcccagttcacctgccgggtccaaatactggacgagaattccgcccacgatagcccggttggtattgccgtcaaaggttgtcggaaccgcgtattttccgtgaaattcttctttttcccacagatcctggtaactcttcggagctgtttcttccgtataaacatccggattgcagaccagcagcttgggctgaatctcataggaccaggaatatccgttttctttggaaagccctttcacatcctcagcccattccggcgtgaactttgccagggatccggcttccgccatggcggtaaactgatcctccgaaggcccccagattacgttggttgtcggattattaatctcagatataacgcgtgccgtcgcatctcccgctcccagcgctacgatttccacattaaatccggcctcctgcgcatgctctgaaagccagacgtctcttccgtcgctggcattgttcgtgacaagcacaagccgtttgccggtcggcttctgggacagtaccgcctgattatctgcaggcgcctcctcttcgctgttcccctgtgcctccgtctgccctgcatcggtctgctttgccgcctctgtctgcgccgcagtatctgacggaaccgcctctttctttccgcatcctgctgtacttaccgctgctgccgccaaaattccaattaaaaccgcatttttcaatttcatttttcttcctccatttgatttaaatttttagcaattgaattttttcataagtgaaatgcctcaatctgtcataaaacgcacatacgtcctgtcatcgaagcttgtctgacctttttttacacccttggtcgataaatatttcttataacagcccgggtcatgaatcagaatttcttttaaattctcttctgtctttctcagagtttctttcacctcaggatacccgtcgctcgtcagaatcacttcatgagcaccctctctgagccggatcacttttatcaggctttccggtatggcctgtccattgaagacggagtatccatattccgtcgtgtcgtcgttggcatagattgtcgcccgcagaatccagggcagaataatttcccttgcagcatcatgctcctcccattcttcccggtacagacccgtcgtatttctgcgttcctgttccagcgttgagagaatcaggctgcgcatttccgaaaggacgacatcgctctttttcggattcaaatatacctcgccatctacgaccgcctgacagtcgcctatcatccatatttccctgtaaaaagcggaatagatcacgcaggctgcctggagccccttctctcctctgtcgtacgggaaatcaatctggtcataaaatgcagtaatctcaccattcacccgttccacaatctctctcagcggttcatcaccgcgcagcgtttccagcacacggtaaatgatttcggaagccagttttcccgttgtctttccatgataaagaaaatcagttttcgatgtaactccgtcaattaccgcaatataattttctgattgaaaaaaggcgtcttcgcacaaccgctcatttaccttgccttttttaaacgtttccagaatttttattgccaccaccccctgtcatgttttatgatctgtcaaacaacaatctttgttatgtctctgtcctcggtcaatgcggcggtcatatctgcggcgtcatagtcttttgaagcgctgatcatcgtctgaagctgaattttttcgcccatccgccttgtttccatggccaggatccgataccccctctcctcacacagcttttttacatagcctgttgtctctctgcttttttgaatgtcatctatgtactcgacgattatcttcctgtcctcttcctgcttatccgccagcactccgcggcggcccagaaagacttccaccagaataatcattgccgttgttatcactccgatcagatacatgcccgcgccttctgccatgcctactccgacggtggcccagattccggccgacgtcgtcaatccgcttaccctgttattcttaaacaggattacgcccgaaccgatgaagccgatggcggttaccacccccgcggccacacgcgacggatccagcttgatatattcccccagcacatcgtaaaatccatatttcgatatgatgatcatcagcgcggacgagaccgctacaatcacatgggttttactgccggccgccttattcctgtttttacgctcatacccgatcaccccgccgcatatgccggcggccagaattctgagcacatactccagttctgtcataacggcaagactcatactttatccctgctttcttttatttactctttcctgtatagtcttagtatacttccacagcgccctgcttaacagataggaaacgctacaatacattgcgttttatctcctaaataagtgtaacttttattgaattttacaattgggctgtttcgttattttaaattttacataaattatggcaacattttaccgatactcttctgtactgctcgtttatattttaacactttcaccatatcacatttttctttgcagtaatacaaattgcaattttcttagtgaacggatataatggatacagactgaaaaccatgaggaaggaaatcaggaaagaaaggggatgtttgaaataaagaaaaaatcggaaccgatgccttactatcataaaccgcccatgcggtttcgcgattttgagattcattacaaccgggactactccttaaaccatatcgtgagaaataagcacagttattatgaattctattttttgatttcaggagatgtcacttattacatcgaagacagggagtttgatttaaagccgggcgctatcatactgatcgcaccggaacagtaccatcaggccacgatcaatacccggacgggacaggcgtatgagcgctacgttctgtggctggaccccgaatatctaaagcggctgtccacggataagtcggatctgctgctgccatttcaaaagacttatattacaagtgcgcatattcagctgaccagagatatgcagattctgatcaacaatctgctggaaatgattttgaccagctccgtctctcaggagtacggcgccgatcttctcacaaattcctatattatagagcttttagtccacattgccaggatgaagctgttccagcaggatacgtacttagaccagcggctcaacgataatccggaaaacagccccatcatcaccaatactctcaactatatcaacagccacatctatgaggatatcaggattcaggacattaccgactatctctacatcagccgctcctatctgtccagggtattcaacgaggagatggggctttccgtccaccagttcatcgcaaaaaagaagctgtttctggccagacaggatctgctcggcgggacgcctgtaaaggagatctgccagaagtacagttttggaaattacagttctttttaccgggccttccggacggaatttggacagtcaccaagggctgtcagaaaaaatgtttaagaggctaaaggggctgcgggcaccgaagaggggcggaactgtagtgcaatacgggaaaaaagggattgacacacgtttttttttgtgttattatgccttcatcagataaaaaagaatagttttatcccattttaaggaaccatatggtttactgtttctggaactaaacagcccgccatatggtttttttgttgccattttttcaatcagggaggttattttatgcagaacaaacaggattttatgaagacaaaaccggtttttccacttttattgtccatggcggcgccgatggtgctgtccatgctgattcagtcgctttacaacattgtagacagtatctttgtggcccggctgggaacggaggcgcttactgcggtctctctcgtttacccgctccagaatattgtcctgtcgctttccgtgggtgtgggcgtcggtatcaattcggtcatcgccagaagacttggtgaacagaaagcggaggaagccaacaaggccgcctcgattggtatgggactgacctttttgcactgcattctgatcatccttttcggtttgctggcaacgaggccgttcctctccatctttacttctgatgaacagacgcttcaatgggcctgccgctactcatacatcgtcctgtgtttctccgcaggcagtctgattcatatttgctttgaaaaaatattccagtctgtgggagccatgttcctgacgatgatttccctgctggttggttgtattacgaatattattctcgatccgatcctgattttcggattgttcggccttcccgccctgggcgtcaccggtgcagcagtcgcaacagtgatcaggcagttctgctccctgttcgtttatcttgtgatatatgcaagaaaagatatcggtattaaaattagtccgaaatacttttctctggataaaaatacgattttgcagatttacagcgtgggaatcccctcttccctgatgctggcagcaccttccctcatgtcgggtgttctgaattttatgctgaccggattttccgatatttacgtggcgattctcggtatttacttaaagctgcaaacattcctttacacgcctgcctccggtatcgtccaggcgctccggccgatcgcgggttataattacggggccggcgaacgggagcggcttcacaaaataatccgctgcagcatgctgctggttgccgccatcatggcagccggaaccgctgcggccctcatattcccggaacagatcttctctatatttattgatgacgccgctctgatcggtccgggcagcaccgcactgcgcatcatctgcctcggcttcctcgtatcctccgtcagcgtcgtatacgccggagtgtttgaggcactgggctgcggcaaaaaatcactgctgatctcgctgatacggcagattatcatcatcattcccctgggctttatcctgtcccgaatctgggggccggtcggtatctgggtatgctttccaatcgcagaattcctggcggccgggacggcgcgttttatggtgaaaaaacagaatatttgatgtggtaaaaagagttatcatttcgcctgcacacttcgatttgcacagaaatgacaaaaaatccgatgtgcccagcacatcggattttccctttaaaagcctgttttcgccccgtcatttatacttctgtttcgtcatacaaaatctcatcaatccttctcaattcctcttccgtaaacgccatgttctccatcgtctttaaattctccacgatctgttcggtacggcttgccccgattatcacagatgtcatacccttcttctgaagaacccaggccaaagccatctgagccaggctttggccgcgtccgtcggaaatctccatcagacgctttgtaatcacctccacggaaccggtcacatgatttgcatttaaaaatacacttgccccggctgctctggagtctgccggaattccatttatgtacttgccggtcagtatcccctgtgcaagaggtgaaaatgcgatcgcccccacgccgtgcctgttcagcacatcgagaaccgcttcattctccctgtgaatcattgacatctgcatctggtgaatcagacagtgtatccccattgtgtcaagcatccgaaccgcatcttccgtctgctccgcgttataattggaaattcccacgtataacgcctttccgctcttaacaattcccgccagagcgtccatcgtctcttccagcggggtatccaggtccggtctgtggtggtagaaaatatccacataatccagcttcatgcgtttcagactctggtccagagacgccaccagattcttcttcgatccccattccccgtatggtccgggccacatataatagccggcctttgtggaaataatcatttcatcccgataaggcttcaattcctctgtcatcacacgtccgaaggtttcttccgcgctccccgcctccggaccatagttatttgccagatcgaaatgtgtaattcccctgtcaaaggattccagcagcatctcccggcatccggtaaaatccgatgtattcccaaaattatgccacagtcccagcgacagggctggaagaagcaggccgctctttccgcaccggttgtatttcatggtctcataccgttctgcctttgcaatgtactccatttctcgcctccgtctcattatcgtaagtttctttatcgtattacagtactagaaatccgccagttcgtcaaaattacgctttaacccatcggccagaactctggcatcctgtccgaataccacccactggattcccttgctcacagcctttgctgcctcttccctcgtcgctccgatggccgctcccagagtcaggcctttggccctgacccgtttacagatatcgtcatagaccgctgagagttcatactgcttctcacctgtctggccattaatagaccttcctaagtccgcggctccaatgaacagggaatcaattccctgcacttccatgatttcatccagattttcgtatccctccagcgtttctatctgcatgatcttaagcacacggccatatgcagtctgaatatactcatcctcgttgatcagtccataccgtatggctctgatcggtccctggccgcgcactccgccataatcgggataggagcaggaacgaaccgcctccttcgcaacctctgcgctgttcgtgaacggaaagataattccatccggtcccatgtcaaggatcgccttcatggctttcgcatccactcccggcactctgacaaatgcggcacagcccgccccctgagcagccacgatgtgatgaaagatttcctgtctgtccagtggtccgtgttccgcatcaatccacacgtaatcgtaaccaatatacccggccatctcacttaccatgggatcagccatattcaagaagaatccttttaccagctttcctgctgctatcttttctctgattctgtcagcatgattcattctattttcatctccatttctgtccgaattttacggactctttttttcaacccttaaccgctcccagcgtcacgctcgataaaaacttatcctggaacataaggaatacaataataagcgggattgtcaccagcgtacagccggagagcaccagttcccacggtaccgaccgggcggaatccgtctcatttaaagtcggcaggataaccataatcggcatcagtttctgcttcgtcagcatcatcttcggatacagcagctcattccatttgcttaaaaactgcagaattgcaagcgcaccgatggagggggaagaaatcggaagaacgatcttagagaagattctccactccccggctccgtcgattctcgcagcctcaatcagagaatccggaatcgacatcatatactggcgcatcaaaaacatggcaaatacattggccgcccccggaatgatctgcacccggtaggtattcaaccacttcattttggaaaaaatcagatacagcggcgtgatgtttaactcggccggtatcatcatggtgataaggagcagcaaaaacaacacatttctgccgcggaatttgaactttgcaaatgcataccccgccatggaggccaaaaggcaggacagcgccgtataactggccgccacaaagatggaattgccaaaggttcttaagatcaagccggaattaaagcttaaaaggcgcttaaaattcgccagtgtcggatggaccggaaacccggcagagtttgtatacagctcctgggaagtctttaaagagccggtaatcatgataaacaccggaaacactgctataaaacatgcaaagataacaacggcattcagcagaaccgctttcccctgtcttttcgtcattcctcatcacctcccaaaaccttcagctgaaccagtgtcagaaccagaatcactgccaccagaatccacccggctgcagacgccattccaaactggccccccgacatactgttgatgatcaggttgatatagggcgcaaccttcatagacggatcgtagttctgtgcaagcagcagattcggctccgtatagattttaaaggaaccaatggcgttggtgataaatgccaccatgaatgtgggcttcatcatcggaagaataatatgccacaggttctggagcccgctggctccatcgatggaggccgcctccgtgatatcctctccgatcgtcgtcaggcctgataagtagatgataaaataccagccgatgccgcgccatgacagaagtaccacgacagtccagcgcatccaggccggatctgtcagaaacggaattgtctttccaagtatctggttgataacgccgactctctcaccgaaaataattttgaagcagagggaactcgcaactaccgcacagatctgcggcagaaaaataagcggtttatagatggaacgcatttttcccgcactttttgacttaacggccagagcaagcagaaacgagaacgccatcgtcggaataaagctgaaaataaagtaaaagactgtattccccagacatttccacattgtatcgtaatgaaaaagatttttataattttgcagtcccacccattttgccgcgccgtatccgctgtatttgaagaagcttaagcccagggagtagagggccggccagagaaaaaacagcagataaattaccataaacggcagcagaaacagataggggacggcggttttctttaatttataccggttcaaactgtctatgcctccttgagtatcgaattgtattcaagagaaaaggcgacgaaatgcttcatcgcctttctccctgcacacttgccggatcggcccattctacccttttattcgaacggattcccgatctgattgatcatatcatcctgagccgccttcaacgcctcatcgagtgtcatattctcctgtaaatactcatcaagatactgaagaacaatcttctgctcctgggaagaggccggattatatgggaaaatctttaaatattccatggcttcactgttcaccttgccaaggctgcatgcataatattcgttgtcaccgttatagtactcgtcttcagctgcggatttcaaagccggaagtacaccggttacatcgaaaataatcctggctgcctcctcgtcgaagcacatctttgtcataatctccgctgccagttccttatttctggctgctgccggaattacccagattgcaccgccggcgtcagaaccttctctgatttcttccggccatggggccatagcccattttcccttctggctctcaaggttaaaattcttaaagtctgtcttgaaccagccgccgatgagctgggaaacgatctcaccattatcaaatgccggcgtccagtctgcagaccactccgccgcgctggacatcacatcagaatcatacagcttcttcatccgttcaaaggtcagcttaacgtcttcattggaagccaggttatagttaccgttttcatcacagaagcccgctcccgtaccgcttaacatcatcatgaaatcatatccctgagtcggtacattataattttccatgcatgcattcggatatttctctctgattttttctccggccgcgataaattcatctattgtcttcacttcccgcacatccacaccgcactcctcaaagatatccgcgcggtagaaccacacttttggcttaacctctctcggcagcgcgtaataggtgtcatcgtacttcataatactctttgcggcgtcgataatcctgtcctcgtattccgctatgtaatcatctaacggataaagaacgcctgcctttgcaaattcgggaagctgggtgtaattcaggcgtacaatatccggaacattttcaccggaggttaatgcgagtctcagtttatccgctacatcgccgtctccgctgcctcccagctgtacttcaaaatccaccttttccgccagatccggattctgttccaaaaatttggcattgatcgtttcatagttttccgtggaagggaataccatcatggacagggtcgtcttctcccccgatgcagccccgcctgtggtctccttcttctctcctgcttcagtctgtaccgcagactctccgcccgccggtgcctcactctttgtcccacagcccgcaagcatggttcccaccatcattgcactcagtgcaagtgccgtaattcttctccttttcataactcatgtcctttctctcgtggtttttcataactgttcaagtaaatactggccaatatctctcttgtttgtaaccctattatattggatttacaattttctgaacatatgctaatattactatattctttaaaatcctacgatttgttgggaaacacactggtaatttatggagaaaagggggattttcatgtttcatcttctaatcgtcgaggacgaaaaacgaacgcgcgagggtttatgccgccatatcgactggaacggaatcggagtcgatccagtaactgctgtcgccggtggaatggaggcgctgctggcagtggatgaaatccaccccgacattctgctgtccgatatccggatgcctcatatgaccggcatcgagctggcatccatcatccgtaaaaaatttcccagatgtaaaatcatctttctaagcggttatgcagacaaagaatatcttatgtccgccattgagctgaaagcagtcaactacatagaaaagcccatcgatctgactgagatacggaatgcggtggcaaaagcggtggtgcagctggaatccgagctaaaggacgagctgatccacagtggttttcagaaaacgctccccattatccacgaagaaatcgtctctgccctcatctccccggatttaaactgggaaaagttcagccaggactttatccccctctattttacctggagtaaaataggaaattattctgtatcctgtatccggccgggcagaaagcttaccaatgattcagaggcaaagaaatttctcgcctgtattttaaaagcgcttgagaaggttcccggcctgacctcagatgattatctgtgtactatgatgtcacccaaggaagctgtactcatctgcagaaaccttttatccccggccatatcctccgtttttaaagagctaaacgctgcgttcacggaaaacagccttccggaagcttcattcggaatcagcactccctgtctctctctcaccggaatttcggaactctatcacgcggtatcccggagtacagaatatgaaagcttctattccgagaaatacggaatcttcgatttaacagtaccgcttcatacaaaagaagctcctaagaaccttttcagctccaaggagctgactctgtccggtgcagagacgctgtttgataccctgtcccgtgaaaaatatacggatattccctttattcgcggggaactgtataaaatctatatgatggccatagaaaaaagctgggatgaaaaagtggtatcctgggatgaatttgagatgttctcttttgaggaatacagggaattgatttgctatgaagtcaataccatacagcttctgggaagcgatatctatgacattaaaatcaaaaatgcggtacactatatcctgtggaattattcagatgcagacctttccatcaaagtcattgcggaccacgtaaatctgtctcagaactatttaagcacactgttcagaaaacagaccggcaccacgatcaatgattttatcttaaatatccgcacggaaaaagcgtgccgcctcttaagcggaacagatctaaagctttatgagattgcggagaaaatcggtctttcagacgccaactacttaagcaccgtcttcaaaaaacggtatggtgtcacgcccacactttaccgaaaaaccgtacaatgaccccggacggagtacggaaaagccctgcagaaggagaatacccatgaaaataatccgtaatatcaagcgctgtttttcttccatgaattatatgaagaagctgtttttctcttatttcttcattatcttcctgatactcatgatcttctctatgaccagttcctactattcatctaaatcggagacgaagcaggcgctttatacagccaggaacatgctgcatcagacgacggaattccttagctacaaggtgacatccattaaaaatatcatcaacgtaatcagcgctgatgagacgattcagacgctcattgctgcaagtgatgaatttacccgggagagccagaacaactggattattttaagcaccaccgccaagagtatcatgtataatgccaacacctccaaggacattcacaatatccgtctttacgcgctcgagggctccatctctttcgaaaacagtaaggaattcagccagctgaccgacgaggaaaaagaacggtggaatgaacgttcagctgagaagaaaaatatcagttctctgtggcttcccgcctcgtttttcagttcctcagataaactcggggcaatcacctatgtgaagaaaattccggattcaaaaaacctcaatcaatacctgggtactctgactgcaaccatcaacaattcggccttccgggatgtgattgcccaggcggcagctactctgcatacctccgtactcctttataattcttatggagagacgatcatgtatcacggagaagaaggtttctttactccagaagacattgaagcgcttcaactgcagacagtttccgacacggattcagagctccagcggatcaaatatcatggagaaaattattttatcggaatccggcctatcagcggctgcgactggaccctggctattttaactccctcctccgatatcttaagtgctacaaggcgttatcagcagcagacactgattctcgtcattctgctgattgttctcctgattccggtactgtaccggacttcaaaacagttaagctcacgcatctatgtgctgaaggaatatatctccagagccgtgaacgccaattttgaaatcgaaccgctttgcaacggaagtgatgaaatcggcgttctgacagacagcttcaatgatatggtcagacagatttccggtcttctgaaggaacagtacaaactgggatatgaaatcaaggatctggaatttcaggtgctgcagtcacagatcaatcctcactttctttacaacaccctggatatgatctactggctcggaatcgacagtcagacacccgatgtggctgatgccgccagggaacttggccgtttttatatgcttagtctcggccatggggaaaccatcgtcacagtaaagaatgagctggaccatgttgccgcttatgtcaatatccagaacatgcggtttgaaaaccattttaaactgatcactgatgtgccggaggagctatacagctataaaatcattaaaatcattctgcagcctctggttgaaaatgcgattctccacggactccgtgaaaagagttctgagtccggaacgatcaccataaaagccaggcttgatgacggtgttatcacaatctccatcgaggatgacggcgttgggattccgcctgaaaagctggactcccttcttaccaaaaatgaaaaatccggatacggcgtatggaatatccatgagcggatccagctttcctatggatctcagtacggcctccgctacaccagcaggccatatattggaaccacagtatatatcacgtttccagcgctgttataagaatagagccaactgcaaaaaagaaggaaatcagacttaaccggtatctgcgcagtgcagtaccatgatctgatttccttccttttgtaaaagattatccctaaagttaaaaagcagctttctgctacggcttcttatccgccgtatcactctggctctttccctccttcttcaaagccttcaactcagcctttacatctttcaaaaatgcattccattcatcctcatacgctacaaaatacctggggcagtccttgcccgtagcgtcataatggcgtatcacgtctttttccgtcaaatccagttccaggcagagccaggcagtcagcctgaccagcgaattgtatgtagcatccgtaaactttccagtctcatcgggatggcagttctcaatagaaaccgaatccagattcttttccttcgatgtagaataagcgatctcatcaagcgggattccctgaagaatctccccgtcaaggccgatcacgaaatgactgctggccgaggtcgcattatctcccttctggtcttttaagttattaaaataattccagttctgcttcgcactcgttcccggatttgcgacatagtgaatgatgatctcattcacctgtttcatcttgattccgggtctggaatacggattcacttcaaaaaaatcctgagtgacccagtccggggccacaagtgcgcttaaatcaatctcccgccgcgccgtcctgctttccacatacaggctcagtgcacctaaaaccgctccggtcagaagagccaaaaacgcggaaaagattccaaacaggattcccgctttccgccgctgcctcttaagccttctctgtcttcgtattctggagcgcctccgcatctctaaatcttcgtatctttccctatcctgcttcattcgtaatggctcacctcgccccccgttttactcttacataagtgtaaagcgtgaggacctgaaatgtcaacattcatactattaagcttttattacgaatttcttcctgtttttacagtaattcattaaattttgcagctttttaaaacatcaggcttttcccatgtatatactgacaatagaatagttattgatcaggaaggaaggcatcttatgaatccaaatcatgaatcatgccagagcccctgcccgggctgttgtccaaactgctgcccgaactgctgtcctgctccagggccaggaccatgcccgtgtccctgtccaaacggctctgtcgggccgacaggacctcagggacctcgcggcgcaactggcgcagctggtcctcaggggcctcgcggcgctatgggcccgacggggcctcaagggcttcgcggcgccatgggcccaaccggacctcaggggcctcgcggtgttattggtgcaactggtcctcaagggccccgcggtgttattggcgcaaccggacctcaggggccccgcggcgctatgggcccaactggttctcagggcccccgcggcacagcaggagcaaccggacctcagggacctcgcggtataatgggaccagccggacctcagggaatcacaggaccgccaggccccattggttccagaggtacggcggggcttcagggaccaacgggcgcccagggagacaggggaccgatcgggcctaccggggcccagggctgcaggggagccactggaccggccggacctcagggtgacccggggccaacaggtcctcagggtgtcagggggctcaagggagatacaggctcccaggggccaacagggcctgccggcagtaccggacccgcaggacctcagggaatcgcaggacctaccggaccggaaggacccatggggcttcaggggcctcgcggcgctactggaatccagggactgcaggggctgccggggccggaaggtccgagaggaattcagggcagcaccggaccggccggaccaactggagctgctggagccacaggagaggccgggccgactggaccgagaggggatcagggaccggccggcgtaccaggaccagcaggaattaccggagcgacagggcccacaggccctacaggcagtacaggcgcggcgggcgaggaaggcccggcgggcgccaccggagctaccggggccatgggaccggccgggccgacaggaccaaccggggaaacaggcaataccggacctgtgggaccaaccggcgttaccggaccgaccggagccaccggaccggttcccgacgacatctacgcatcctttatcaatttcgccgcactgcttaccgacgcctctctcattcccatgggaattggagtttccgatcccacgggaaatattgtattatcagacccgacacgaatcacgcttgcccccggaatatacgccattttttacgaggtatccgctttacttgccgattccggcttcatgcaggtcaccccttactataataatgccccccacattgaatatggaatctacttcatgaccaattccgggcgttccagcgccttcggttctgtatcatttatgatcgaagtcccggttcagaccgtattcaacctaaccttcaacagcccggtaactgctaccgaagggacgcttaccatggtgatccataaactgagacgagaggtataaaataagactgccggtcttttaaggcagcactttcatcatagaaaaacagagccggacagtgtatgaagttacccgttcacacactgtccggctctgttttcccgatatcagcatcctgaagataccgtcttattccgggcaccgcccttactccttccggatgccagcactcccactgtcagaatcacgggaaataccagtgccgccagaattccaatccttaaatcatctccaaataccccggagatacggcctaccacaagaggccctccggcacacccgatatcacccgccagtgcaaacagtgcaaacatggcggttcctccgcccggaatctttttcatggccaggctgaaggtggagggccacagcgcccccaccgcaaagccgcagagtgcgcagcccgccaggctcagcaccggccacggagataaggcgatcagcagatagcttaccacgcagagcccgccgctccccagcatgatcctctccagcgaaattctgtcgctgtattttgcagataccaccctggaaacccccataaagaatgcaaacgcgcatggtccggccagatccccaacgcttttggacacatgcagtcccgactcggcaaatgcggacgcccactggctcaccgcctgttcgcttgctcccgcacagatcatcagcaccatcaggatccagaacaccatttttccggaaagcctgcggatcgataagccttcctcctcttccgccagtgtccggatcggaaccagaaagaaatacagcgcgttggccaacggcacagcggcccagatcacggccagcacctgccattgatcgatgccaaacagataaaagaacgctgttgacagaatgacaactcccatgtgcccccagcagtaaaaagagtggagaaggctcatggccgccgccttcctctccgtgggacacgcctccacgatcggactcaccagcacttcaagcagaccgccgccgacagcatacagaataatagctgccatcagccccgaatagctgtcctccatcatctgcggaaacagtgccagtccgatcagaccgacggcggccaggatatgggctgtcacaatactgatgcggtaaccgatacggtccacaaaatgcgccgccaggaaatccaccagcagctgaacgccaaagttcacggtgacgagaaacgatatctttcccagagatatcccgtaactcctctgaaatgtcaaaaacagcagcggtgcaaaattattcaccaccgcctgggtgatataaccaatatagcaggcatttatggtatgcttatagttttgtctgatctggctcgtcatactgtccgtccttctgtccttctctacagtacctggaattcacagttcaaaatcgtctgataaatctcctcttcactggaacacagttccagatcgtggatcagcggggtcgtctttaccatgcgcatcagtgtgacgaccgccggaatatgttctttggaatcacggcttgcaaggcataagatcaccttcgccttcttttccccgaagtgaaccggctgccggctgaccagcaggcttaagctggtctgatgaatcccttccactccttttccatgcaaaagcgcaaaggaatcgtccgataccgcgtagaatccctgttcttctatgaattctatcatattttccgtgtaagtactatcaataaatcctcttttttccagcagagccgcactctccctcaccgcagccttccactcatattcctcatccgtcagacggatgcagtcgaactttaagaagctgctgaagctcttgggattgtgtacctccttcacggtctggtatcccagttcccgctcgatgacctccataaccctcgccctggtggcctcatcgagaaatcccagcttttcctcgatggagtaaaacccggaaagaatcgtttttcggggaatatccagctgttcgatggccgccttatcttccggccgcaggatgggatttaccacgatacatggtttgggaaggctgttgttcagcctgatcgtcgacagcacatagtcaatcccggcccagtccgggtatgcggacagcttgtagatgggaatcgtgtccatgatgtggatctggtactcgctgagcagagattcctttaacatggttgtcgtaccgtagccgtggccgcagactaagagcacccgcttatagggcgcgctcttcattcgtctgatactggccataaagcagacggtcaggtagacaatctcatcctcattcgcagtatcctttaaggtgtcgatttcccggcagacggcggtcatcaccgagtacagcttccgctcctccggccctaataaggatatcatgtggtcattgatctccacgtggttccggatccgctgaatcagcggaatcatatggtttaacagcccctccgccagcgtcctgtccttgtcaaacggcatgtccagccgcttcgacatggccgcaataagggaaaatgtgacagactgcgcgtggacgggatccacctccgccccgcttcccgtcatcttattggtaaaatcatacattttagccatcatatacacatggtactccgataccggccgcccgatgatctcctccagcttcccggcaaaccgaccgtagatctcccggtcaaattccggcattaccgtgatatccaggggatattccttatcgtggagaatgaaccacacgagcaccacgatattggacatgtaccacaggtaggaactgctggtcagtgtgcaccccagttcctctaaaagcccgtccacagccatcaccacattggcgatggacacgccctcgaacgccttatgtatgatgtgaatgcagtaaaattcataggaattataattggtaaacggattgatcagataatcaatatattttctgaactcctggttcatcagagtcgttctcttaagctttggaccggccagatagaaatggcctgagtagccgattcccatctcattctttttcagttcttcatccagggccgccatatcatttttcacggtagaccgggaaacgccgaactgctcactcagcttattgatcttcagatcttcattccggatcatcagaattaagagcaggatcgacatgcgttccttccccgtatagaccaccccgttcccctcttccaggccctttaaatccagactggccggatatgtcagcagacctttggagtgcttctcgatctccggaagatgctccagcgataaaatatcattgatccggtccacgtcatagcgcacactccgctccgagacccccagttccttcgccatctccctgtaggtggattctccctgtgattttaaatatcggataatattcagcattcttccgttaaacatagtccatcccctgcggccgcgccgcttttcttttctgctcccaatacagacaacagaacaagaggagatactccccatctcctctttgtcctgttacccgtgttatctatattctgctcccctgcaaacacttcttactggaatgtgtcctgaatctttttcatgacagcatctgatttcttgattaaatcggagacacccatcttcagcacttttttccctttgaaacggtccagcccttctaatgccacgtcattgaccagaactacacaggccgcctcgtcgatatccttctgctttaactgattttccacgccggctccgccctgtgtttcaatgattacgtcgattcccagcttctgtccggacagctttaatgcctccgccgccatatatgtatgtgctacgcctgatggacaggatgtaattcctactaccttcatgataatttcctcctttataccttctgattataattcgtcaaatgtgatctcgtcgagtccgtcgtcctccactgccgctttggacgccatatcgtccgtattgttcttctttaataagtttaccataattgccgtcacaaatccaccggctaacacggaaatgatataccagattctgccctctacaaccgggagtacgatcagtccgccccatggcgcatggtttaacacaccggttaagaaaggaataatgttgccgactacggctcccacgatcagagacgggataacgcgcagtgggtcattggctgcaaatggaatggcgccctctgtaattcccacacagcccatcagaatagccgccttgcctgcttctttttcttccgcattgtatttcttcggagccagtaaggtagcgatacccataccgatcggaggagtacagattgcaacgcccacgccgcccatcagataaggaagcgtatcgacctgtgtctgtgcaaataaggttgccactttgttgatcgggccgcccatgtcaaatgccgtcatggcgccgaggattgttgccagcgggactctgcccacatcgcccaggccggaaagccaggcagttaaggactgcatgataaatgcgattggtgtaccaattccccagacgataatgccgcccgtaataaaggtgccgaccagcgggtaaatgaaaatggaacccagggtctttaaagaaatcggaagcttaatcttctttaactgttttaccacaacaccggcgattaagcctgccgccatgccgcccaggaagccggcgcccatggagtttgccagatatgcgccgatcataccgggtgccaggccgggtttatccgcgatcgaatacgcgatgtaaccgcccagaaccggaacgaacagggtcaggccgccgaggccgatctctgccagaccggcaagccagccctccgtcggcgtggccgcaccggccggattcagcataacggagatggaaaacaggataccgcccgctacgatgaacgggatcatgtgagaagtacccgtcagtatgtgtttctttaaaatcttaatctgctctttcatttccctacccctccaaaacttccgttaagatatcaaacacctggttcttcgtgctgtttctcaaagactctctgaactcctcatgcatcagctgccttgagagattggcaagaatcttcatatgggtatctcctgcttcggaaagcggaacggcaatcagaatgattaagtcggccgtctcgcctgtctcttcgttccataccaccggtcttactgtccttgcaaaagcaacgcttgcctccagaacgtgatctgtctttccatgcggaagtcccatgtcgaatcccacataggtcggtgcgatggcctccctcgccagcacatcctcgaaaaactcgttctgatccgttatcttacctgccgcgtccagttccttaaccagcgcgctgatgacgtccttcttttccgctgcgtcaatgtcaaatacgatacagttcttactaattaatttactcattgcaaacctcctgccggctgctgccggttattaaaaattcctttgttccaggcctggaagaatttgtttgttccttacatgccttatgataatcctgttgggaaaaaaagaaaagatagaacatttgcaaaaaaaatttacaaaaatttgaagggggctgtaaccctgttttcgtcaaaaaaaatgcttaagcgggatactggaattctcccgcttaagcgatcactgtcatttcatatagttgcctgtcattactgcattttcaccgtctcacaaaactcctgcagcgtccggtgcagctgtccctccgccgtctcatcgcagagcacgacgatcttgtctccggcaagcagcttcgtatcgcctctcggcacgaattccgcctcgcctctcatcagggaaacgacgaggcacgttttcggccacgcgatctccgataccttcatcccttctgccgcgctcccgtgaaagatcatgccttccaccagcactttttctccggtcagaaccgctttcttctccgggttctgctttgccagcaggcggtgaagaagctggtcgtaaaccggcgcgcaccgcatgatatccggtaccagatacgcggccagggacaccatggacagcgtaagcagatgggagaaggagcccgtcatctcactgattaagataattccggtaatcggagcacggacaatggctgagaagtagcctgccatccccaggatgataaagttgcctaaaagcccgtccaacgaaccgctcaccattcccaccgcattgaagtagatgccgccgatcacggctcccatcacgagaaggggcaggaaaatgccgcctggtgctccggagccgaagctcaccatggaaaatacaaattttaccacaaacagcagacacatggagccgatcaccatttccccggaggaaagcacctccaccagagaatggccgcctcccagaacggacggatagagaaatccgaacactccggccatcataaacgggatcagcagccggagcgtctgtcccggaatcttctgatacaggtcctgggatttcgagagacaggtgttgtagaccacccccatcagtccgatgatcacgcccagaatcagcacatgagcgtaagtgctcagcggcatcatatgagtaatgttgaacgtgaagaccggtttcaggccaaatacatttctggaaacaaagtccgatgtaattgaagccgccatggaggacagcagaatctccggagaaaagtgcttatgaatctcctccagagaaaataaaactcccgcgatcggcgcattaaacgccgccgataatccggccgtggcgccgcaggtcatgagaagcttctcctctgtcttcacacgcttcgtaaggcgtgaaaaccctttcgccgccatggcgccaagctggatactcgggccctcccgtccgagggacagaccgcagccaaggccgattaaaccgcctgccagctttgcggtcagaacccgccaccagcactcatcgatctcgcccattatttcaccttccacctggggaatcccgctgcccgagatcagcgagtcccattttagaagcagtgtcacaatcacggcagccgcagccaggattaagaaccacaccggaacaaaccagacatgggtccttccataatttaaaatattgtgcaggagtatctccgcatatcccagcagatagcggaaagccactaccacaacgcctgcgatggcgcctacggcgactccctccaggatcagtgcataacgaaaactccggtaacggttaatggtattggtaaccgtattcccttccgaccgcattttacgttccccctctttattctcttttaacattcgaatcctttcgttaaaactatatgaattgttctgttgccagtatctgattataacgctgtgaccaacagatagcaaggaaattgttcacaatttggccatatattccctcaaaaaaagtattatgatagtggatatgaaaaaagaaagtggtgagaattatgaaacagtttaaccatcggtggaccaggctgcttatgactgcgtgccttctctccatctgtctctcccttccggctcatgccggagaacgaaaaaaagtcgatcagattccgctcagtttttcctcctccatcgaagcagggaaaactggcggggaagtatatgtcaccgtcgatgatcccagccgggctgcacactgccggatcgtcaacacagcgattaccaatccgcctgacacggtgtgggaggccggaacaacaccggagatcctgatttccctgcgtgcggaaagcggcttctattttccttctgacaaagcagacgcgttccgtttgaccggagccggagccgtattcgaccgggcggaattcctggattcccagtccgtcctccatgtgaccgtccgtttgagtgcgctctctgatccggatgcaccggtcgttctctccggcctttcctgggataaaggttcctttaccgccctctgggacgacgacagcaacgcccggtactaccaggtacagctttttaaagacggccagccggtgggtgctgcggcaaccacctataccaactacagccggttatccgataaaatatcgggaaaaggcagctaccgctttactgtatgcttcgtcgacaacgccttaaaccggagcgaatggatctcttctgatacctgggagataaccgcttccgaggccgccgctctcgaaagcagcctaaagaatacatatggccccggaaccgtctcctcccctgccagagccgctggcgagtggaaatccgacgacacgggatggtggtttgaacatccggacggaacgtggacgacggatggctgggactatatcggcggcgaatggtactatttcgatcattccggctaccggaagagcggatggattccgtggcagggaacgtggtattactgtgatgaagacggagtcatgctgaagaatgcggagactccggacggatacgaaacggacagcagcggcgccgtcaaggccaaataaaaaagcccggttttaactttctttccctcatgatagttctcagggattcaaaaagataaaaccgggtcttattctgcgcacaccagatctgtctgttactgcgttttccgggctcattcccgccttttcgattatgccgcttttccgattaacgattccggggaaaatgccgtactgtgacatacaatttccactgttttgccaaggcccacattcataacgcccatcagtgattttccatcgattacaagatgattgtaacagatatcgacatcaaaatcacaggtttccgctttgtttacgaatgcaaccatttcttccacggttgaaaatgtatagaacatgtttttcatctggagcacctccctctctgtttgatgatatcattttactccttatttcggcaaaataacatatgatatttatgcgaaatgttgtaatattttaagttcttttctaatctttcccggatatggcggttccatacataaaaattcgagaaattctttcatttttttacgcgaaaggactacacaaaaagtaatttatcgtgtataatatagaagttcgggttcaggcaggcaactatggcctgtgaagcagaatacgatggagacgtatcgaagtggttgtaacgagccgcactcgaaatgcggttgtcgggtaaccggcacgtgggttcgaatcccaccgtctccgctatataaaaaagaacaccagcagggaagaatgatctgactgccggtgttcttttcttttatttctgtaaatattcctcaataaatttcgacgccacagccccgtctgacgcggccgtcacgatctgtcttaagggttttgttctcacatcccccacggcaaatactcccggtacgttcgtctttgtcgtctcatctgcgacgatatatccctgttcatttcgctctacctgtccttcaaatacggcggtgtcaggcactcttcctatcgccacaaacactccgtcgcaggaaaccacgctctcttcccctgtcttcacgtcagagaggcgcactcccgtcaccttcttctcatgcagaatctcctcaatgcggctgttccacaaaaactcgaccgggctgtccttcagcgcattctggtataccatggaagcgcgcagtgcatctctccggtggaccagatatacttttttacagatcttggacaggaataatgcatcctctgccgcactgttgccgccgccggataccacgacggtcttgtccttataccgcatcccgtcgcagactgcgcagtatgccactccgcgtccccgcagcttcttctcttccggaagtcccagttctctcggtgaagcgccggtagcgatcaccaccgtcttcgcaagaagttcgccgcctgtggtggtaatcttcttcggctctgactggagctcgacactgattacttcgtcgaacgccgtctctgctccgaagcggtcggcgccctttttcatcttttctcccagctcaaagccatcgattccgtcttcaaatccggggtaattatctacctggccggtggtcgccatctgtccgcccggcgacagcttttccagcaccaggactgacattccgcttcttgcgcagtaaagcgccgcactgtagccgccgggaccgccgccgatgatgacaacatcatattgtttttcgttcatatcgcattctccttttgtaagcactgattgcttctgcacaagcttcgtggagtatttttctctacacagcgccgttttctttcagccagtcctcaatctctgtcatggaacccggattaatcagaggctcgcttgccctgccgccctgatatacgatcaatgtcggaatcgtctcaatctcatgcttctcctctaattccggactctcatcgatgtcaaccttgcctaccagaagttttccctcatactgtgcagccagacggtccaccaccggaccgagtctgcggcagtaaccgcaccatggcgcccagaagtccagaaccaccggtttttccgcctgcagtacctctttgtcaaaattatctttattaattgtcatgatatccatattgattactcctttctctctgccgtaaatactgttattttctcagatacagttcatactgtaattatattagttacagtatgaactgtcaaggggtttttagaaaaaattttaattggaactgaaaaggccgtcagcagaacagctccagagtgatcggtaacgagtttctttaccaatgttgtattacttcctccgtttcgctataatggttaatgaactttaacgaaaggagtcagaactatggtaaaacatcaagtaatcatcgatccggacaagtgtgttggctgcggtatatgtgctaaggcctgcgccgcacataacatcgtcatcggcaataaaagagcaaaaatacggatggacgattgtgtcatgtgcggacactgtactgcagtctgccctaaaaatgcagtcaccatcagcggttacgatacggaacagattgaaaaaaaagaaaaggtccgtctgaatccgtctgatgtcttagacgttattcgtttccggagaagtatccgccgttttcagcggaaagacgttccgtccgaagtgatcgggcagatcctggaagcaggccgattgacccatacggcaaaaaatatgcaggacgtatcctttgtcgttctgaaaaaagaaataacacggattgaatccatggcggtcaaactgtttaaaataatcaagccactggctgatttattctggcccatggccaggaacacgaaaatcgacgaccattttttcttcttccatgcaccagtcgtcatcgtcatcctggcgaaagagaaaacaaatgggattctggcggcacagaatatggaatttgcggcggaagcgaatgacctgggtgtgttattcagcggattttttaccacgacggccaatatatcgcataaaatcaggaaagcactgcgcgttccaaaaggcaaacgggtagccgcaaccctggtgcttggttatccggatgtgaaatttctccgctccgtaccgcgcagacaattagatgttatctatttatagagggctttgaaatggcaaacgattgtgaagagagactgcaaaaaattgtatacggattccgggaatgccggaatgcttttaccgccattggcgatgaaacgagacagttaattctgctcgtgctcctggaaagtgatttctcaggcatccgtgtaggagaaatcgcagaaaaaacgcatctgacaaggccctccgtctcccatcatctgcagatcctgaaagaggccgggatcgttgcaatgaggaaagagggcactaaaaattattattatctgagtgtggatgaaacacagtggaaagagattgcggacttaatcacacttatttatgaaagtgtacgccatatcagttcgtgatgataaacctataacaggaggcctaaaactatgatcttatacttttcaggaacaggaaacagcgaatatgccgcgaagagaatcggcagggagctggacgatgaggtggtctgtttatttgagaaaatccgcagccgcgattttacaaaaatgcactcagaccgtccatggattattgtcaccccaacctatgcgtggagaatcccccgcatcatacaggaatggctgatgaagacagctcttgccggaaacagggatatctattttgtaatgacctgcggcggaagcattgggaatgccggcagctgttcagaaaagctgtgctccgccaaaaagctgaattacatgggctgtaccgcggttgtcatgccggaaaactatattgcaatgtttgacgtgccgacacagaaggaatcactggagatcattcaacgggcggaacagacgataaacgaagcgatccttacgatcaaaaacggcaaggcattttctcggcccgcagtcacattccaggacagaatgaacagcggaattgtaaataatctcttttatcccgtatttgttcatgcaaaaaaattctatgctgccgacacctgcatctcctgtggaaagtgcgccaaaatctgtccgctgaacaacatacgtatggaaaacaggaaacccgtatggggaaagaactgtacccactgcatggcctgcatctgccattgtccaacggaagcaattgaatacggaaaacacagtaaggggaaaccgaggtatgtctgccctaaaacagatcattaaaagggcaatccgaacctccgtttccttaaaagacggcggcagaccccttcctgccgccgtcttttcttaattccattcaggacacccaaggactcttttctcttactccattgattcgtcctcttccccaaacgcttcgacccgaaatacaacggggcgtatcccatccgtgcagcagacaatggtctgtccatcttctctgttccacggcttataggtcccaccggccgctacacagctgacgctgtgataaatatcaatccatgcccacggacagagtccctccggcatctgggcgcctccctcgaaaataaagctgtcgcctacattcatcagggcgcagggacctgcctccctgccgtctgttaagtattcgtcggcaaaatcagaatagaattcctttcggagtaccgttattcttacctttttcatcgtttgtttcctcctggccgcagtgactgtacactctcccggcttcttatgccatccactcagtttcttctgtcaatgatatcagataaccgtatttatttctacatcccaatcatatcaaactcctcaaatgatatcaccacgtcgtaatccttcctgggattcctgtattttatctgcacagattttttcgtctggctgtaataccatcccgcttccgcctcctcgaattttcttcgatgcagataatggggaagccgttccccatccagggaaatccagtaaggagccttttcacgatggattaaatccacggacatggtttccaccagggtctcataaagcccttcatttcggaaggagatcgtcgtccgcacaccgcctgtcaccgtaatccgagtcttcaaatactgaccgtgttcataatcctttgaaataccgtcatcctcgtacagcgtaaactcacagtctctgtctgccgagcataaaagggaaataccggtgactgtctcagacgccagattattcagctggttttccgccatcggtatgaccgcgccgccccggataaacagtgggatactctcgatcgtaaccggaatttcgatggtctgcccgccttcgtacgcttccctcgtatagaaatcgtagaagcgttctccttccggcagatagacgctccgaacctcagcccccttctccacaacgttggccaccagaagggaatcgcccagcataaagtccacgccttcctcgtaacaagccgtatcctgctggaaagcactgcacatgggctccatgatcggaagcccggtctcatgagcccgctccatcagtgagtagagatagggaatcatacggtaacgcagtttcacggcttttcggatcagatcggtataacctccgtacatccacggctccgtcacggtattgtccgtattgaccgaatggaccgaaaaccttggctggaatatgccgttctgcacccagcgcaccatcagctccgcctccggagaagggccgtaaaagccgcagatatcgcagccctgattcgccactccggacaggctcatgcccagaatggttgcgatattatattttaaggaatcccagcacgtcaaattgtcccccgcccaggtctgggcatagcgctgaattcctgcatggccggagcggcacacgataaacggcctgatattctcaaacgtctcttccaccgcctctgcggtcacgtggcacatcaggttggacatgaccgccttgatataaccgatcgaagtcccttttccttcaaaatcacagcggcagtccttatccaccagactgtcgtactcacagttgtcgttccagacagaactggttcccatctcaagcaccgctctcttcagcatttccttccactccgcgcgcgcctgcggcttcgtaaaatctacgaacacccctttgccgccccaccacgtcccgactccggcctcgtccttcacgctgtccttcacgaaaatatcctttgccttcatctcctccagatccggatgggaaagcaggactcccggctttacattgggggacacggtaatcccccgctttttcatctccgcaaaaaagcgcaccggatccttaaaacgttttttattccaggtaaatacgcaccgtttcaagccctccgccgtctcctgtgaggtataaccggaggagagctggaatccatcggccggtatatcctcctcttttgtggtatcaataaactcaagaatcgcgtcgtcacaattttccggcagttccggatagtacatggaggaccccagatagcccagagcggttctcggaagcatgaccgactttcccgtcaggtccgtataccgctccaccacctgacgtatggccgggccttcgataaagaacagatcaatatccccggcatcggcgcggtaccggctgtgcattttccagtaattactcttctcccgtcccatgtcaaaatcacactccgccggattatgatagaaatagccggaggcctttttggttcttcgattcagtttcacatagaatggaatgtgcttatacagggaatccgtctccttcggattatagcccatggcgtccttcggactcatacataactgtttctgcgccttgttccactccccgctcttctcgccaaatccgtaaaagcagtcgtccggtgagatttcgctggtgtgaattcttctgtggttggaatcctcctgataccccagttccacgatatcggcatggataagcgttccttccttatcataaatacagatccggaacggttctttttccaccaccacccggagtttccttccttctatgactgcctccttctctccatccgtgaataccgtctccgccggacgaacccgcctccggaagcggttcatcaatccgtccatccggtcgtcccacgccgtcatcacaagactgtaagactcttctgcaaatgtaccgtcgaacccggcccggattctcacaatagagtctgtcaaaaacagcaggcgtatttccacacaattcgtcgtgatcgaaatggtgtcctccagtttttttacttcttccgccctcgtacataccttcatcctttttttctcctgtctcccgtgtttctccgttcacagagaaccgaagccacggcccccgttcccctgtcccacaggtattctgagtccatcatacagataataccacgcgaaaaccagtcgaatcctgcatgatttatatcaaaactttgcgtattttctgccataaaaacgggagacctccgcattggagttctcccgtttttattttaacttatggttacttcactgcgtgagcaggctgataatcttccacagacttgataacttcccgcttaatcgttcccgacaggaagaaggacatctttgcacatgccggtccgatcagctcatagagcacggaggaagacagaatgatggtcagcagcagactcccgatatccgccggaagcattctctgccccaggaatgcaagcccgatcgcaacgccggcctgcggaatcagcgcaaggccgatataccgtttcatgaccaccggcatccccgtgatggagcagccgatataagctcccgcatattttccaataatccgaatcaggaaatagctgactccgatgatccccgcagtcctgagcgccgtcacatttaagttcatcccggaaatgataaagaacatggacattaccggcggtgtaaaatgattgacctgcttaaacagcttcttatcatttgtcacattcatatacgttgcaccgaataccatgcaggacagaaggggcgacagctggaagaaggcgcagatacctgatattcccagcagcatcgccaccgccagaatcaggcggttatccttgctcctggccggtgtcagaagcttagacagcacaattccgcacagaaatcccagtgccagagccatcaggttccagaagatgggaaccatcacatccgtaaatgagatatggccgctcgttctcgcattgaccaccgcaacaacggcactgaaggttaaaaggcatacgacgtcatccagcgctactacctgaagaagcacattgacaaaatcacctctcgcatgatactggtgaatcgtcatcatcgtgctggccggagcggtagccgtggcaatggctcctaaaatcagagcgaagttccatgacatgccaaatatcattctcatgctgatcgtcaccagaattccggctgccagcgcttcaaagatcgtaatgacaatgatcttgatccccgcttccttaatgatttctttcttaaagaattttccgacgccaaaggcaataaatgccagagcaatatcgctcataaatcccatatgccccagaatatcggagggcaccatcttcagacagcagggcccgatcaaaacccccgcgataatataaccgctgacattcggcagcctcagccgttttgtaatcctcgtaacgataaaccccgcgaacagtatgatagacagcgagcagagtactgctgttgattcatccatttgactgtataaaagttccataaaaacatcccctttttccccatttttgttgatactatatgtttttttccctttctatggtacaattatagcagtcttatatataatagcaaattatggtatctactgtatctataaatttttatgataggggtgtgatgtacatgatggattccaaactggaaactctgataaaagtcaatgagacacgcagttttacaaaggcagccgagcttctttccctgacgcagccggcagtcagccagcatatccggcagctggagcaggacctgggtgcgacgctgttcatcaggggggaggggcccttaaaactgacgcaggaaggggagattgcgataaaatacgctaagcggatacagacgctctatcagaacttagagcagagtctgggtgatttgaagcgccatattacccgtttatccgtcgggatcacccacacggccgagagcaatatcatggttgaggttctggcccgctacagcagcttaaacgccggctgccgcataacaattatttctgataccataaataatctttatcaaaaattgaaaacgtacgagctggacatcgcgattgtcgaaggaaaaatcgtggacaacaactttaattccgtcatgctggacacggattccctgattctggcggtatcgaaccataatccgctttccaagaaaagcattgtgacgctggaggagctgaaaaaacagcgtctgatcctccggctgccggattccgctaccaggaatctgttcatctcccatctggaaagcaataacgtctctctcgatgaactgaatgtaacgctggaggtcgataatgtcgctaccattaaggatctggtgcggagagacttcggagtgtcgattcttgcaagaagtgcctttgccggagaactgcgcaagggaaagatgaccgggcttcccatcgaaaatctgagtatgacgcgggagatcaatatggtttaccataaggattttgagcatacggatttgttgcaggagattacgaagatttattatgagtattccagaagtaagtatacttgagattatgtttttggggggaggtattaagagttacgccgccgcaggggtgagccggggaaggaagggcggggacacgggcagagggagcactcccgttttctcggtgggccggactaaaagaaaaacggtgtgaaaatatggggaccgtgcaaactacagagatggctgatgccctctcctccgtgtgcactcgactccgggccctgaaagcccacaaggaaagtccccctcacatacgttcggcggaaaatgtcgccccatattttcacaccgtttttctttaagtccggccgaacctctaaaaagtcgcgctccctctgcccgtgtccccgcccttccttccccggctcaaccctgcggcggctgtgtactggttatgccagatgaaaaacataatgtgagcgttttgagaggttggcgaaagtaatggttatggttagtaggttttagtggggtgtcaggagtaaggacttaaatggaggatataagctactcttgattatcaggggctggttggggagtgggtttgtttacgatgtagattccgatgcatacgaggaataaagcgaccagggtggtcaggccaaaggcctgttggccttcgccgaggaacagggctgacaggatgactccgaagactggattcatgaagccgaaaacagctactttggagaccgggttccgtttcagcaggattccccagagggaataggctatcgcggatacggctgataaatagacaagcatggaaatagatggcactgtccacacatggacgcttccaccggtgagatatccacagagaatcatgatgattccaccaagcagaaactgccagccgctgagcatgaccggatgatcttcacgggagtagatttttatcaggacagaggaaactgcgtaggcgatggtggatagaaggatgaaaccttctcccatcagagagagactcatgttcagcccaccctggttgatattaattataacgactccggcaaaaccggcgatgcatccgataaccttgtttttgtccagcttttcctggcggaaaatcagactggcaatgaggattgctgcaaatacgttggaggcctcaataatagaggccttcacccctgttgtatgggcgaggccgacgtagaaaaagagatactgaatgacggtctgaaaaagggacagcttgatgatccgcagccaggagggcttttgagggagaagagggcggcggttcattaagctgccgatgagaatcgtcagcagccctgcaagggtaaaacggtatcccgcgaataaaagctggctggagacatcatttccttctatttgaaacagctggtatccgatcttgatacatggaaaagcgctgccccacagcgcgcagcaaatcattgctgtgaggcagacgcttaccgtattggctgtttcaatctgcatgccgggttttcgggaatttggcatgtctctcttgtcagcacagtgacaaaacttacttttccggttcatcttacagttcaaatccttttaacttgatgtaatccttaatgagcttcgcagtctgctctaaatcaaacttactggtgttgatgatcagatcgtaattgttccagtcctcccagcggccgccgctgtagtaacggtaatattccttccgttccctgttaatcttcctgactcgtcttgccgcctctttttcatccactttgtcaacttccatggtacgcttgatcagggcagggacatcggcgtacacgaagatttttacgaggccgggaacattcacgtcctcgcggcttaaaatgtaatccgcacagcgtccggctatgatgcaggactcctggtctgccagctgtctgattacctcagactggaaacggaacagattctcgggctttacgatgtcgccgtctgtagacggctttcccagctgcggcttcatgccgcttacaatcttgtaaagcaggttattgcctgccttttcatcggccaggcggaaaaatacttctccgaccgcactctgctccgatgtcatggtcagaatttcctcatcgtaaaaatgaattcccagttcctccgccagcgccttgcctacgatccggccgccgctgccgtactgccggccaatggtaatgaccagattttctttttccttcatgatactttccccccttattgttcttccatcaccgtatcaaaacagatggctccgtacggacggatgctcatccggtaagcattgccttctccaagggccttctcgatgtaggccacgtattcgtctaccaggtcgttcggaagcatggccatgatgacgcctgcaaaaccgcctccatgaacacggcacgctccgcgctgtttttcagcgataaataactccgtaagcgccagtgcaacggtgattccctgttcctgataggcgctgttggtaaagcagttctgaagccatttccaggacgaattgccggaggctgtgatattcattaagaaatcggtaaaacggccttcctttaaagcctttacttctgcttccacacgcttgttctcttcaaagaaatgaagagcccgcagaacggaacggtctcccgcgtacgctctcacttccgcaaggtgttcgattacttcttcttccgtaatctgggcgcaaacctcttttccaaagaattccgccacttttttcatctcaattggcacggaagaatagtccgcgcttaaatctgcatggcctttaccggtgttgacaatgatcaggctgtgattctgggaactgaaatcgaaatcgatcttctccacaacaggggaggcaggctccataaaatcgatggtgatgagtccgcccactgcacatgccatctgatccaacagcccggaggccttgtcccagtatacgttttcagaatatttaccaatgtgagcgtatgctactgtgtccatacggccttcattaaagaatgtatttaatatagaacataaaagcatctcgaacgaagcggaggaactgacgcctgccgcactgatgacattgctcgtaatgtaggcgttaaaaccgccgacctcataaccggattccttaaagccctgaagaagccctttcaccaggtcaatggtccccgcttttttatcactgggggataaatcattcaaatcaatgatgaagctctggttaaaggtttcactgataatatgtaccttactgctgttattctttgcagccacgccgacgcagtctaagttaatgcttcccgcaaggacttttccgtggttatgatccgtatgattaccgctgatttccgtgcgccccggagaactgaacagggttatgtcttcttccgcaaattttttctgaaaactttttacaagattctgataccgttctatattggcctccaccgccgtttcgccgtacagtgcggccatcagcttcctggacttttcagattcaagcatctggattgtatcgcatactttcatgtcacatgatctcctttttccatacattttcagaatacaccgtcgttcctttcgcgggactctgctctttgacaaaagtatatcataacttatgagttttctacaatataatatttatcgaaatgatacaatttcatttgacacccgtcctgccgccttcttataatagagaagaatttacgaaagcttggaggactcctcatgtactggaacgaaaaaccgtatcattccctcgattatgaaatgaaacgcatctatggccataaaatctataagctcgcgctggacggcggcatgacctgccccaaccgtgacgggacactgggatcaaacggctgtatcttctgcagcggcggcggttccggagaatttgccgagtccatggccgctcacccatctgtcacagagcagatcgaagcggcaaaggctctggtggagaagaaaatgtcaaaggctcataacaacactgccctcgattgtccaaaaggccgttacatcgcctattttcagtcctataccaacacgtatgcgcctgtctcacgcttaagagctctctttaccgaggccatcgctcatccggacatcgccattctgtccattgccactcgtccggactgccttccacccgaaatcatcgctcttttatcagaattaaaccggatcaaaccggtctgggtggaactgggtctgcagaccattcacgaggagactgcacgcttcattcggcgcggctaccccttatccgtcttcgaagacgcctggaacagacttcacggcgcgggcctgaccgtgatcgcccacgtcattctcggccttccaggtgagacgcgctccatgatgcaggataccgtcagctatctgggcggtctgggcacacacggcattgacggtgtgaagctgcagctccttcacgtcctggagggaactgacctggcagtcctgtatcgcgccggtggatttcaaaccttttccctggaggaatacctggatcttgtgatagactgcatcgccctgctgccgccggagacggtcatccaccggatcagcggcgacggacctaaaaagcttctcgtggccccggtgtggagcggaaacaaacgactcgtattaaactccatggcaaagcgttttaaagaacgcggcgtatgtcagggggaccagtatcggaccccgtgatgccttaaactgcggagtgcgcgaaaacagcggctcctttccccggagccgccgctctgcatacttatcggattccaccgctcaaagacagcagacgcatcactttgacgtttttatctcaaaaccgtactcatgcagtaccagatcatcgtctatcacttcgtcatagataccgtctgcctgttcaaacccgttcttcatatagagatgaatcgccggtttatttatatccacgacaaacagccttacgtattccgcccccagctctcctgcaagggcaatcgcccctttaagcgcaatactgccaattccctttctcagataatcggcatttacgccaaaccggtcaatatacaaggctttcccgccttcatacctccatttcacacagtctgcccctgcggcctggctgcacagggcaaatgcggcgacgatcctgcactcttccaccaaaacgtatagacggttatttcctatatcttcagcgaaacattcgcatggatatatttcgtcccagattgaaaccccattctcatccatcttgcggatgagttctttatatactgttttcagctgcggtaaatccgcagtctcagccagccgtaaattcatcgtgacctccccgcgcctgtctgattcgcctttttcttattttgcagcattttcctcctgtacaacaccattttcatcaatggtcacgccgaaagaaatgccctgcatatactggtaaaactcgcttattttctgcggatcggtcagttcctttgtataaccggccccggaagtgcccggaaccagagataaattcacctgattctgttccagatccacatcggcccgcaaaagagcggtcttcggaatactgcttccaaagataaagttgccgaggctgtatacaatcggcttgccctgatagtattcgatcccctgcagtacgtgaggatggcttccgattacaagatcggctcccgcatcaatcagctgttttcccagagtccgctggtattcctggggcttttcatcccgttcaatcccccaatgcatatacacgaccagataatcgcagtattccccggccgcttcgatctcttttaagagtatggacggatcgtaaccgcttaccattcccggctttttgctgtttgccacccaggaagtatcgggatacaccctggaagcagccagaaagccgatggtcctgccgcgtacctcaatggtctccagctgctttgcacgatccatgtttgcaccggctcccacgtaaaggattcccgcgttctccagagttgtacacgtatccacaagcgcatcctcgccataatccagcgtatgattatttgcaatcgtcacaatatcgattcccagttcatgcatcatggatacccgttccggcggtatacgaaacgtaaactgcttatccggcgccggcgttcctctgtcgctgaatggaaactcctgatttgccatatagaggtcagccctggcgatttcgtcccgatatgcatcatccaacaccccatgtatgcctcctgcattatcatatgcagccaatacatgactggaaaaatatacatcaccgctaaaaagcatatgaactatggggtcttccggttctgtctctgccgcgggagctgtactctcaccttccgtttcagatacttccagcttaagaacctcctccgtggccgcctctggcgcaaaatcggctgtctgactcccttcctgtacagcggaatcgactgccgtttcccggctggaggcaagggtttcccttgcgcctcccctctgtccgtctgccgcgatccatacgagaagtgccgcaaggagaaataccggaaggataatcagcagcttcatgaataatcctgttcttttcatcccttcctccttaatccatgatcgaatgattcatgatagatgcctgatccataactttttcagcaaataacatcgtctcttccttaatttttccatcataaacccgttttccgttgcaaaaatacgtatctttcataacctttaagtcatgatatcttaaaaatactttataaatttctgatgcactttccagaattcccgccgtagtaaagacggccacatatttaacctgctgcggagacaggctctttatatactcttttaatgttctggggatcttgccccagtaaagcgctccgcctaaaaacaggatatctgtcacgccttccagcggaacttcaatggattccgcctggcagcccgccaccggtgcaatggcttctgcgattactttcgtattccctgttctggaataataacgcactgctgtcttcatgctttctgctccattctctcgatagtctctactaatcttacactgagactgtgtatttgtcaaataatggcagtgtcagccagttatatgttttacagacagaactatttactgtagaaacaatcctgttgcatttaattacattttacaatataataaacaataaggatatatcattcatttttatttgtttattatattcttataattacaattatcagacttttttctttttcttattggatctatatctgccatatcccatcttttacctaactctccaatgcatcaagcactgcactgtccccctttctcttccagtttttcttaaaatgtcatcgttctgatgcctataattgtaattataagcactggaagaaaggaagtgataatataagaaatccatatctgccaggtaattcatttctattataataatgagaggagaacttgtgatgatgaaaaaattattaaccttgttatgtacattattcatggtaatcataatggcggggtccgcatttgcaggtacatggagaacgggacaggctccaaatcaggacaagtggtggtatgataacgataatggaacttatccggcgaatggctggaaatggattgacggaaatgatgacgggattgccgaatgctattgttttgatccggatgggtggttatatacgaatactacaacaccagacggatataccgtcaacgagaacggcgcatggattgaaaacggtattgtaaatatctcaattgtgccccggcaaaacagcggctattctcagaagaacgaatccagcggttatgaagccgcagatgaatatgacgaagaaatactgatgccctggtatgtggaagaaactatatttaatccggaccggtctgtgcttaaatatatcactctgggttgcgataccggctgtcgcatctattatacgacaggcgtaaaacctgctgatccgactgatcaggatgacatctatgtaacaaaaaaaagatccggttttcaatatggctccccctctttaaaacccggacaaactttaaaagcaattgctgtagataaagctaccggcaaaaaaagcggcgttacagtccttagatatgaggatgccattaatgcaaacagaggacgttctggaaacattgccggttcttccaattacaataacggaagcggcagtaataatcagagctcctcatcgagttcgaattcaaattccgctgcttccacaactacagccccccggcaatgcccgatttgtatgggtaaaggctataccacctgtacctattgtcacggaagcggaatcggccagaatgcttcgtttggactcggcggcgggatgtctggcggcgataccggaatctatgacgacggtggtatctaccagggaatctgtccttcgtgtggtggatccggaactaaaacgtgtgccggttgcggtggtatcggaacagtcggttactaatgtaatgcgtttgaagcataatctccataaaaactggcgccatgagtccaaaatcactcacgacgccagttttctttcaattcccagtgccatccctgggatatattacttattccatctataacgccacaataataccgccgtcactggcatacaccgttgccactccggccgtctccgtaatgataacgtccttaaaggtggcctggcggcacatctcattcttcacaacctccgcgcgctccggattgttgcagtgggcgataataagtaccttgtctttcgtctctcccgcttcccgaatcgcaatatccgccatacgcgtaagagccttattaatccctcgcgcctggtccagcttgataattacaccggaatcagctcccataaccggcttaatattgagcgcggtagcaaaaaatgcctgaaggccggtcagacggccgttcttacgcagcgtgtccagactctccagtacaaaatatgttttcatattcttaataaaactgcgcgtcttctccacgatctcctcaaacggaagagaagcctgacagagcgactggatatagagagcgatgtttaactctccggatgaggcagaatcggagctgaataccgcaatgttcttcccctcctgtccatgttcctcctcatacagcttcttcgctaaaacagcgctgttgtacgttccgctcaaatgctcagacagtgttatcacaaaaatctgatccacatcacattcaaacgcctccttaaacttctcaggcgacgggcatgcggtctgagggcactcactgctgcttctgaccagttccagaaacttcttctggtcaaaggtctcatcatctattacctgggtatgctctacctgcaaagtgagggggatgatctgaaaatgcggatctttctttaagtcagccgttaaatccagacagctgtccccgataatcttatagctcatattctatttcctcctgacatataacttgtcatgtagtattcattactatatattatagggaagccacggtggaatgtcaatagaatattgctcctgaacttccgcattttgtattcccggagttacggttctctgctgctaccagcctcttctcccccttctgccggctggcttatgcatcggttcagacggctcacccgcgctctccggctccgttttcagcggtaagcaaaccgatcatctcattcaggctctcaaagtctgtaaaatccaccgttttgccatacgtctcgatcaatccctgcgtctcggaattccgttcttccggcggaatcttttttacccggctgtacagaagccccatcatggcccggtgcgcgacggacagctttgagtaatcaatcccgcctctcagatgaaagagtttcgtttcatcccagagcggctccgtgagctgtttctttataaaatcccggatattatggatattggtttcatcggcagggtcagacagtcccacggtggctaccagaagctttgcttccggttcctgacggagcagcttcacggtgtgtgccagaccgagaatctgaccggcgtagatccctcccaggtgaatcacttctttgcaggaagaaagagagtttacttctttgcagtttctgcacggaatccccgtccttcgtgccagttcttccgcgtaacgcttcgttgtgccgtatttgctgccgtataaaataattcgcttcatatctttcctcctgtatcgctcattttcctgtatctgcaggtcgttacgttgcttccgtcgccgcctcttctgcggcctccaggccgtctattccatcatacagcttcataagcagcgtaaacagctgctccatctcctgatccgtataatgccggaacagacaggagagttttcgcctgtgaatcgccgcggtctgctcaaagtactcatccagcctggccgccggcaccagccatgctgctcttttatcgtccgtattttgtaaaatcgtgacaaatcccttctgttcaagaactgcggccagctttttgatattctgcctggaacagccaagcagttttcccagctgggtaaatgtcagccggtcctttgactgtctcaccatagtcagaagcataaactgcttcagtgtaatatcggggctgctcttgtcaaatacggtctggagtctgttttcagcaatacacagcgtgctgaacacagccttctcctgtttttctcttgtcccctgaaagcgtctgatgagatccgttatctgcatgtcttcctccatatagtaactagttacctatttttctgaaaagaggaggacaggaaagtctgcaggcttccctgtcccattttccagctgatctttactggatcagccgacaacatcttatctgtctgtagatcactcgtcttcctgtgctcctacaactcccgccgtactggtggcagttgcaatgacaatcacgacgacgaagaggatcagcagaatgattcccccgaaaaatgacagcagaaacgtggtgccgtcatcctccgaagctgtctctgcaccggccggatccgcggcagccgccacagtctccgtctccgcatgagagacaagcaccgctcccggggctgctcccgccaaaactccgatggccagtgccagcatcagccgcagcacagccttctttatctcccttatcttgtccgtcataagaatctcctcctggttactatacaatcatagctactagtataccataagggagcgaaaaatgataccccaatcaatccgggattcttattcctcttcttttcccatatccgccatgaaaatcatgatatcattgcttcttgcgatgaacttcgtcatgcgctccggagtcagggaaccgtggcttaatgcagccaggtcgtacagctgttcacagatttcctgaatgtgttcgccttctctgtgattcagcacatactgaaccagtttattgttatagttgagcaccagagtctcaccgccggcgccaaacatggacggatccatacccggcatggtgtacatcttcatcatttcctgcatacggcggctgtcttccgatacagtaatcatggaggaaacggcttcatttttcagtttctccactcttacttccagtttatcattgccaagcgccttcttgaacacctcggtcagtgcctccacatcgcccttcatggcttctctggcctcttccgtcatctcttctttaaagctgtcggataagtcagagttgatggctaagaacttcacattctcattcttctgctccaggaaattgatgaacgggctgtcgatgttctgagtcatatagaccgcgtccatgccctcctgcttaaacatattgatgtactggctctgttccttctcatctgtgatatagaatacggtgttctcatgcttttccttattctcttccagacaatcggacagggttaagtatttgccttccagattcttgaaaatgaggtaatcgttcatcttctcagcaaatttctcatcctttaagcagccgaacttgataaatggattgatgtcatcccagtacttctcgtagttctcacggtcagtcttaaacattccgcttaacttgtccgcaaccttctttgtgatgtaatcggatatcttcttaacaaagccgtcattctgcagcgcgcttctcgatacgttaagcggcagatccggacaatcgatgacgccctttaacagcattaagaattccggaattacttccttgatgttgtctgcgataaatacctggttgttgtaaagcttgatcacgccctctaagctgtcgtaatttaagttcagcttcgggaaatacaagattccctttaagttaaacggataatccatgtttaaatgaatccagaacagcggttccttgtaatcatggaataccttgcggtagaagctcttatactcttcctcggtgcactcgttggggtgcttgttccagagcgggtgaatgtcattttccggaacagggcgctttaagatcttatatttttcctttgcaggagaaatctcgacaacctctttttcgccgttctcattctccttctcctcggtctttgcctcctcaacgatcgtctcgatgatggtgtctttctcagtcagttcatctttttcaatcgtttcatactgcggctccgcagaagaattctcaagataaatctccaccggcatgaaggaacagtacttctccagcacctctctggcgcggtattcattgcagaactccaggctctcttcattcaggtacagcttaatcgtcgttccgaaagaggtcttatccccctcttccatctcatactccgtgccgccgtccgactcccagtgaaccggcgcagcgccttcctggtacgataaggtatcaatggtcaccttatcggctaccataaatgcagaatagaagcccagaccgaaatggccgatgatctgatcttcgttcgccttgtccttatacttctccaggaaatcctgtgctcctgaaaatgcgatctggttgatatactcatccacttcatccatggtcatgccgagaccgttatcggcgaaggtaatcgtcttttcattggaatccaccgtcacggtaatcttaaattccacatcctccggcttctgccactctcccatgatctcaagcttctttaatttcgtgatcgcgtcacagccgttagacactaattcacggtagaaaatgtcgtgatccgaataaagccacttcttgataatcgggaatatgttttcactgttaattgtcaaacttcctgtctttgccatatccatacactccttgctctttgctgtatatttttccatggacaaccatggtttctcacgctttgcctgcaaagagtattttaatactcccgtttccaaatgtcaatagaaaattagcactcatttaaaatgagtgctagtaattctctattcttcctcaaaaatgatctcgttctttttcaaaaagcttctcaccgcctgatcccattccgaatccagagtcttgtccagcgtaaaaaatgagaccgaggtgcctgtcacacagaacagcttcccttcctcataacggatgtttaaatacaggccgttgacctgatccgccctcagaggcatctggcgtgcggccacaaacttctccacggcctgaggcggcatctgcagcacaatctgaaagcttcccggaagcttcttccccttaatcagtgaaaagcagtacggccggatcatcttccaggaggacagctcctccagctggttctcttccagctcttcctctgaataatacccctgacggatatgcccgtcgatggtaaacacattaaaggtaataatctcggcttcccgaatcaggaagtgatcaaacgtctctcccataaagagtctggcagtaaattgtttcatatcttcaattttcaatgctatcatttcacattctcccgtattctttctgcatttcattcgccaatcgctgaccgcagtctcattggaactattttaccatagaaggtgcggggatgccattctttcttaaaaccaattcccaccgcttccactttgtgatatactaagagctgtaattacacagaaaagaggctaatcctatgaatgatatgaaacagctggagcggctgatctccgcttccgtatccccgtatcactgcatcatgacggcggccgctgatttagacgccgccggatttacagaacttcccctttccggctcctggaagctggaacagggacactcctactatataaaagcttatgattccacgctgatcgcatttaccatcggcgagctgacggatcaggctctgaagcttaaactggccgcttcccatacagactggccctgcttaaaattaaagccgtctccggaggtaacttcaggacggtatggaaagctcaacacagaagtctacggcggaccgctgctgcatacctggttcgacaggccgctgtccatggcaggcaaagtctgtgtaaccggtgatgctcccggcggaacgaaaaccgtcttcgttgacttccggcgcccggtgctcacaattcccaatctggcgatccacatgaaccgggaagccaatcagggggttgccgtcaatccgcagattgacatgcttccgctcctgaccttaattaaaaacgatctggaaaaggaggatttcttcttaaaggcgctggccgcttcagccggcgtggagcaggaagatatcctggactacgagatctacatctacaatacggagagcggcactctgtgcgggctggacggcgaattctattccgctccgcgtctcgacaacctgacctccgtacaggcctgtttaagcggcatcatgaacagcaccgcaggaaatgagattcatgtgatcgcactttatgacaatgaggagatcggaagcagcacgaaacagggtgccgcttcactgctcatggaccgagtactggaaaaactgttcctgtccctgggctgctccagggaaacctacttaaatgccctgtttgacggctttatgctgtccctcgacgtcgcacatgcaatccatcccaaccacggtgaaaaatgcgatattaagaaccagatccacatgggagacggcgtcgccatcaagctgtcggccagccagtcctatgcgaccgacgcgaccagcactggaatgattgaaagcatctgcagaaatgccaaaattccatacaggaaattttccaaccgatccgatatgaagggcggctccacgctcggaagcatctcctccagctatttaacgatgcgcaccgtggatgcgggaatccccatgctggccatgcattctgccagagaggtcatgggcaccgccgaccagaaagctctcgtcgatctggtgaccgcgtattttaacgcttaaagttctatgtgcataaagccggctgtaatagccgaatccaacagaggaaaagaagaaaggagtctccgcacaacatggagctcctttcttttttctctgttatattgcctcttctctttccgccttctgtccctctgcgcttcggccacccgttattcgtaactcttcatcgtctccggcacaatctctctgccggtctccagcggtgcggtcgatgtgcggcttccttcccagtagcggtacacatacgtactggtaaataaaagtcctgccgccacaaaaagaatcagaataatcttaagtaccgcggcaaaaactgccttcccccttttacttttgcgcttccggctcctgccccggctgctccttcccccttctgccatggaatgcccctctgctttccttcccctttattgattgggaaaatgttttctgtacaagtcaaaaaaattcgtggtagtcgtcttatcgtcaatggaaaacttgataccatcccagatatcgttgctgaatgtaaccggattctccgctttaaactgattgtaaatctgtccgaacgcgtcctttttcctttgctggtacaggttatctttcctcgcctgtgtagcgtcctcatcgtaatcgctgacacatcggaagatataaaacgtaccgttgtcctccaccaccggactgatctcacccgcagtcagggaaaatgccgcatcttccactgcttttttcgcttctccccgccccagctgcttccgaatctcgttgctctctgaatactcccgtgctatggcttcgaagtccgccccgtcttcctttacctgatccagcacgtcctgagcagtattgccatccgagagaacgatctggtcaatggttatgaccttggcctcgctgtcgctgatctccagattcatatcctttgtcagctcactgaccaccttgttggacagaaagtattcctcgtacatcgtccgtacatcgtcctccttcactcccatgtacgcgatgtcgtcctcggtcagagactcataatattcctctgacagcttccggatctcctccttctccgtgctcgtgatgataatctcctgatcctttgccagaaggttcatcaatttcatctcctggagaaattcccgggcctgtcccagcagatacgtctcaaaggtctctccgtccggcagctccacgctccagatctggccggtataagcctgctggtaacggttgcgctccgtcgccacaatgatcatggactgcggaagtgtgtatcccttcgtttcatttacctctgagaccatgggaagccccctggtacagccggtaagaagcatgacggccagaacggcggccagcgtttgtttcactttttttctatatttaaaattcatggacaactcctgtatgaatgaaaaactctcctgtgtgttatgcgaatagtattataccatactttctgtcacgattctacttccctgattcgttttttctaccagaatatggctgccgatctgttctttcaattcttccacatgggaaatgattccaaccatgctggatccgccgcttaatgaggtcagaatcgccacggcctgctccagcgcttccgcatccagagagccaaatccctcgtccacaaagagggcttccacctgaattccccccgcatagctctgtatcacatccgaggttccaagcgccagcgccagggccgcgttaaacgcctctccgcccgataagctcttcacggaacggcgcttccccgtgtactggtcaagcacctccatctccatactctccctgcttctcctgtctctcgcccgctccagccggtgcagctcataccgctccccgctcatctttaaaagacgccggttcgccgcccggagaatgtcctcaaagtacacggataagacgtactgctcaaataccaggttccggccgttataccctccggccgcccgttccagctcacggaccacaccgtactccgtctccagcttttccttgacctccagatggcctttcagggtggacagtgactgtctgttcaaagccagagccgcacccgtccgttccttttcccttgccgtctgcttccgatccctctcacattccgaaagtgctgcctcaaagccggacaaatccaccagctccgtctgcttcggaacccggatggacgcttttagctgggaataagccgccttctgtttttccagcttcaccgagcagtcctggtactccttttcacagtccctgatctctttttcttcctgcttcgtctcttcttccagaagctttagcttttccccgatttccagtaaagccttctctcctccgtcggataaatccatgacgccaaggttttcttccatgttttttacagcgcccaccagagccgcggcggcgcctgcggccgccgatgccttttccgaagcggcctcatagtccgctttcagcctgcggatctctttctcatccggtacctccccctccatggatgcaggcaccggatggactgtggagccgcagaccggacacggaattccctccgttaaatctcttgcgatgatccccgcagccgccttcttaaaacagtcgtcctgatattcgtaaatccgtttcttttcctttgcctcaccatcgagcttcaaatacgtttcctgccgttctgtcagctgccggcaggcggcctgccatgaggcaagcccctttttctgctcctccagtacgcgcagttccgactttttcccttccagccgttctctgcggacggggatacggccgtatgcctttgccagctctctcttctgttcttttaagctgtcccgttcttcctccagcttttccagagtctttctgtcattctcatactttctgaccgcctgattgccgcttcgcagttcctcaatggctctgacctgttccttataggaccggtccagttccccaaggcaggaagccagttctctctccctgctctccagccggtcgtcttcctgttctataaaatccagaattttacgataattccggtttttcttcgacttcagctcttcccagtccccgttctcaatccggaatgttccggtgatctcgtccgcccggtgctttacctcatcaatccggccgtttaacgccttcactctggccgacagaagcgccgtcatcgtatcgtagatccgagtctggaaaatatcccggaatatctgagttctctctttggagctggacacgagaagctgctgaaattccccctgggcaatcatggatatctggcggaactggcggtagtccagaccaagcagcccggtcacccgctcggtcacctggctgctccccgaggccagaagcgtctctccctcatagagttcgccgccctccggctctgtggtcatcccctcacctttgagctttggtctgtcatactttggatttcgggtgacccggtactgttttcctctgtgggtgaagttcagggttacaaaagtaggagtggacgcgtccgcaaagtcacttcggagactgtccttctcccggatgcttccgctgacctccccgtaaagggcaaaggtaattccatcaaatatcgtggttttcccggagcctgtcggtccagagaccagaaacagtccctgctgcatggtctcaaaatccgcctgctccacgcctctgtagggcccccagccacttaaaacaagcgatgtcggcttcatgacctctcctcctctgcctgctcggcggtctcccgcatcacggcctcctgctctttcgtcatggcctttccggtaacaagttcataaaaatcggcaaagagttcatacggccccttttctttcatgatatcctcatgaatcacggatccgtcctgctccagtgcccgcttttcccattttagctgcatgatattggggtagacgcttctaagcgttccgattggatccagaagctccgtctcatccgttaagacagccagaatatagtcttccggatccgccgcactgacgacctccggaagaatcaagtcagaaagacgccccctgatctttcgcatatcatggaccggtgtcagtggaaggcgttccagactgacctttccatccttccccacctcaccgtacagcacagatttctggtggctgcattctgaaaatgagtattttaccggtgaaccgctgtaatagaccggctgttttccgatctgctggcatccgtggatatggcccagagccgtatagcagaacggctgaaacagcgcggcctccacctgatccgttccgcccacagacacccgcgtctccgaatcggagagctccggcagcagcccctggttcaccacaaactgatgggccatcagaatatcccttccgccgggactgtatgtcacatggcgcagaatttcctcgaagctttcctcgaacgtcttcatactgctcccgcaccgatagagggatttcacctccgccggcctggcaaacggcgccagatgtacacgcacggctccccactggtcgggaatatccacaaaccgcaccggatcttccagtttcccttccagatacagccctcttttctccagaatccggttggcaaaaccaatccgctccccgcagtcatgattcccggcaatggccagaatcgtcactcccagttcagaaagcccggtcaaaaacaggtcaaacatcgtcacggccgcggccggcggcacggaacggtcatataaatcaccactcaaaagaacggcatctgcctgccgttcttttacgtaatccgttatctgtttcaatgccgcatcctgttcctccagcatggagaatccgcctacggcctttccgatatggaggtctgatgtatgaataaatctcatcctcgttcctttcgtctaatacgtctccagtacagctttgtcagattcccgctgtaccggcagtcctctacagcagaagcttcagtatctttaacacaccgtcattcacattggtatccgtctgaaatctggctgtggctttcacctccggtctggcgtttcctaccgcaaagctgtagtaagcctgttccagcatctcgatatcgtttaactggtcgccgaaagccatcgtctcctccggtttgatctccaggctgtcctgcaaaagctttaccgcctgtcctttgttgatccccggtttcatacagtccatccacatatcgcctgcgatggtaatcttcatccggccgctgtatttctctctcagttctctggtatgcgcttccacgtcagtctcacggtatacagaaatcttgatgaactgggaatccacttttgtcagatccggcacctgttccacacggaactggtatccctccaccagccagtcgataaaatcctgattttctgtctccaaataaaccacgtctggaccgctgagcatcacctcgagcccctccatccgccgcacatcgcgcaccatgtccatcaccgtttcccggtcgatgggatttaaaaataaattccggccatggcagcccacgtaggctccgttgtcggataagtaaaataccttttctttgatggggccgaagatcgattcaatgctggcccactgacgcccgctggcagccgcaaactgtacccctttttcccgaatcttcatgatcacgtcgagaagctccggattcatctcatggcttccgtccggcaccagtgtgccgtcaatatctgatacgatcagtttaatcatctcttatccctcctggttatgagcatccggcggaccttctgtgtccgcttacgcgttcaatgagctgcatagccccttcatttcctgataaacacgtcctacaggcaatcctactacattattataatccccgtcaatccctttgatataagaagcgaattttccctgaattccgtaagccccggccttgtccatgggctcctctgaaaaggcgtacgcatggatctcctcctctgtcatgggatacacatgcacatctgttttctctgcaaatgtctttcgtatcccgccttcccggccgcagacaatcagagttactcccgtatagacctggtgggtcttccctgccagaagcgcaatcatgcgttctgcctcctcgtgggaccctggcttacccagaatccggcctcccgcggccaccaccgtatcggcccctatcacaatggtgccttccatacaccgcgccgccacatcagccgccttctgcagcgacagttccttcactacttcctccggtctgtcggttgttatcttctcttccagcgtgctgggaatgatctccggtatgattcctatctgtcccagcagttcccggcgacgcggtgacgccgatgccagaacaatcactctctcctctgtcaaaccatttacctcctgtcctgtcaaaatcaaaaaacgtccgctcccatactcccagggaatgaaataagcgggaccctttacgaatcccgccaaccatcaatatactttcagacgccctacgactgatacgccgtcctcttcttccatctccgcagccttaagctgataccgcatggtgtatgtaaaatctgctacataaaaggataagagccctaaggccaccaggcgttccagaccgatgggaacgacatccaccagctggcttacaaaaccatttaaaaatttaaagaaaaacagtcccagaaatccccaggcaatactgctttccagacagataatgcccttgtaattaaatggcttctggctgtaatcccaccagaatgctccgaacagcttaatcataatgtgtgctgtcacaagttccatggaagttgccatcaccatggaagcgaaatacagctccacaggctgtcctgccaacggctcaagaatcaggctggctcccagcgcaccaaaaccataaatgacgcaaaacgggccatgtccaaatccccggttcaacaccgggctgcggttctcatagctgagcacggtacattccagaaggtaaccgatgaaactaaatgcgaaaaaccagttaatcgtatggtaaatcgtcatatccattgtacctccaactttaacagttttttaacttgttaaagtataatatggaaatcttaagaaatcaagaattattttcttacgattaacggaaatattccgacttttttgcggcagccccacgctttgaccatgaagcaccgccgttaatagtactgcgccataaacacggcgagagcaatgccaagaatagcaccggccgccacctgaagcggcgtatgtccaacgtattccttcagcttctcctgcaaaacttctccgctcagcttgagtgggttttccagcaggatactgtttaagagcttcgcctgcttccccgtctctctgcgcactcccatggcgtcatacatgactaccatagaaaggataaagcataccgcaaactcaaaagaaccgacgccataatgcatggcggcggcggtcgtcattccacataccgtcgcggagtgggagctgggcataccacccgatcccaccagccgctccggattaaaacttttattcagggcaaggtcgatgattgtcttcagtacctgagccaccgtccagccggtgacagcactcatcaaaacctgatttgccagtaattcgtcccaaaatgtcatggttttctcctgctttttgtatcagcggattcttccggccatgataacactaagcggttcttcccgctctgaggctgtataaaatccacctttttactctggcggccgtctctgccaggccgcagaacttatccgcgtatataatggccattccttccctgctctttggcggaaccggggtgaggggccacatatggcgcagaatcatgtccttctccttatccgttaagtcaaagtacttttctgcgttggccagcgccctgcgcggatgggtaaatccgtgaaagtgttctcccgtctccttcgcatgggtatgccagtcatataagaataaatcatgcagaagccccgcccttgcggtctgtacataatcccagcccagacggcggcagatccggtaactgaaataggataccttgatgcagtgcgccttacaggtagtatccccatgctgcataaaacgatccatggattgaaatacaggattttccagaatatccgccacgcaggcaagatattcctcatcctcgtcataccgctcctgattgatccaggaaggatcctccgcccagcggagcacttccttcttttcttcccgagtaaaacactttttattcatgcaatgtccgcttccttttttctctgaactcaatagccgatcagccagtcatacaattcctgatacttgccggctgacgtatgccaggaataatccatcgccatcgcccggtcgatgatcttgttccactcacgcttcttatcatagtatatccgctctgcgtagcgaataacccccagcatctcatgagcattataattctggaatgaaaatccggttcccctgctctcaaactcgttatacggttccaccgtgtcctttaacccgccggtttcgcggacaatcggaacggttccgtagcggagcgacatcagctggcttaaaccgcacggttcaaataaggacggcatcaaaaatgcatcgcaggccgcataaatcttatgggacatcggctctgaataataaatattcgcagaaaccttgtcattatacttccagtcgtaatggcggaacatattctcgtaccgctcttctccggttcccagcacaaccagctggatatcgtcctggcacatctcgtccaggacacactggatcaaatcgaggcccttctggtcagtcagcctggaaacaataccaaccataaacttcctgtcatcctgcggcagtcccagttcttcctgcagagcccgtttgttctttatcttctccttacggaaattcttagcattgtacttctggacaatgtaaggatccgtctccggattgaaatcatcgtaatcaatgccgttcacaatgccgcgcaggctgttcgcgcgcgccctcatcaggccatccagtccttcgccgtaaaatggcatcttaatctcttccgcatacgtctcacttacggtggtaatggcgtcggcgtatacaatgccgccctttaacaggttgccatccttgtatgcttcaagcttatctggtgtaaagtagtaatccgggaggcctgtcagcctcttgatcgtcatgacatcccacactccctggaacttcaagttgtggatggtgataaccgacttcatgttgcggaagaactctccgtcatggaaccggtcttttaacaggacgggaatcagtgccgtctgccagtcatggcagtgcacgacgtcaggctgaaatccgatcaccggaagcgccgacaaagccgcccttgagaaaaagcagaatttttccaaatcacagtaccagtcgccgtatggctttggtccgttaaaatagccttcattatcaataaagtaaaaagtaattccctcatatacgtattgaagaattccaacgtacctgctctgccccatgtaatccatataaaaatggtttacatactccatgtcgtttctccacaactccttcatacacagatacttgggaatcattaccctgacatcaaaatattccttatcaaaacatttgggaagggaccctactacgtcagcaagtccgccggtcttaataaaaggtactgcctccgatgcaacgaacaaaatcttcttcatcaaaaaacctccctcatttacagtcacccctgagggcgccactctttgtcttatagtatactgcattttacttaaataaggaagtatatttgtgatagattttctaaagttttttgtagtccagtcttattttatcagcaatcagtgcaataaattcggagtttgtaggcttgccctttcccgtgcttacggtatatccgaacaaatcattgatcgtatccatcttgcctctgctccacgcaacctcgatggcatggcggatcgcacgctccacacggctcggagtcgtctgatgctttttggcaatagacggatagagaatcttggtaacactggtcagcatttcctggtcctgcacagagataacaatggcatcccgtaagtactgatatcctttgatatgagccgggatgccgatttcatgaagcatttgagtcacgtcattttccagattctgttccatgtactcatttttgttcacatatggcttgactttcttcatgccggaaagtcccgtagtttttgatttcctgtgtccgactcttctgactttatcgacaacaatatctttgttgaaaggcttcatgatgtaataattggcacccatgcggaacgcgtcttcggtaatattctcacttccggccgctgttaccataataaacgacggcatcttagtcactgcggcattgctgcgcacccgttccatcaccgtgattccgtccattctcggcataatgacatccaataagacaacatcagggcttgtttttacaatcatgttgtaagcatcttcccctttatccgcctttccgacgacatggaaatcctcctctccctccaatatatcgtttagcagactcagtgtctgcaggttatcgtccgcgattgcaatactgatttccgacatcttcctactctccctttcttgttgattgaatgattagtgtaaagccattatagacttgcccccgaattgccgcaatggaattctgtcgcatttttcgacaaaaggcgggcgtttttcccacattttcctccgatggcccccgaagcggaaaaatcccccttcgatccaaatccaggcctggtcacaaaatccgacagacttcatttttatgtaaatgttgaattttgtggctcggtgtcgggaaaaaactccgggcgtgattatcggaatattttaccatattatggtgctttttgaaaggatatgaggtttatttctgacattaaaacggcaaaggttcagtaattcgggaacctttgccgttctgtgttaaataattgtttttttctgatgaggggagaggcagcagtgcagaagcaggcacaggctgtgtatggtaatatggtattattgcagctgtttaaagaaaggaaatgatataacgccaattataaatacaatactgcataccgatgagtaatagatttttgaaagatttttaacaggttatacaggaaaactctccgtgtatacagggaaaacttgttgagaatgagtggggtatcatgtaagcgattgctccagacagctgttttaaacgcctttctcaacatttaggcacctattagattccctgagacaaggaggttcgttgtcaacagggaatatggagtgaaggagatgtaaaatgcctcgagaaatacgttaatattttaatcctcaccttccttgcggaaggcgacaagaaactttttataatcgtgattgttaggatttaatttcaatccacaccttccttgcggaaggcgactttctcaggttttgccctttgcggttcgatctcaaatttcaatccacaccttccttgcggaaggcgacgctgtccgaaaatcaacatcatccatcatctcgacatttcaatccacaccttccttgcggaaggcgacagcaaatacaagtcaaattacaagtgaatttctcctcatcagcaacagaactctatcattttgacttattcaatcattttatcaaactatattacatatttcggtatatctacatctaaaatacaggtgcgaatctcccggtattttaatgttcacttgacattcgcactttaatacaaaagaattatctaactatttatttaaagaacaactgccctaaaaaattaatggttctgtcacatcaaatcctggtttcgcaccaatatgttccaccttgtgcttataattatcactaaggtagtaaaatctgaggctatccacattcttatcaataattccttctaaaattccctttacagctctgcattttgccgcatccatattgctttcaaagaccgagttctgaacacgctggccataattaacacactgctttgcgactcggcgtaagcggcttctgcctgcggcagtctctgtatttacatcatatgtaatcagcacaagcatcatcaacacctgcttccataaaaacgacggatattcgtctaaatcgcccctgatataccttgccaacaacatggactgaacatatggtaccattccccattctattttttcattaagaaacgggtgggttatcgtctcctgtttcttcatctgccactgagacaaaaacaattttcttgtctcatcatccataataacagcaccattttccttcactgaaaatgcatctcctgatataatctgtttatttatcagcgtcagcacaaatctgtctgccataacactgcgaaattattccatcatatcaagcgccagtgacattctttcgggtctgtctgtatgaagaaatcccacgtatggatcaagtcctacagtctccattgctgctccgcacagcccggccagaagcgtataggcaaatgacagcattgcattcactctgtccagaggcggccgcttatttctcccatgaaaatagaacagttctttttgctacaaaatcaaatcgtcaattacagaaaaatatactgatgcagcttctccttccaggcctcgaagttctccgctttctctgctaacttttaattttccttaaactttcggccagataagaggatttttcttgcaatttatctgaatcaagcctcataggataatctcttgcagcccgttccaacacccaacgggaattaaacaccttgccaaggatacagtttctcgccactttaatggcctcaccatcattttcactgagtcggtactgctgttttctcaaagtaacattgccacgaacctcaccggatactctggcaagaaaacggccactggcggataagaagcttagatctatatttcgttgtacacaggcccccatcagtgcaggactagcccctgatatccaaatgtcacaatggcttccagattatgaagcgggatacggccaatctcctcatcttcagaacgtattaccacattttttccatctaatgaatgataacgctcaggagcagtgacatataatgtatttagcaaatgcttcatacgctctcctttccctccaaatttcgttcgatataatctgcggcgctttcatgcctgccaagcattggaaggcagatatccttgagggaacaggcattacagcttctggtccgctttgcctttggtgtatagcgcctgtcgtaatacttgtgcatctccagaaaaatatcctttgttttgtcacgaatctcctcgtcaaattcaattttctttctccgcctggtctctccataataaagataaccaccgggtatcctgcagcataacatttcctccaggcaaagggcctgagctgtcagttgaagaatgtcaacatcgtccttttggggttctccccttttatactcaacaggtaccacatcaaactctgtattgattgtcttcgttgattccggctccgtttgtgtcagaccagccttacgctcctttacttcctgttctccagaaaatgaacagccgcaaagcaaaagcataaatccacacaacataaaacttttttcatattcttcctgctcatactgtttctccatgaattaaccaatgaagttgattttcctagcgctagcatttactcgaaaaattcgagtaaatgaaatttcatctaattcacctgtttaaatgccttttgcaaattttcactcataaaatggttattcatttgtattatataactcatcctgtacgttatacataagcttggcagggatcatcaataatcaatataacatgataatctttatcaccggcgagctttacaaacacaaacctctccagacatctatctcggataccattagtatgctacttttcagcttcaaaaaagtaattctttttgacctcaacctttccgaaaaactcgtcattcccatcatcgatcagaagattcagaaagtcttaatactccagccatatatcccagaaacgagtcataaaaaagtgtccactgacaggcatcttccgcaatctgtttcacctgccacttttctaaattctttcggcgtatggatacggaatatttctgcacttccttccagttcccgtaacccagtttaatccgttctgccacatcagctttaacaatcaccggtatgacattattctcaatcacatggaaccggtcgttcaccgttttaaagttctgaattgcctcggcctctatcagtgcctgcatttcttttgtttcattctttcctctttggagttcatctctgattgattttgtgctcaattccggcgtaatctccaatccgtcccgtaaatattcttccagaattcctgcacttattttcactcccggattctgagtcagcattgtatcatcctgcatactgaagctccacatctgtgcatctttgcaggagccgtttcggttaactctgcccgccgcctgcagcaacgaaagaaccgaggccagttctctgaatccggttcggaatgaaaaatcaacaccggcttccacacatgacgttgccactaaaacccagtttgtatcccccggattttccaatcgttttttaaccaccttaattgtttccgcacgatcctccggcataagcgcagtggagagatgttccacacattcccttccatattttctgcaaatgtcatctgcaatcacagccgcactttgaacggtattcataattacaaggcgcggcccaggctttgccataacccagtcaatcagttctgcacggctaagcggacatggattccaacaaaattgaattctatttttctcataaccaagcaattcgctacgcaggtttgttggaaccatctccgggacctgttttttctctattccaaccaactccgggatctgccaaaaacgaaccagcgagcctgatgccaaaatccaatgacagctccactcttcttccaataccttcatccaatgccatgcaagcggaagcagcttcagtggcagagcggcatgcgcctcgtccataaaaataatgctccccggcaattcatggaggcggcggagcgcccccggacggtttgaagcaagtgtttcaaaaaacgcgactgccgtagtaactataattggcgctctccacagggatgtcagacagcgcgtatcctcatcctcaaaatccgccttgcaatgcagctctgccacaaccgcctcccgttcttctcccggcaataccaaagcgttccgataaacttccactgactgtgtgataacatttgtgtatggaagtaccacaaaaatacgcctggcgccttttgcgactgcctgattcaactgatacgccatcaccgccgtggtttttcctgatccgactgcaccgtcattcgaaacaatcccctcttcccgctgaccatcccgacacctctcgtacatctgtgtacgcaaatcatttcgtttactccgattcttctctcccagatttgccacataacggtttagcgcctccaggcgaagcgcgggctttagtttcggtatattatcatgttcaggatactgcccataagcagctgctgtatctgaatggtccgcatccaccaggcatgaaaataccattcgaatgaacatggacatatcaccttcacaatactccggattatgtacgttgctttccggaattaactgcctgtgaatctgaagcagctgctccatttcccggtcaaaacaggctcttacagattcacgcgtatcccgatagcacaccatctccgccctattctcttccaccgtaaaatcaggcaatccctgatgatgcgcatacaccagaataagcgagcacagtgcttcctgtcctttttgtttaagaaatgccgcaccggcatccacatggtttacgggtaaatgtcctgattttataccttctttatgcaattccttctgattctcctcagccagctttcccaaatcgtggtataatgctgccagacacaggatattctcaatttgttttgcatccttcctacagtaccttttcatctctcgcgcaaatatcagggctcgtttcattgtattataaacatgatcgaaataggattgagaaggatatccgtttttcgcactgtgagcaagataagattccatcacagacataccaaatcaacaataccggcaaccttatggagcagctcttccggcagttctgtcttgtccttgtaatcatgccagttctccgatggttctgatacattccctatacgttccggtgtcaatgcatccagcagcatatagtccggacagcttcccagcaggttcttatgctcgatataccaggcatgacgcaggcggacatccggtcgaattgcagagcgattcatatcatatgcctgaggaatcaggagtttgagcagctcgatatcatctgctgtgcagccgctctttttagcataattggggttgacgaaaaacggcatacaataaacaccatgttcaaccacacggaacgccaggggagccatacccgcattttttccttcctgcactcctgccttgttcgtattcgtctggcggataatgttaacaggagaaatggaaataccaacaccgaactgtacgacaccggtcttaatatatcccttgtttccatccttctccagaaatgtatttccaaacactctggcatcccaatattttctgacaaactcacttttcaggaactcttcctgatcgaaatcagccagctttccaccggaagtcatttcctttgtgatcgctgtacgatcccgtccccggtgctccagaatccggtaatggtcctggttcaatctgattttttccggcaagctttcaaagaaaggtgatgtgggatcatctaacaaatctctcaccttgcgtttgaaagataccggggaaatctccccacaaccatttggtctctgccgcgggtcagcctccctgtccgggtccccgttggggtttgagtttaccacttcaatcaccaataatcctgttgcccgtttcatctcatcagccatttttatttcctccatcgttattttttattatttctgagaattatcacttatttcattttccacaacgcagatctgttcactgcatggctggccttttatttcttcctttgcgggaaaagctgccagatatccgataaaatactgtgctttttcctcctcattaaagcgggtctgatccccccatgccgcatgaagctgcgtggcaatacgctcatatagagaaagataccagcctgcgcgccagctctcctcaccctttttctgtatatctttcgtacggtacttctttgcccatgtgatatagggattcatccgatggcccaacaccgccagcgttctataaggctgttctgcccccgagacgtataatccgctgcctgccagcgtatttggaatatcattgtcacgcacggccttacaataaatttcatgcagcgcatctgataacttcagcagctgcccaaataaatatggaaattcctgcatatacttctcctttctgatttcaagctgatataaaagcagtcctgtcagtgccagtgtattctgagtctggcgcaacagtacagcctgcgaaccgtcataaccattcctggcaaatcccgcttttccaagatacggcgcaaggtttatcacattgttcatcagaacatacagattcctgcgcacctccggtaactctgctccaaataacatctgcattccataatagcgcggaatcggtttaaatttatccgaagaagctttcccatcctgtctccatatcaggtttaaaatatcggctgcctccagtgggaacaatgttaccggctgcccaaataaaaacgccggaaggttctgacatcccaatgaccatcgctcgctgctgcgttcaatctcagccggcgttgtattataggtataaaccaccttcgttctggctttgtccagctttcgcagcacaaaatactggatacgctccgacatcgggtctgtatccggctctttcgttttctgcagttcacttataaatgccttagccgcagattcaaattccgccttcttcctgattttatccctggtctcacactcaggccgcccttcttccgtggcctgccgtctgcaaaatccaaccatactgtacatatttttccgtaaggtttccggataggcgaaaagggcttcatctttatctgtgctgatccatgtgattcccttgtgctccgcggcgctgatccacgccagcgctgactgcagcttaaagcgcatttctttggaaatcggatacgtcgcattttcaattctcccgtaacggctttggcatggctgtccgcgaaacattgttctaagagagacttcgaaaccggctgcaagttttactgtcggcatcggttcctcaataggagcaaaaacatatccgaacgcatccgattctttcttcacagcgcctgccctcgtcgctgcatccgcttctaacagctttcgattcagcatacttgtaaaagcagccgttgccactgacaatccctcctgaatcaacgctctgcaatccattaccatggataaggttccgtaatcttcctccacgctttttcccggtttccctgcgtaaaacaaaatctggagtgccaacgcaatcccctttttttcctccagcattgcaaaggccgcatgctccagcgccctatgcaaattctccgcctcggcaaaagcatctgtctccccggttaacctctgtaatggctgaaaaatagttccggtcttttgaaacaactcgctcatctcacgaggtacatcctgcatactgatgcgatacttgttgctgaatttctttccccagttattttccctgcaaatccgtcggatttcttcgatattgaaattggtagttttgccctcagtcaaatctgaaatcatcctcttttccgcttcatccgtcaggcggtaaagcggcgccagattcagagctggaaaagtcccctgattggacccatattttttaatttccgcagcctgctccatctcgatacttttaattttataaatctgtctattgtcgaaaataatatgtatgcaaggcgccttcttcgtgaccttgggaatcattttatacttcggatgcgtatgttctgtcgcaatgcccgcctggtcaagcgccactgtcagctgatatagttcattaatcacggattactcctcctctctcggaaagtttagtctgccctcatgaattctcagactctggctatagacagcgcgaaaatccgagttgtaaccgtctgggaatacttctctcaacatggaaggaattgtgatatctgataactctctgcatacttctgtctgcggacgaaacggcccgaaataaagcggtgtaaactctcgccagcccaataccggtatggaaaatgactgtccgcgtttcaaacgccgattaaagatatcctgataagcatgaccgggtgatgtagtttttctgtcccattctaatgccttctccggcagcttctccttatagctgtttggtatcacgtctgcataaagccgatagcagacatccatcagaaccgttgcatagagttggtaattattccccttctgaatcgatttacccgcacgcagaggtcccccatagttggtcacataggaatgatactgaagcggcgcacaaatctctaccgcagttggaacaattctgatatcaggcccccacaaaattgattcaaaaatccccctgacagctgaaggtgtcggcgccgcatagcttacaggcgcatcgccacagtctgtcctcgaccaaagcgcagttgcccctgcaatctccatcgtaattgggtatctgtagtgtatcaatctcgaatcctcctttctatatcttcatttatttgttagttttaattatatcttatctaaattaatattgcaaggaaattttatttatcttatcaaatttaaggttttacatttcatgatttatatggtaaatttatatagatcttttgatgtcaaatcaaatgtggattgaaatatttaattgttcgtttttcaaaaaaaggctgtcgcttcaatgattgaaaaatcagagaatcgacagccctttttctctattaacactaccaaccataatctcctctctcccttccagactacagctgtcagctgcttgcatcaccttcccactactccgtccgggccgcaaccgctggcacgcttcgcgcaccatcggttgcgcggctttcgccgcatagggcatagtgaaaaggaaggcttatgtgagcaagctcccaacgccttccttttcactatgccctgcccggactcaatgctccagcatattttcaataaatatcccataccctctggtactgtcctgtataaacacatgagtcaccgccccaatcagcttcccatcctgtataatcgggctgccgctcataccctgtacaattcccccggtaatcgccagcagctccggatcggtcaccttaattaccattcccttattcttatgtgtcgtcgcgtaatccaccttctggatctcaatctcgtaatccttcactaccccagacacatcgctcctgatataagccgttcctttcttcacatcctgcctgtaaccgatcggaatcgcatccgcttttaccgtctgcttaaaccgctcattgaccgtaccgaatattccttcatccgtattggattcaatcgttccgagtaccgatcccggtccgtaatagatgactccgctcatcacacccggcttaccgaatgttcccttttcaattcctaatatagaggtttcataaagcgcgccgttttcaatctgaaccactccgcctgtgtcactgtcgctgatcccgtgtcccagcgcaccgaaatttccattcatgtcaatatatgtcatggtgccgataccctgagtatcgtcccggacccagacgcctaatttgggttttccatcgtctccctccacaggtgtcatcttcacttcaatctcctgatccccgcgccgtactgctaaaaccgcttcgctggtaccatttttgttcaactcggtgacaagtgcttccttatcctttaacggcgtaccgttaaaagcctcaatatagtcccccgactgaagcaccccgaaggccggctccacaatcataccgtcactcttcgtaatatcccccgtaccaattaccataatcccatcagattttaagtaaattcccaccggcgttccgcatggaaccgcgtatttcgtgtccaccacgttaacctggatatccttcagctgcagccagccaaacagttttaagccgatcttgtagctgccctgattttctgaataaacggaaaacggctgattgacggaaaggtggatctgatccgaagggatattggaaccattgcccaaaaccacttcctcactgtctgaagacagcgtcactccaaaaggcatggagaaatgaaactgctcttcttcctcggccacgacattaagcttgtccggtatcacccacttcatatagaaataagagaagccgatgcaaaacaccaggcttacccaaaacgcggtcaccacatatctgtggaatttttttcccatcatctcacatacctccttatataaaaaaatgaaaggagacaattttttgctcctttcatagtatgtgagaaatcggtgaaaacactctgtcatattttagttgtaactaatttctttttaaaccagaattgattttacgtaaaatcgaacttgtcataatttgcatacatacttcaaaatctgagaatactgttttaatagtattaccgttttctttcaatttaatgtttttaatgtttcaggctagtgtaaactcttacgattgagaattcaattcaatccttctgccgctcccggcagcttcatacattgcagtcatcagtctcaccgagtcctttacctctgccagagtaatcggaagctttctgccttccgctacagcactgtaataatcccggatacacgcctcatggccgcttccccaatacttcttgcccaacgcctcatctgcagaagcagttattctttccgtgcggccatccctgtgaaaaaccgtaatctggggttcctccagtctgatcaccatattctcacaggaaacctcaatcaatggcggaagattttcgcagtacgcggtagttgcatagaaaacagcttttccattttcaaattcaatatatgcttccatggtatcttccacctcaataatttctttcaggtgatgattcgccatccccgcgcatacggcgtcgggcctgcccaaaagataaaccagtaagtcaagcgtatggatggactgattaatcagcacgcccccaccctctgtttccaggcgcccgcgccacccgctctgcgtatagtactcctcatcgcggaaccatgtgacgattcctctggctcccagaattttcccggtctctcccgattgaagcatcgcctttactcttatcagccccgggttataacggttttgaaaacagattcccgcacgttcaatgtgaggagccgactccagttcatcaagctggctttgggaaatcaccggcggtttctccaaaaatacattttttcctcttttcaggcaatcaatggtcatgggcacatggagataatgaggggtacagatatgcactacatcaatggcctcctgatccagcatttcttcataagaagtataccagtttgcgccgtggtcatcggccagactcttcgccctatcaccagccacatcacataccgaggccaattgtacgcacccgtttttttccagacagcctgcatgcactctggctatgtttccgcagccgataatagctgcccgtatttttttattattcatactctgcgccccggttactcctcgtattccataatttgccttattttctccctgtcggcccctgtgacagctttcatcggaaacagacacgccggattaatgggaacacctctcatttgaaccgcagtcttgataactggtacaaactgatcctgaataccgtagatagccatgagcgcgtctaatttcttttgatacctgctcacatcttccatgcggtcctcttctgccgctctcaccatagcggcggcagtttcgggaaaaatattggacagaccggcaatacagccatcgcctcccgataaaatattgtgaaaaaagaactcatcgaagccagagtagaccaggaaatccggcctcctgcctttcaccttccgaatcagctcccgcgtatggcccatctcacctactgtatccttaataccgataatattcggatatttcatagccagcttaagaacggtatctgcggacagctggtatcccgttctggccgggaagttatacaaaagaatatttccctttacctgctttgcaagctccgcatagaaatcatacgcttcctcatcggacagataaaaataatacggtgatatgaccgccatcccataagctccgcaatcagctgcatagttcgacagccagacacattcttcaaagaccgtgcctcctgttccaacatagacattcgccctggagccggtgcaggatatggcctcacgtatcagctgcttcttctcttccagaggaataccataaaattctccgatacttccaagaatcaggattccttttattccatttgaaatcagatgttcatataactttttattagcctctatatccacatgaccctgatcatcaaagattgtgacggccggcgtaatataatctgcttgcatgacactcctcctgtatatcgtagtgatgtttcgtactgctccctgctcccccgttttaccgggtacggaagtttccagacagcagcctttagtagcctgcaccctccatagccgaatctgcaccttctgtataccgcttaaacaaaccgtgcttttctctaatcggccgtttggagaagccccgttcttcacagcatgcttttccgttttcaggcttgaaaaaaacagaatttctgatctccagaattttttccatatcggctggtgtacactccccgtcagccgtgccgacgatattcacactccttttttccacatcataggcgataatatcgccctcctccacgagagcgatcgggcctcctctggcggcctccggagatacatggccgattgcggctccccgtgttgcccctgaaaatctgccgtctgtaatcagggacaccgtcccattcagggatggatcgcagacaattgcttctgttgtcatgagcagttccggcatcccgctgcctctcggcccctcatacctgataaccagaatatcacccggacgtattttcttctttatcacagcatcgtgagcgtcctcttcacagtcgaatacgcgtgccgtacccttatgttttctcatctccggcctgcatgcagaatatttgataacagctccttccggggccagatttccctttaacacagccacagaaccagtctcggcagcctgttccggatcacagatcacatcctctctgctcaggccataattatgaagatatccgatataacgttcatagaaatgatccttttcaagctgctctaaattttctcccagcgtccttcccgttaccgtcatgacgtttaagtccagatattcccttaacaggaactgaaccacagggactccgcctgcaaaccagaaactttccgtaagctggcttccggaaggatcaatattggcaatatgaggaatccggtgattgatttcatcgaaccagctcatagggagcgtcagtcccagttctttcgctattgacggcagatgaagcgtggcattggtcgagccgcctatggcactgtgaacaaccagagcattcttgaacgcggccggtgtcatgatctgcacaggggtaattccctttctggcaagctccatcactgcctggcctgctcttcttccatactttaagatatccgtcatcgtggccggaaccagtgcgcttcccggcaaagccattcccagcgcctccgccatacactgcatggtggaggctgttcccataaaggaacaggcgccggcagaaggacagccggtaagcttgtaatcgcgtacttcccatgcctccacccgttcatctgatttcatgcgcagagacagctttcccgcagccagagacgtagtcatatccggtccgggccgcatactgccgcccggcagaaaaaccgtgggaatccccacacgggcggcggctttcaggtgagccggtatggatttatcgcaggaacttgacaaaaccataccatcccacggaataaatccggcatgtacctccatcatatcacagatcgcctctctggacgccagcaccagattcatcccatcgtgtccctgagcacagccatcacagatatctgtcacatggtatttggcaccaaaaccgcccttctctaagacgccccacctcacctgatcggtgagctggtttaaatgtacacttccgggatgagattctccgtaagcgtcttcaatcagaatctgtggctttaccagatcttcctcggtccagccgcttcccaactgcagtgcgtcaaactgcgcccacagctttcgctccttactgctcttctgctccatcgtatcaccgcctcctgttcctgtccgtcgattcctcttatctgatactgcgcttcttaaccagcccggacactctctgcctgactacccaatccgttctgccccggcctcacattccagacaaagtctggcggccaggaaggcatgttcctgtgtcattgcatgctctgtcctgttgatacagtccagaatcagttctccaaagaacggatatcccaccgtatccctgcacttgataaaatgttctcccgttttgtcaaccagaatcagattgtcaccactgttgtcctccaccccgatgttaacgtatttgcggagttctatatatccatccgttccaaggataaccgttcttccgtctccccaggaagacagaccgtccggtgtaaaccagtccacccggaaatagttggtcgccccgttatcgcctgtcagcatggcgtctccgaaatcctccagtcccggataatccgggtgattataattggctacccggctgtattctacttttgctgattttacatctgcaaaataaagatactgttcaatctgatgggaaccgatatcgcagagaattccgccgtaagattctttttcaaaaaaccaggccggccgattctccgggctgccaatgcggtgcggtcccagtcccatcacattcaatactctgccgattgctccctgtttaattaaatttccggcatatactgcgctttccacatgaaggcgttctgaatagtaaaccatatacttttttccggtctccttcacctttgcctctgccagctccagctgctccatggtagtaaaaggggccttgtccgtaaagtaatccttgcccgcgtccatacaccgcagaccaacctcgcaccgcttcgaggtaatagctgccgcagctaccagtttcaccgacggatcattcagtacggtttcttctctgtctgcaactaccgctcccggatattttgctgcaaatgcttctgcccgtgcccggtcagtgtcataaacatacttaagtgaagctcccgcctccgtcaggccattgcacatgccgttgatgtgaccgtgatccagatacatggctgcaaagtaaaattccccctctttcaccaccggctccggctttccctttggtgcatagttcattccgtctaacgcgttcataccacgataccttctttcttattctcgtttaaacctcacggcccagcgaaattgcttcatcagtgaaattctctacggaagcatttttctcatgaaaatgcctaacattctttaagattccttccgccgtatagaatggatcatccttctttaacggaagctcaaccgttttctccgtaaaaccagcttcatagatcgcagtgatcagctcgatcgtcagtcttccatcctcacctgtgataaatggccgttcaccacgctcgacggcttccagaaaattctgtatttctcccggatgcttctcgtactgtaattccggcagggaatcgtaatactcctgaattttctgttccagctccggattcggatccggaaaaccatttcctttggcaacagaagcatgaacttcccacggcacggaaaccgccgcatactctccctggaatttcacggcctgctgctccccatagtggataaccgagctggttacctgagccagccggccttccggatacttcataatggctatggagatatcttcgacctccgcattatcgtgcgcagcattactcaccacagcagtaaccttatccggtcttcccatcatccagcccagcatgtctatatggtgcaccgcatgattcaacgtacagccgccgccttccttctcccaggagccgcgccaccagagatcgtaatagcagtggccacgccaccagaaggaatcaatctccgtgtgcagcacctttccgatgagcccggaatccagaaccttcttcagattcataaacggtgttctgaaacggttctgggcaatgactcccagagtctttcctgtccgtttttctgcctccagcatctggtcgcactcctcgagagaagccgccatgggcttctctacaaggacattactgcccgcttccattccatgaactgcaatttcactgtggacataaggaggcgtgcatacactgattacatccacagattcgctggccagcagttcttcatgggaagcatatatccgggcttctgccaatccgaactccgcctttctcttttccgccttctccggatagatatcacagagcgccgttatctggcataactccggaaattccagatacgcttttatatgagatcctgaaatattaccacaaccaattactgctactttcagcatacttatttcctccacattttgattttatttatctaaagcgtcataatactcggtgcgttccctgataacagcttccatacccgcgtttccaagagcggatttatatgcttccagcatggagtcgaactcttccggcttgcaggtaatacatttaaccagatattcatctgcagccagctggatttctgatacgttggcagactgtgtcggcgcgctgtaggctgacatatgtctgataattcctgtcgtggcattttcataattggagacaacatagtcctcaaagcccggaatttccttggaagctgattttacgaagtcatcctcgctgaagaagtatccctggtttccgataataaacatatcatgacgaatccagtccttatctactgcattaaaatctgcgtcgatcaccaccggaactccgtcttccagcttatagtgttcatcctcaaatccatggaataaagtaaatccgccttcctgagtcgccatccagtccatataggtgaccgctgcttccggattcttgcaggtctttggtacgatacagtaagccccattctgtgcatactcaatgttgtagatctctccgtcatgattgttcttcagcggaggaagtgaaacgatatctgcatccgggttatttaccttcaaatgctgaagcagtccgcctcttaagttatccacattaccatttacattggtcacgaagcagcccgcctgcccgtttaccacatactccgccagcgtagctgagaggtcattgctggtatagtactcctgatccaacagttcttcattatacagcttgtttaaaaaccttaaataatccgcatatccctcatcgccgtacaccggaaataccgattttatattaaactcatgttcatccggaagcgttgtcataaacggcatggccataacgtcagccctgtccgcagtctcatcaccaatggctacggagaagaagggaatcacatcggttcttccatccggattattttctttaaatgccttcagcacctgatagagctcatctgtggtagttggaatctccatccccagcttatccagccagtccttacggataaagaggttgtcctttgccgccgtcgcacgtcttgccgcaatggcccataactggccgtctccgtcacgcgccacattgagaacgtcttcccccagatacgcttttaaattttccgcctggccttcgccatccacatagctgctcaaatcatacgttccgccctggttaaaatagtcctctgcgatgcttctcgtataggtcagcgcaatatcaggagctgttccagccgccatcatcgtctgaattttcgtgacctcctccgaacgcggaaccgctacgaactccagattaattcccaccttagccatctcttcttttgcatactttacccaacggttgtcggtaactgttgttccctgcggagcgttgctgcggtcgaagagttcgacagtaagagtcacattgtcaaactgctttgatccgtaagtggtctggtttcccgccgcctccgtctttgtatctccagcctctttcgtctgccctgactcacctttcggtgctgcctcttccctggcgccacagccggataccacaaatgccattgccattgccgccgtcagaacggccgctgctcttctctttttccccattttaatagtcctcctctaataaattttagttaaccttttaccgaccccagcataacaccttttacaaagtatttctgcagccatggataaacaagaataatcgggatcgtcgatatcacgatgctcgccatcttcagtgattccgacatcacctgtgttcccaggttttccatggaaacctggttgatctgacctgcaaacagcagctgacgcagccgaagctgtaaagaaaacttctccggtgtctgaatatacagcagtgcgctgaagtaatcgttccagtaggaaaccgcatagaacaggccaatcgttgcaataatcggcatggacagcggaagcgcaattttaaacaggatcttcatatcattcgctccgtcaatcctggccgcctcctcaagctccagcggcagttccttaaaaaatgttctcataactatgaagttaaagacgttcatggccgaaggaattacaagagcgctgatggaatcataaagaccaacaccttttacaaccagaaacgtagggataataccgccgctgaaatacattgtaaagaggatgaatccgcttaaaatcccccggccttttaacttttccttcgacagcgcatacgctgctgcaaccgtgagcacaagacccagcagagtacccagaactgtcaccgtgacggaaatccccatggctgtccagatctgcgtctgcttcagcaggatctccttataggctgacagctggaagtctatcggataaaaggtgactttccccgaaagcactgccgtattaccgcttaaggaatacgccaccacattcagaaatggatagaggcagatcagaactaccactgtcagaatcaggtacagcattacatccgcaaaagctattttctttttcttcatttccgcccctcctataatattccttcttcaccgatcgccttggcaaaacggtctgccataaacaggatcgcaatatttactaccgactggaacagtcccaccgccgttgccggagagtactgtgccttctcaataccaagccggtatacataagtactcaatacctcggatacctccatgaccttggaattacccaaaagcagcggagcatccagtccgattgtcatcatcttactgaccgaaagaatcagcatggtgacaatcacaggcttaaccataggaagcgttacatagatgattctctgcattcttgtcgctccgtctaaataagccgcctcataaaggctctcatctaccccggttaaagccgccagatagataatggttccccagccgatctctttccagacactgcagataacgtaagtaaatatccaccagtatttgtcgcttaaaaacggaatggattttattcccatcacattcagaacattgttgacggttcctccgtttaaagagaacagatttaccgcaattcccgcaacaaccacccaggatataaagtgcggaagatacagcagagactgggacagccgtttaaaccatgtacagcggatttcattcaggattaaagacagaataatcgtgaacggaaagctgacaaccagcgtcagcaggtttaaaatcagtgtatttttcactgaattccagaactgaggctgggcaaatatcttcttaaacacagataatccggcaaatttgcttccaaatatccccttgaacatattaaagtcctggaaagccatggcgataccgcccatggggagatacttgaatataaagtaatagagaataaccggtacaagcatgagataaagccatttatccctgtacaggtaataccagatgcttttctttttttccattggtgttcccccttatttttatatggtctcatcaatacagtactttctgactgatctcacctccgcacacaacacccgctgtttcttcagctcagcgcttctctgatccggctgcgatccgcctgcaaatatctgataagtacatgcatcaatatatcgttttccattttcatcatatacagcaaatgcgtcagccggaaggtggatggaaatcgtcttctcttctcccggctccagtcccactttaacagcagccttcaattggggattcctgtcatgatcttcttttcttccaacgtaaacctgaatggtttctcttccccatcgctctccacagttagccacgcagagttttacctccactccattatcaacggaatcccgctctgatacctccagcccggaacaggaaaactcggtataggacagtccaaagccaaagggatacagtgccttctgtttcataaagcgatacgttcttccctccatggagtaattcgtaaagtccggcagttcctctgttgtccggtaaaaggttaccggaagccttccttccggattgaccgttccaaacagtacatccgccaccccacggccgccttccgctcccgggtaccaggccgttaatatggccggcagatgttcatccgcccaggttactgccatggcactgcccgccagaagcaccagtaccaccggcttaccgctgtcataagcagtttcgagaatcttctgctgaagaccgggaagcattaaatcaggcttatcaccacccgcgtaaatattaccggtgtctccctgctctccctccagtgtcgaatcaagtcccatgcaggcgatcacgatatcgctctccctgcagatccctttcacctccgacagccggtcattcctggcacccagtccggaaacattgcttttataaagatgacagccttccgagtaaagtacccgagcctccggctccgctgcttcccggattccctccagcaccgtaacatattcagaggcggtgccctcataatttcccacaagtgctctcctgctgtccgcattgggtccgataacgccaatagtcttataacgctttgtatcaatcggaaggagcccctccgtattcttcagcaggactacgctcttgcctgccgcgctgcggtttaacttcttcattgcaggcgaatcaacttcaaggtaagaaataccggcatagggatcgtcctcttccattttccctaatgcaccaagcttcaatcgcgtcgtgaagagccgtataaccgcttcatcgagccgctcttccttcacctttccttcttttaccgcctgaatcagataggtgaataaatttccgcagtttaaatcacagccgtgattcatcgccatggagaccgattcaactggtgagtctgtcacgccatggccttcatgaaaatccttaatcgcccagcagtctgacactacatggccatgaaatccccactcttttctcaggatggtttccagaaggtattcattgccgcagcatggaactccgtttacccggttataggctcccatgacagcctccacatctccatctttcacacaggcctcaaacgcaggcaggtatgtctcccgcaaatccttttctgagacttctgcatcaaagctgtggcgcagttcctcgggtccgctgtgaactgcaaaatgcttcacacaggccgctgtcttcaaatacttctcatggcttccctgaagacctcttatgtatcgtattccaagccgcgaagtaagccatggatcttccccgtatgtctcgtgtcctctcccccatctgggatcgcggaatatgttgatattgggcgcccacagggtaagccctttataaatgtcggtatcgccgtacctctgctgcatatggtacttggccctcgcttcggtagaaacggcttcacctaccgtttcaatcaggtcctcatcaaacgttgccgccagaccgatcgcctggggaaaaatcgttgccacaccggctcttgccactccatgcagcccttcattccaccagttatacgccttaattcccagccgctctatggcaggtgcctgattcatcgtctggaacaccttttcctccagcgtcatctgcttaaccagatactccgccttctcccttcgctgtctgtccagggctgtctctttctcgcttgtctccttcatctgaaatccccttttcatttgtaatgccagtataatcgttttctatgaagaccgcttttcacattttgctcatcaatacatcattttttgctataaatttactcttattttcgacttattctttacttatggacttttttagtatagaatatgacttactaacgcttttaaaatcacaaataatatacttattgcccaattacactttaaaaacgaattatatgcatggtaagaaaaagcaatttgtcaggagtattcatctatgatcgaaacattgaataagcaccacgaaaccgtcaattataagtgggtggatggagtacgtctctatcacaatattaagacagacagttttccccctcactggcataaagaagcagagattatcatgcccttatccaattcttacggtgtcagggttggcctgtctggggagctcaattccatcgaagaagatgaaatcattatcataccgcccggggaaatgcacacgatttacaccccacccacgggagcccgcctcatcgtcgacgtggatttcaccccttatatgaatttaagaggagttggatccctgattaacagcctgtctccttaccgcattatcagaaaagaggggaatcctgagctttcccggacattaagaaactatctgctgctgattgaagaggagtataacaaaaaggatttattctgcgatgcttcgatccacagcctgttcacaagctttttcgtaactctgggaagacaggatatcaataatctgcagacggaccgctataaaccggagcaaaagcttcagtacgctgaaaaatttgcagatatcagctattacatcaatctgcactgtacggaaccgctccggctggaggatatcgcttcctataccggcttcagcaaatttcatttctgccggcttttcaaggaattcgtcggctgcacctttcatgactatgtaacgggctgccgcctggctcatgcgcagagcctgcttgcctctgctgcaaccaccatcacagaggctgctcttcaatccggatttacaagtctggcaaccttcaatcgtatttttaaagagaaaaagcgctgtactcccacagaatacagaaagctgctgcgaagcagttccgccggtgaaaaatgatgttcaccggagaactgcctcacagcagctttccataattttatttatagcagttccatgcttaagcatttggaaacaccgaatcatattttacataaattctccggtttgccattcagatacgcatagacattatcaaattcaatctttgctctccgcaccatcgcttcttttgtggcaaatgcgacatgaggtgtcagcaggatattctttgcgtgacagagcggataatcggcagggatcggcggttccatatcaaacacatcgatggcagctccggcaatcttgtcttcattcagtgcttccgccaaagctgcattatcaacgataggtcctctggcacagttgataagaatcgcatcttttttcatttttccaatcattgtaccgtcaaaaaatcccttcgttccctcattaagtggaagatgcagtgatacaatgtcactttcctttaacagggtgtccatgtctgcatagcgaatccctgcctccttccactcttccttttcatgacgggcatatgccagtacctctgctccaaacgcatgaaacaatctggctgtcttaaaaccaatctgtccacagcctacgataccaaccgttcttccgcatatctccgtaccaacaagaccggcagaggtttttccgttccttacggcaaaatctccctcctgaatcttccgcataaccgcaatggccattcccacagataattcagctaccgactggttagaatatcctgcgcagtttaaaatatcgatcttcttttccctgcaggctgcaaggcctacatggtcgattcccgtaaacgccaccgcaatagcttttaagctgtcacaggaacggactacctcgtccggatatggattattggcaatcatcacgatctcctgtccggccgaccttctctttaattcttctacatcggttgtcttagtgtcataataagtaaacacgtgcccttgtttttttaagccttctgccagactctcaatcatctcttccggtacgccgataggctccagtaaactgatattcatttttcttcctccaattattttatagggttacagtgtggacaaagatagtcggaatttgcagattctcttccatctctttcgttaatcaaaattatatatcgttttacaaaatatgtcaatataattttgttttatatatcattttttaaaattatattttatttaatgaaatatctttcaaaatccattgacattcatcttaaaaatccgctatgatatacccatattcattcaaattatgatatacttattttcaataatagaaacggaggcgaatcatggaagaaacagaacagactaaccgttttgcaaaggacaaccagtcgactgacaaagtactggccattatagaattactttcctacagcaaagaacccatgagacttattgatattgcaaatcagcttcattacaacaccagtaccacactgcgttttttgaattcgttggaacgcaacggatacgtctacaaggaccgtgaaacattaaaatatcagatgacctacaagctgtgcggtctcgccagctatatcagcaaccgcaccggcatcgtggagatcgcgtcgcttcccatgaagcagctttccaccagtctcggagaatgtgtatgcctggctgtggaacaggactataccgtggtatacgtccacgttgccgatggacccggccagatgctccggaccactcagcggatcggcagccaggcccccatgcactgtacgggagtcggcaaagtgattctttcggaatttccggagtctaagatcgacgagatgatccggatgaaaggcctcacccgctacaccgacaacacactggtaaccagggagatgcttcttggcgaactgcagctgatccggaaaagaggctacgcctacgacaacgaagagtgcgaactgggcgcccggtgtatcgcctttccgttaagagattacagcggaaaaattattgctgcattgagtgttacaggccctcttggccggatgacggacgaatttattaattcaagcttccggacgatactggagactgttcaggatatctcttatcagctgggataccatggataaaaggacagagcgaggaattctcccatatgttatccttattcagcagatcaggggcagtcactaagactgcccctgaaacctgtgattctgttcgtattttacttttcacggaagccgtccgcactcacggccgcttcctctcccctgccagcctcttcatctccctggcattctctctcaccgcatcggtaatcttcgcgcctcccagcagccttgccagttcttccaccatctcagcctccgccagcggccggatcgtcgtggtggtccgtccgtccgcggccgtcttcgcgatctcgtaatgggaatccgccatggccgcaatctgcggtaaatgggtgatgcagatcacctgatggctcttcgcaatataggaaagcttctccgacaccatctgcgccgttctgccgctgattcccgtgtcaatctcatcaaaaatcaaagtgggaatatcatcgctgtccgccagaaccgtcttgatcgccagcataatcctggacagctcgccgccggatgccactgtgcccaacggctttacgctctcccccggattcgtggaaatcataaattccgcttcatcatatccatttgccgtgaaatggttcagacgggtaaattccatggaaaactccacatcgatgaaatttaagtctgtgagcccggctttgatcttcgccgtcagttctttggccgcagcctttctcatcccggacagctggccgcagagcgcttccagcctgttctccgtctccctcagttccctctccgtcttctgctttaaggaatcgtaatcttccagctcttccagacgcttccttttattctccagattttcctgaatctgttccgctgtctttccgtacttggcctccagattatggatcacatccagccgctcctccagctcccggtattcctcctcgtcgaaggacatgtcttccatgtacgaagatatctcgtggctgatatcgctcaaaatcgcatctgcatcaaacagctgatcccggatcgctcccagcttctcgtcgaaaggagccacgtgctccacctcttttaaggcgtaatccagtgtgtcggtattcaccgccgcgtaagcggccgacaggctctcggttatcctcctggcattggtaagcaggcggtaacgggccgtcagctcctcttcctccccgtcctttacgtttgccccttcgatctcatcaatctcaaaccgcagaaaatccatctcccgcagacgcgattcctcgtccagctgaaacgaggccagcctctccttaagcccggtataggtccggtacagaccggcaatattctgttttacgtcgtgtgatgttcgctcgtggtatttatccagaatttccagatgcttgtgcttgtacagcagagactgatgttcatgctgaccatgaatatcgattagaagtccggtaattgtcttaagctttccaacggttaccgtttcatcgttgatcttgcagaggctgcgcgcgggcatgattttccgggaaatgataacgattccgccctcgtccgggcagacatccatctcctttaatgcacgcagcttgtccggttccgtaacggtaaataaaagttccacataggcgtactccgtgccgcgtcggatcatatccttctgcaccttgccgcccagcgccatggtgaccgagccgatgataatcgattttccggctccggtctcacccgttaaaatgttaagcccctccccgaattcgatgtccgctttttcgatcagggccaggttcttcacatgtaattctgaaagcatggcacgcctcctttatcctgcgatgagtttcttcagtttgtccatcaccagaatggtatcgtccgcgctgcgcactgcgcacatgatcgtatcatccccggcaatacagcctacgatttcattaaaatgaagagcgtccagggcagccgccacggccatggccatgcccgaaacagtcttgatgacgagaatattctgcgccatgtccatggacatgtacccgtcacgcagaattctgatgtacttgtcagaaaaggagctctgattctgaagcaccatgtaccgctgttttcccgactccgactgaacctttgtcagcttcagctctctgatatctctggataccgtcgcctgagtcacggcaaatccggcctggtttaagtaatccgccagttcctcctgggtctcaatctcgtacttaccgatgagttccacaattttgctgtgtctttccagtttcataatgtgccctcctatatgccagccattttattgcgcaggttgtcaagaaatgatacatcttttagttttatcagaacggtctttgtctccgaccggtgtatctcgatgtaatccccggaatgcagctctgcggccgtgtccccgtcgtagacggcagcctggctcgtgcccgggtcacccagtatttcaatccgtatccgcgcgtctccggacatgacaatgctcctggcgtttaatgcatgggaacagatgggtgttaacaccatcagggtggaatccggaacaatgatcggtccccccgctgacagattatatgcggtagatcccgtgggagtggctgcaatcagcccatccgcccggtactcatttaaaaactcatgatttacataaacccggaaatgaagcattttcagccgttcatttctcgtgattactatctcattcagtgctatgtcttcatacagacggcctgtgctgctgtatgcccggccgtttagcatcatccgctcttccagctgatactgatccgccagaagcgcgtccagggccgtgtcgatctcctctgtcctggaaatctgtgttaagtaccccagggtcccgcggttgattcccagcatgggaatatttctgcccgctaagtccctggccgcctgaatcagggttccgtctccgccgagcgtgatgatacattccgtctccggcggcaccatggaggcgtccgtataatggtaatctccgccccgtctgccgtccccttttccgatcaggcaggaggcgccatgactggttaagtaatcgcggatcacctgcgcagtctcctttgccccctgtttttcgggattcatgataataaagaactctttcataacctctccttattttccctcgctcagctcctgatgcgcggcttccacaatgtccttcggcgccaccggcacgtccggaatcagctccccttccggatggttcttcaaataaaggagatattcgatattcccctccggccccttgatcggagaatactctaaattcagcacctcaaagccaatggagaccgcataggcaatcaccatctcaatcacttccagatgcacacttttttcccgtaccaccccttttttcccgaccttctcacggccggcctcaaactggggtttgatgaggcagacgatctcgccctcctcctttaaaagccttttcaccggctccagcacctttgtcagagagatgaaggacacatcgatggatgagaaatcgatcttttcctgaatctcatccggcgtcacatatcggatattcgtcttttccatacagactacccgctcgtcgttccgaagcttccaggccagctgaccgtgtcccacatccacggcataaacctttacggcgccgttttgaagcatgcagtcggtaaagccgccggtggatgaccccacatccatgcacgtctttccctccagcataacgccgaaatggctcatggccttctccagcttaagtccgccgcggctcacatattttaacgtatggcccctcacttcaatgttcacggactcgtcgaaggtggtcccggccttgtcttccttctggccctccacatagacgatgccggacatgatcaccgccttcgccttctctctggattccgctaaattccgtttcactaaaagcacatctaatcgttctttcatgccttcttttcctctgtattgatagtcttccattccatattctgacgctcggtatcgagatattccttcttcatcctccagatcacggagtcactgtcgatgcccagtccttttctcagcagcgacacattgccgtgctccacatatccgtccggtatggcgatattcatcaccttcacatgaggatagtgtttgtggatatagcgggtgaccatgaggccgtaaccgccctgaagcacgttctcctccatggtaacaacgagccagtggtttttcgcaaggcggtccaccagttcctcgtcaaacggcttcacaaaccggccgttggccagcgtacagttccagccctccgccttcagtttctcccgcacgtgttctcccgtactgaccatgcttcccacggccagaagggcaatatccttctcctcatacagcatctcgcctctgccgtattcgacaggcgcgtgaaattcctttaagcctctgtaggcctcacctcttggatagcgaatggcaaacggccctccgaaggacacggcaaactccagtcccgccttcagctcccacatgttcttgggcgcaaaaatgctcatgttcggaatcgccgataaaaaggataagtcaaagatcccctgatgggtctccccgtcgctgccgaccagtcctgcccggtccacggcaaagaccaccggcagattctggatacagacatcatgcagaatctgatcaaagcccctctgtaaaaacgacgaatagaccgccaccaccggcttcaaaccgccggccgccatccccgccgcggaagtcacagcatgctcctccgcgattccgacatcaaagaaccggtccggatagaggcggctgaaacgcttgagtcccgtcccatccggcatcgctgccgtcaccgccgtgatcttcggatctttttccgccagctggcagatcgttctggaaaatacgtccgtgtagctgggatattttttttcttttttcgattctcctgtcaccacatcaaacggttccacaccgtggaatctggccggattcttttccgccggctcatagcctttgccttttttcgtgatgacatggactaaaaccgcatggtccagcttcttcgcctctttaagagccctcgataaagccttgacgtcatggccgtccaccggtcccaaatacgtgattcccatgttctcaaacagcattccgggaatcagaagctgcttaatgccgttcttcgtacggctgatcttatcgatcagttcatcaccgatcacaggtatcctggagaggacattggtcacatatttctttaaatccagatatccgtctccggtccggatgccgtttaaatatctcgacattcctccgacattttcggaaatggacatgttgttgtcatttaatataatgatgaagttcttcttgatgcgggcggcgttattcagcgcctcataagccattccgccggttaatgcaccgtcgccgatcacagatacgacaaaatggtcttctccggaaacatccctggcctgcgcaagaccaagtcctgccgaaatagaggtggaactgtgacccgtatcgaaagcgtcgcaggggctttccttccgtttcgggaagccgctcatcccgccgtactgccgcaaatcgtcaaactcaccctttctgccgcttaagatcttatgagtgtacgactgatgtcccacatcccagatgatcttatccttcggcagatcaaacacgagataaatagccatggtgagctccacaactcccagattggaagccaggtgcccgccggtcctgctgatctttccgatcagaaagtcccgtatctcctgtctcagtatatccagttctttccccgtcagtttttttatatcctccgggccattgattaattccagtatcatattttaccagatccttttacttttcccggctcaccagcatgtggatcaatgcctccaggaattcattttcccccggcagttcatgaaggattcggacagcgtcgtcggaaatgctggccacgtcctgttttgccttctcaagcccctccagggtcacataagtggttttattgttcttttcatcgctgagtaccggctttcccagcacttccatgctgctggtcacatccaggatatcgtcctgaatctgaaatgcaaggccgatggctgcggccatctgttccaccagccgggtctcctcctcgtctgcaccggcgagaagcgcgccgatcatcatggaggactccaaaagcgctcccgtcttcaaatgatagatgaagtccagcttttcatgcggaacaggcttattggtcagctccacatccacagtctgcccacctatcatgccatagattccggttttctgtgccaaaattccgatacagcggcccacgaccgcagcatcctccgtcagggcaaacgcctttgccgccgtctccaccgcgtagatgagcagactgtctccggcaagaaccgccatgtcatacccatactttacccacgtggttggaagccctctgcggagctcatcgttatccatacagggaaggtcgtcgtgaattaaggaagaggtatgaatcatctcaatcgcggccataaacggttctaccaccgtcccgctgccgccaaacaaccggtatgtctcctccatcagcatgggacgcagcctttttccgccggcacgcacgctgtaattcatggcgtcgagaacggtcttctgatacccgtctgccgccggcagataacgctccaccaccgcctccacttccctcgttctggtttccagcatctcattaaagttcatgactttcaccatcttcctccaggacaatgatctgtttttctactttgtctattttttcattgcaggatttcacaagcttcattcccgcctcataatattgaaaggattcctccagggagctttcgccgctctccagcttacggataatctcctccagctcctgaaaggtctcttctacacttttcactttttttgcagccattttgctgtctgcctccttactgttttaaatccgccgccgctgtatcagaaaccacggcatcgatccgcccgtcacgaattctcactttaatcggatctccctgtttcacctgatccaccgactcgatccgccggttcttcccatcagtcagaaagccgtagcctcctccgatcttcttgagcggagacaaaccatccagcctgctgcttatcagctccagacgatgcctgtcccgtaccgcctgcttttcgataagctgcctcaaacggctttccgcttctgcagcccggttcttatctgtcacaatccgggaagccatcatgtttttcagcttctcttccagatccactgcccgctgcctctgttccctcacctgacggcgcgggtcaaaaagctgaaaacggagcctgaactgctccgtctgatagcggtaacgttctaattttctggccatggatttccccagggcatcccggtacaattccacctgaccttcaaactggctgtagtcaaacacggccagctccgccgccgcagacggagtcggcgccctcatatccgctacataatccgcgatcgtcacatcggtttcatgtcctactgccgagatcacaggcgtcctgcaggcaaagatggcacgggccacgatttcctcattaaatgcccataagtcctcgatggaacctccgcctcttcccacgatcagaacatccagtcccaggcggtccagcgtctcgattccttttacaatgctgtattttgcgttctcgccctgaacaagggccggatagagatagagctgtacatacggattcctgcgggcggaaatattcatgatgtcccggatcgcagcccccgtctgggcggttacaatccccaccttcccggcgtagcgcgggatgggctgcttgtactccggggaaaacatccccatctcctcaagctcgtccctcagcttctggaaccgttcgaataaatcaccgacgccttctttcgtgatctcctgagcatacagctgataacggccatcccgctcatagacctcgacactgcctttggccaccaccttctggccttcctccagcttaaacgaaagccccttccgctgaccggcaaacatgacacatgcgatcgcggcgcctctgtcctttaaggtaaaatagatatggccggaggtatgatacttgcagttcgacacctcgcccttaattgatatacggttcaatgcgaaatcctgggcaaacatattcttaatataagcattgacctgtgatacggaatatacactcgccataggccgttacaccagctttgccagaactccgttgataaacgccggagcttcattcccgccgaaccgcttcgccagctccaccgcctcgttgatcgctaccttttccggcacttcctcatcgtataaaatctcatataacgcaaggcgcagaatcgtaagctccgcctttcccattctcttcgtcttccatccttcggccaccgcatcgatcttctcatccagctccggaatcttccgcataacagcttccgtcttggtctttaaatagctttcctcttccggactcatctccacatcatgaagaatctcttccaccccttccggagtcgtctcatcttccttcggctcatcaaaataccgttctatctgctcctctttttcctctgccggatagaaatcggcacagaaaagcatcttaaagcagtgttcacgcagtttactcctggtcatgggttatggtcctcctgtatcataattcgatcattatttttcactttgcttccacgttcaaagttcacaatacctgctcagagcaggaattcattcctttgcgtattgggttcattataccttaatgcgcatttttccacaatacttttcggggattttatccccggagtaatcctggtcctgttcatttttccggcaattacttccattctcagtttttatcagaaaaattatacagaaaaaatgcataaagattattacaggcaggtttctcggcttacacaaaaaaaacaggcgttaagcctgctcatttttctgatacattctcaaatggggtttaggggcaaacacagaagtattcgcccctttttattatgaattatttacaaaaaccggtccttcgtcctgaaaaaatgaacttctgttcatctccgcttcgtctctgtaagtatcattataatctgtttccccgcaaatcactatcccgtttctgcccttttatatcacaatcctgccaatcaattgccgtttactttctgcccggtccgccgcctgattgggatatgtctgtttgtccggctttatccgggactatgcatttgcattccccaaatactccctgatattataaagcaccttctcactcagaagtccaaacgcctgcttcgtccttccagccgaataattcgtgcagaacactctcgggtggtttaaaagctctcccgttggatcgccgatggctccggctgtatcacaggcaaagtaattatttcccccatccagccagttctttaaatcttccgcttcaaaggcaggcccaatggaggtgttaaacaggatctttccattgcccagcgccttaaattcctcctcgtgcatgagaattacatttttgtttaagcaggcaaatacgacctccgactgctccagcagttcggtgagcggacggtataccatgccttttgcctcatagtccggctttcggctcctgctgaaataagagacttctgcgcccataaatttcatggcttcagcgatcattccgccggaaacgcccattcctgccatgccgaccttaagccccgtaatctccaccggcatctccttccacatgggtctgtcatacccgtgaaggaaacgcaccagttcacagatcacgtattccaccacccccctgtcgccatagtcccgtatgcctttcacggtaacgccgtgttcctccgcccaggcaatatccacgttcgcactctctttggaatacaagctgcagcacatgcccacataccggatgccaggacagtgttcaaagacacagctgttaatttttgaggtataactgagcagaacgccgtctgcatccccgattctccggataatctcatcatcatctgccggcacgtcaccgtacatgacgacttcctctgcgtactgacgcagttccttttccgcctcttccaccaggctcaccggctctatggccaccagttttttaaacatgttctcatcctccttaaaatacaatcggcgacaccagattgcgaagaaccgccacgacgctccagcccgcaatcgcactgtcggcggagtagatatccacgaccgcctttacccccggaatctccgccgtaatcttatggtcatctcccacaaatccgggaatgctgtgaatcgttacctttgtctgctccggccccgttgtagccagagaggccgccactgccacattaaccttggtcggcagaagcgcaatcgcttccttcgcattgcctgtgaatacccgggtttcctccgtgtccgtcatgagatgttcttcaaacagaggcgtattcatcagtgatttcggccccttcctcgtctcgatcccggaaaccgcgtctcccatcagcgaaaccgtacgcagtacatcaaagccgcccaccgcgccggacgcaatatgtacctttgtcccatgtttcatggctgtccgcttcacttcctcataaaaatcctgatccgcaaatgcaccgattgacagcacaatgatgctggttcccgcagaaagggccttgacggccattccttttaccgcggcaacggaggctgcctccgctatgtaatctggtttcagtgccagaagctcgtccacatccgcgcacggcctgcatcccgctctttccgccagagcctttgtcttctcctcactgcggcccgcgattcccaccagctcgtactcatccaaatacccgtttttccacgcgtccgctataattcctcccagatacccactgcccaggattccaagtttcaacctgctcatgattaactcccttcggccgcctgctgcggcggtcacctgattttcattcaatcgaagaatcggccacggtttcccatcgcggccggtctccatacctgcctagtataccacgaaattccagttcaaggaacctctcttttccccgctgtcagtgccaatgttccgaatcaatcctgcccgttccggtcacactgctgtttctctgtctccattctgaccagtccccctggtgtcagctggtaaacggcagtacagacctcttcgatatatttccggtcatgggaaatgctcaaaatggctccccggtactggcgcaggatcgctcggatcaccggccccgacagcggggaaaagttgcgggtcggttcatccagaatcaggacatccgcccccgacaggctcaatttcagcagaagcacctttgctttctggccgccagacagctccgacatcggagcgttcatttcatcaacggtatatttcatagaacccagatacgtccgaatccgtgtcgtctcttccttgtctccggtcacggacagaaagtccaccggtgtccggtcaggctccagaagatcctcataattctgcggcatatagcaggccctgacatcggtccggcttaaaagctgctctgccatctgtttcagcagtgtcgtcttgcctgcaccgttttttccggtaatgcagacccgttctcctccctttatccgcaggaacagatgctccgccagaagacgcggctcctcttcccccgagaccggtgtcaggagacggtccagggaaaattccagaacgatttttccggcgggcatttttaccgcttctcccagcttaaaaaatatggcatcctctgtttccgggatctccgtcctgtctaaagcttcccgttcatatctcttttccagagactttaccgctttcatcttctttttcaataagtaaccaccgtggggattctgacgggtcatgctgttcaaatcatggttcaccgcctgctcaatcctgcgaaatttctcctgccgttttttctcttccctgcgctcaactaacgcccgctgttcctgacttgcaagctgctccgcacggttttttgcgtactgacggtagccggttttcgctatactgcagcggctttccgtttttcgcttcagctgttcgatatggattaccatattggcggtccgctcgatcagcgtctcatcgtgagagataaataataccggctggggcgcttccataatcagcttttccagccattccagcgtttcgatgtcaatgtcattggagggctcatccagcagcaggatggtgggccgggccatgagaagccgcgccatctgcgccttcaccttttctccgccggaaagcgtgtccatcttctgatcccggtagaagaaatcaggcggaagcttcagctgcccggctaaatgggtcagttccctgggcgtctgcaggccaaaggcgtcctccccgcaaaaatattcatatacggttttttccttttcctctgccggcagctcctggggcagatagcccgggtgttcccctgtacagattcgttcgccctgcgtctccgtatacccctcaatcagttcaggattataaatccattttagaagcgtactctttccatttccctcttccccgatcaaaaccgctttgtctccgggatttaagaccaagctgaaatcctttacaattaccctcaaatcctttttatgtgttatcgtcagttgttttatctgtaacataaaatatccctcccggccaatcgtccggaagggatacaagattctatacgtatgaggaaacacgcgcagaacaaagtctgcacaaactcatgtctgtacggaattttccctgatgaccggacgaaatggcatagaataccaggcaccgtctccgcatctttccagtggagcatgccctttaactcagtgtttctcagccttttcttcgtcattattttgtcatcatcttccgacagaaccttctttcctgtttttatattttatgtggtgctatccgcagtatacgataaagcagcatgttttgtcaagggggagctgccctttaacgtaaatgaatgaaagctgatgtttcgtttgcccctgtatctgaaataaagggcgtgtactccatccggaattgtaagatcggctttgtggtttttccattcgttggagcttgtaaccggaatttctccaacaggctttccatcccaggctgtcaggagttcgatcactccgcttcccaagccccgggtggttacggtcacctgttttatgccgtggcaggagaaatatttaaagccggcggccgcgccatcccacaggttggctatgaacccctgtgtttcagaaccgtcgcatccatcctgggtgattttggggaagcggcagtccatccattctccggggaggaccctggtttgggccgcagggcttcctgatcccatatttcacattatcagcattataacataccggattcaaaaggcaaatgttgattttacacgtacggccacctttacaacgtaatccgcggtatctctgaccgtcaattcatccagaagaagatcttcataccacatctcgtccaggctgattccctgctcctcggcaaacgctctgataaccggatacgcctttcccatatcaccatcgtaaccgcggtaatacagctccacataggttcccgccggcttcacatacggcttcagcgccggaatgcgtttatccagccgcgtgtagacgcttcgatagcggtcatattttcccgcctctaaatctttccccaggcagactgcccccaccgcgttcatactgatatgatactgctcacagaccctgacatggtgggcaatctcctccgccagtttcctctctcccgtgagatttacctcggaagaaaacagatattcctgtcctctttccgccagcatcggcttatccacctcggcctccagcgcctccctgatggtcgttcgctcccactccataaaacgcttcatattcttcagccgttcaatctcctggtcaatttccgcctccttctgatccaccagcgccagaaaatgctccggcgaccgcgtctccatatattccctgatctcgccaagaggcatccccagcttctgcagcgcccgtatcacctcaaatgtatccatctgccacacaaaataataccggtaatgattctcctcatccttcaccgccggtgaaaacaatccgatttcatcataatgaaacagcgtgtgcttcttgactcccaaaatttttgcaaactcccctgtcgtaaaatacagctccgactgtttttccatcttgtgattcctttctcattttctcctcttgactatcggcctgccctataccatatgatagtccatgcggctgaaatttacaagaaactcaggagaaattatatgaattattcactggcaaaaaaatttacattcggatccctcatgatgttcgcactgccaacgaccgtcatgatgatatttacctccctctatacgattatagacggggtctttgtatcgcgtttcgtcggaaccaatgcgctttcatccattaatatcgtttacccggccatcaacattgtactcggtattgcagtcatgttttccactggcagctgcgccatcgttgccaaaaagatgggtgaaggaaagcccgggaatgcacgggctgcgtttacctccattgtatatttgaatatccttgtcggagccgtaacggcgatcctcggcaatctctttgcagaaccactggtacgtcttctgggagccagcgacttactgatgagcgactgcatgacgtatatgagatggcagatggccttcgctccggcgctgatgctgcagattctgttccagatgtacttcatcacggagggacggcccggactgggtctcttcctcacggtactggccggcatcagcaatgcggtcctggattatgtcctcatcgtaccgcttaagctgggcgtggcgggcgcagccatcgctaccgtgaccggctatatgattcccgcggtgttcggcctgatctactttgccgtttcccgcagggcactgtggctggtaagcccccgtctatctgcggcggaattaaaagaaacactgataaacggttcctcggagatggtgaccaatttatcctccggcattatcacgttcctgttcaaccttctgatgatgcactatgcgggagaagacggcgtggcggccattaccattatccagtactcccagttccttttaaacgcgctgtacatgggattttcgcagggagtctcacctgtaatcagctacaattacggaagccgcaacacgaaacagttaaaacaggtatttaagacttccttcctcttcaccggtgtgacttcaatccttgtatttttaactgcacagctgggcggaggaatcatcgtaacgatttttgcacaccccggcacggctgtatacgatctggcccgccacggattcatggtattcgcgttcggctacttattttccggcgtcaatatcttttcatcggctctgtttaccgctttatcgaacggaaaagtatccgccgttatttcctttgtgcgcacgctctgcctgatcgtcttatgcctgctgttccttcccctgatcatggggcttgacggagtctggctggccgttccggctgcagaggcgggcggatttatactttgtctttactttttaaaaagacatgcgaaaacgtatggttatcgatagaaaccaggagatttcccgttataattgacagcgccgcgccggccgaacagaaaacggaggccttaaatgcgcgtatcatctccacatcccaccgggtcttcggcagcgtggctatgtcaaacaggttctctctcacctgcctgaatttttcggcataaaaagaaaaatccgaccaccgggacggaataaaatctcccgggaaccggcagccataccagagcagaactgccgcgattccggcagtcactgcaaatgaaaagacgttccacagccgctttttgcccatctttacccgccgggcaaaaagtccgaagctaaggagcagggcccagccgggcagcgtatagaaaaacctgacgaccgcataatacatgctcccgtttatcctgattccatgccccggcagcccaaaccgcatgatcatttcctccgcctgcccttccagcccctcctgaccggagtaagaaaaggagatgttggaaaagaatccggtctccagccgctttgccggaagaatcaccatcggataggaagcagccgtcactccccgtatgacaaagcgttggccctttacggtaatccaactgcccgtcacattggtggaaccgaacagttcccatgctgtcttactgcttacgacgcagccctcatcatcatctccaaagccataggtgccggccgccagccggtcctttacaatctgatccatctctcccctgaccatgatacaggttacatcctgtttaaaattaagcaccggatttctggcctccacatcgtattccacgctccacgccgcagtctccggaaatgttttcttctcctgcttaagcccggcttccgttatttgctccagtgtctgcctggatattccctgtccatggtagcgaatctggatatctccggcgtagggtgctgtcttctctccctgccacagggaaatcccccacagggcagccgacagaagcattgccagacatacggttttgactctggcggctctgcacgttttgctccatcttttaagcctgttcattgttctctcactctccggataatctgacacggtcgcctgcctcaatgatcctgctgctggatacgatcagccggtccgtattgccaaatgccccctctacagccgcctggctgctgcttttttccagtaattccacaggaaccttttccgccgtcagctcttcgccgagaatcgtcttctgcggttttaccaccagaacatagtacccatccgattcctgtctgagccctgcgatgggaatgacctgattatactgccgggatgccagattgattgaaaatgcggccgtcgcacccagaactcccacatcttcccgggctgatgcggtaaaacgggcctgttcctcctccgataaaaagtccacgctctccaccaccgcttcacaggctctcctggactccccgtactgtaagctgatctttgtacctgcagtaatcagttcccccagtttcttatccaccgttccctcaaatttcagcttcccgtctccaattgccacaagcgcctcccccgtcacggtctttcccggaacgacggacagctctgtcaccacacctgccacgggagccgtcactgcgccgccggctgcttccagtgcttccagttcttttagctgcgtttccgcctttgtgatatccagctgctttccctgacggtccaggctggctgctgtctgctccttcccattttccgccgctgtcaccgcgtccctggcccgcgcattggttaccgccagttccgcctggctgagtgcttcctccaagtccctcacagccttttctccggccttgatctgtgcctctaccgcctggacggaagcttcgtagctgctctttaaggcttccgcggctgttctccttccggcactgacatcgccgtagtcttcctcagcactgtttaaagcctcttttgcctcagccacgtttaacgactgctcttcccgcacttcttccagatcctcatttgcacggtccagagccttttgggctttctctgtctcttcgtctgaggcgccctcctcttccaggcgggccagcttctcctcgcagtcggccacctcccgctctgctttcctgacggcgctttctttcctggctacggcagcatcataggccctttcggcagtgcggtactgtctcctggtctcctcctccatctcctcctcagaccgggtcatgctctgattgtaatcccgtttaagatccgcaagcttttcctcactgtcccgctttatttcctccagatcctgatacccgaagtcgagagcccgctttgccgcttccagtgactgcacggcaagcgtctcctcggatatgcccggaatctgtttggaacgcaccgcagactgatcgagctccagcttcatcttttcgacagaaagagccagttcttccctcttcttctgaatcccctccatctgataggtaaagagcacctctcccgcctccaccttctgcccggctgttttctcaacagactgaaccttcatcccttcctccggattcagatacgtgattcctgatgctgtaaatttcccttccccattcatctcataagttacgtttcccatcttaccgtaggaggttccgacctgcggcaccgtcagggaatccaggcttctggaaagaacggtaaagaccgccatggcccccagaaacaccaggaaaccgtctctgcaccatttacgtatttttcttctctccatctccctactcctttatccccgataccataattccctgctccaaaaaactctgtccggccagaaacagaaagagcgggggcgccatagccgccacggacgctacccatgctacgctgaccttatccgccgtaatatccggcagatacagggagagcggccagagtgtccggtccttcaaaaatgccatcggcgcctcgatcgcattccagctctctaaaaatcccagaattccggcagacatgattcccggaaatcccatcggtataccgatccgaatgaacacagccccttctcccgccccatccagacgcgccgcttccagcagcgacagaggaatcgatgaaaaaaactgtgtcatgataaataccggaaacgtagaaaaaatccccggcagaatgaccgccagatgggtatctaacagatgcagccggtttaatacaaagtaatccggcgtcatcagcacctgaaacggaagtatcatcagtatgatatatcccataaacataagcttttttcccggaaatgaatacatggcaaacgcccatgccgcaggaacggccaccaccatctgaccgaacagcacggctcccgtctgcagacaggagttccagaacatcacgaaaaaacccggcgaatccagaagcagttccacaaagggacttaaggtgggaaagtccggaaacagagtgaccttcacatttccggtccctccgtttaacaccggtccgaaccgggagagcatctcccccctggaaaggaaggaattccctgccatcatcaggagaggcagccagataaacaggcagattaccgacaggatcagccttctgacgagcggaagaatcttcttctccggcagccgttctctcaaccatctcatgctttattcctccttccttccatatcattgccgttatccccgtcacgcttccttcctccctggaatcagtcctttcaggatgaccggcagaagcaccgccagcaaaaggagcacggaagcagcactcattttctgaatatccagcgtcacaaaccagtggttaaacagatgctgcagcatgtaaatactctcatccggatactcccccgcgattaaatacgcttcccggaataccttaaaggagttgaatacagaaagtgataccaccagaaccgccgtcttcgacagacccggcagcgttacgtataaaaagcgggccagaataccggcgccgtctaccctggcggcctcatagagttcatccggtatggccgccagacctgctacccacaggaccacgtcgtatccaaggttcttccacacataagtaaagacgagcacaccaaaggcggtatctccgtcaatccagttcattcccggcatgccaaacagcgcggtaatctgattaaccagcccctgcggatggaaaaacagcttccacagaaggacgatggaggccaccggaatcgcaagcggaatgaggagactcgtcttaaagacggtccccccctcctttaatcccgcaatcatcatggagcaaaacagtgacaccaccaccagaagcggtacgcagatcaccagaaaacggagtgtattaaacgatgccagacggaacgcacggttgcccatgacggtcagatagttctgcattgcgacaaaccggcctcctgcagcctcaaaaaatgacctgcggattacatctacatacggaagcaggacaaacacggccgtccccgccagactcggcagcagaaacaggtacaccttccgcgccaggcggccagactgtgtgctattccgcatagtacagcttcgccttattttcgaataaccccgccgcttcggccgcggtctgttttccttcaaaatatccttttgtttcactgactatcatctccagcagtatatcgtccacagaaatgggggtatggagcttatccagcattcccatgatctcttccttcttcttatcattcgggtattctgcactgagcatctctccggtatcgttaaagctgaaactgatgctcatgttggaagtccgttttttccaggcgtcggaggccgtcctgctcacggtaaatccatccctcaaatccccttcctgcaccttcggggacagggcaaatttgacaaactctctcgccgtctccttttcttttccaaaggacgtgactcccaaaagccccttcggatagtaaatatcattgaactgttccagatgatatccgtacttatcaatcatggcggacggtgacataacgtccatcatactggcaagctcgatcagagagacttctgtggtctttgtcagcagcccataatcacccagaccggtaaaacctctcgtatcggtgctgttataaacctggccgcggcctccgtcctccgattcatcaaagactgtcttgctcccgccggcgtctcccgttattttggcagtctccagaaggtttctgactttatccgtatccagctgcccggcatcttttcctgccagctccggataatagagatagatcatctgccgcaggatattttcatagacagtcttaaaaaatactgcctgatccggatttgcttcctgccacgcccggagggagccaatggttcccatctcctttatcaccgcttcgtttccatagataaccggaatgccaacacggaccggaaactgatagacactgccgtcagaaccggtaaaattctccgctatgttaggatagagctctcctgattctgccatgggggtaatcatatcgcccagatcctccagaacgcctttttctatataggattccaccggaagcccatccagcaccagcacatcggcgccgcttccgttaagcagctccgcgtttaaggaacggatcgtatcggattttaaggtacttcccgattcactgtttccgtcaatcagctcaacccggacatcgggatgctccatctggaaaagggaggccgcctgcttcacggtctgattttccgaaaggttcagaccgtataccgtcagggttttagacggaacggcaggcatctctgcatcatacgtatagcgggccagcttctgttcttcactctctgtataccataagtaaaaatcatggtcacttccaatgaggagacgttttatgtacacactgggcatgcctatggaattcagagagccatccacgacggtctcccacatggtcccctgatctgccatgtgatggattcctttggcattggcaaggtagaagtcatccccgtctccgccggccaggcttccatacagatcggtttcatcggtctggaacgggattacttccttctccgccagtgattttaaatcgtaccggagaaatcccctgtcgcctgtcgtcaaaaaggtatgggccgtcaaagtatggctgtcacagaaattactgaaagaagacttttgtggaagctttttctccacagtaccatccggactcacgacgataacctgatcatcggagggaatcaggatggtgctgtcatcgctgacatagattccgttcagcagtaccatggcgtcttcaatcccgacggacatttcctgcatgggctgtccgtctgcaagttttatgaggtgtgccttataatccgaatccgaacacaccgcatacagcgttccatccgggccgtaggcggaataagccagatagtaggagtcaggaagctcctttaccggggaagccgtatcttccttccaggtggatccgtcataacggtaggctttcttttttccttccgtctcctggccaactaaggtaaacaggaccatctccccgttctgatcctgaataatatccagaaccccttccgttccatcttcgaacggatatgcgaccgcctgttccacataacgtcctttagccgcatccgcagtccccggattggcaccggtggtctgctttgtgccgtcctttgtaccggttgcatcgcctgccggctggcccttcgtcccgcatccggcagtcatgaccgccatgaccgctgccagagccaccgccgctgttttctgtacaatcacacgcacgctttgcgtatgagtcagtgaggtaatcaaacaactgtttttcatatttttattcctttctcctgttccggatttccctttaaagtaatcataccagagaaatctctaaaaaaactggaaacagctggtttttagattttttagagatttctctggtataatggaagaaacaacggatttaaaataagaaagaaagcaggaatcactgagatgagaatcttactggtagaagatgataaggtgctgtgcagcacagtggcaatgcagttagaacaggcggggtatcaggtggatcagtgctgccggggggacgacgccctctactatgcgacggaatatccctacgatgtgataattctggaccggatgctcccgagcctggacggtttaagcctgctgcaggcgatccgtcagaaatccattatgaccccggtcatcatcaccactgctctcgacggactgggcgaccgaatcgacgggctggacgcaggcgcggatgactacctggtcaagccatttgcggtggaggaactcctggcaaggatccgggcagtcacccgcaggcccggacggaccgcagacacggccagtctggccgtcggaaacttaagcctggacgcggtcaagcatgagctcaccagaaacggcgccgaatccgagacggtcacgctatccggccgggaatcgtcgctcctggaatatctgatgagaaatgcgggccggacacttccgcgaaacgccatcctctcctatgtgtgggggccggattccgaggtggaggccggcaatctggacaactacatctattttttacgccggcgcttaaaatcgcttcatggaaatgcaaagatccagacagtccatggagtcggctaccggctggaggaattccatgattaaagagctccgcaaaaaactgacccttttgtacacagtaaccacagggaccatcctgaccctggttgtcgccggacttctcttctataaccttcgcgtatcagaaaaagacgccctgcagaccttccagaatcagatcgtggccgttgcatcacggatgcagtacggctccaccatttccggaagctggctggctcagactgaggcgtctgaaaagctgatcatacatattgaggagaaccgggaacccttcctttattccggctcctgggtcccggccacagacaggcagacgctcatcgatttggcacgggaagaagctctgaaggaaaaagtcaatccggcagttcgccccgtctcctcctcggtaatccagagttcggtcttcacggtgaccggggagcagaaagactcctactatggcacaatccttgtctttcccaccgccaggagttaccagagcctgactctcctgggataccgcacgcctggcatcgtcctgttgaaggatcagggcccccgcttcctgctgttcgatcttctgggaatcgcagccctctttctcgtcagctggtatttcgtagggaaatccctggaaccggtggaagtgagcaggaagcgccagaacgaattcattgctgccgcctcccacgagcttcgctctccgctggcagtcatcgaatccagtgtcaccgccattgccgcggcagaagaaagttctgctgccccgcgatcggcagaatgtatggaaaagcagacgcagtacttaaaaaacatacgtgcggaatgcagccgcatggccgcacttgtaggggatatgctgcttctcgcttccacggatgccggcagctggtctgtcaaacgggaaaccgtggatatggatacgcttctcattgaaacctacgagctctatgaaccggtatgcaggagcagcgggatccggctgttcctggatctgccggaagagacgctgccccatataaccggcgactccttccgtttaaaacagctgctcacaatccttttagacaacgctgtgtcctatacccctgaagatagagggattaccataagcgctgccgcaaacgggaatgagctgaccatttccgtagcagaccagggctgcggaattcctcctgaagccagggcgcatatttttgaccgtttctatcggggcgactcctccagaacggataaacgccatttcggcctgggactctccatcgccaaagaactggccgtgcttcacggcggccggatctcggtgggcgaaacggaaggcggcggcgcaacattttggataaaactgcctgttataatcgaaaatgggttataatgaaataaaaatggagtacggaggtaaacatgatgagaaaaacgtatctgctaacattcttactggcagcaggattgatggcagaatcccccttcgccgcgtatgcaaaagacagtccgttaacgctgccggaatttatggaaatctgtcagcaggagcaatttaacttttcccgtgtaatcacgctcccgggagaagagaccggaagcgaaaagaccggaggagaccagaaacaatatgagactcactataagaatgtgatattatcggaacatggagcaaaataccgggaaagcccgtacggtcctggataccagagtttgaaaagcggtaaactctacatggatatgccggaaggatatgaattgtcttatgaatataagatcaaaggggagagtgacgaaaccgggccagaaacaaccgttcccggcggaaccatagagacattttacagagcagaggcggcagccgaagtaaaaagcccgggggaacagtatggatacataaaaaatgaggtgaaagatataccggtggtgcccgacctcccccaggattataactggcgcggccatgatgagaagacgctgatggtatcgtcggttctcaccgttcgttccctgacgagtggcagaacggaaagctgggaatcacagatcacattcgtgacaaacctggataaaaaggagcctgactgctactatcttattcctaccgaccgggaagcgtacacagtaaaggcaggcgacagtttatggaagattgccaaacagtattacggctcctctgagaactggcagtttatcctgcatcgaaatagtgacctgataaagaatccagacaggatctatccgggacagctgctcgtcattcccgatgcggctgcgtggcagtaaaaaccattccttttaaacacggaatacaaaaaagaaagagacaccggttaatctgtatggttaaccggtgtttctctctttttacctgttttatggattcacacacgctccattttcatcaaaagagtatacctttccttcgatctccttagaagccgtttccatatctccattctgatttaagtagtaccatttcccggacagcttaacccagcctgtcgccatggagccgtctgcatttaagtaataccacttatctccggatgataaccagcctgtaagcattgctccgtccggctttaagtaataccagactccgttcaggagctgccagccgcgggaatcctgtttccaggagccctgtactccactggttaccgccctggaggaacctccaccagaagatttatgaccggaattatggtccggattcggggtctggcgtcgggtcagtatctggtactggatttttacatcgttcttacaacgcagttgccttcattttttccatcaacaaaaataccgctgcaaaatcatcgaattccaatgacgcagcggtatcaattattaacagttacgttccatcgtcacactgcttccggttattcatatccggtttccttaacccaaagcggaagcaggcggctgaccacctcaaacagaagacggtcttcttctctctgcaggtcgcagctccataaattctccagcagactgatacggtaacggatggtgttgacgtgagcatacatggcgtccgccgtcttctggtagttataatgattcttgacaaagcagcacatggtatcggacaacgcatcccgtttttctttcgggtattccatcagcttttccgtcatctgatccaaaagacggttcacgggacttcccggcttcggataatccagaatccggaatatccccagttcacagtgaaaaaataccgtacgatccatatccgttaaatttcccacttccacggaatggcgtgcctctcccagagcctggtccatttccgctgcactgtaaagtccgctgatccccataatcatatcatcatcgccaaatccaatgatctcttccagctgctctgtcaccttcataacattgtcagcagagacaaacagcagcaaatgcgtctcgtccaggaaacaataccgcaggcatttccggaagctgcggtggagtctgtatcccaagtatccctgctgctttaaaatacctttgtctccccgctccagcacaacaataccatacccattctccgggaataccccttcgggaattgtctccggacgaattcccctgtacgcatttcccataagagtactgatcccctccgatgccgcaggaagcgccttcatatatccggtcagaatacaggcataatccaacagcacatgatcctcctccgtaaattcttcctcaccgcgaatctgcagcagatggcgcacctccccgttcacggtctgggaactgtgaataaaatgaaatgaccgcccttcctcccagccaaactcctgaatgcctggaaaggcaggccttaccactctgcgtttccaccactccggatagaaaaacgcttcactgagttccggagtatccgggtaaacttcgtaattctgatgaacgctgtagacccactggcctccgcagcgctcatgaagcgcctttaacagcttaagaatttccccatcacacgccaggttacgcagtttgtactgaaaacaggtaattgactctttttccattggcaggtactccttttcaaaagtctggtttattactgttatcttaccataaatccgtcggaaaagacagctcgctgcacctccgttactgcaggaaacttcataaatgaggttgcctgaaacaggcagcttatgctatacttctatatacaaaacagacgacagcctttataagaagctatcgccgccggaaaccggcttctgccggcattccatctgcctgttctgtctggcattctctgtccgttcggacttaagaaatccaccttaccggaattaatttcatgattaccacaaaaacgaataaaacaagcagggctattgtctgttttactgaaaactattataatggagataggttcttatatagctggaaacggaggctatatgagcaatacaaacgatgcagacgccgcaaaagacattcctgacaattttccggcggaagacctggttctaaaaagttccatgcagtttttcggggatgaacttctgtcgtaccttggaattacggcggaaccagtaactgttggtccgacagaatttgtctatttgacggcaaagcagttatatgaagattttaacttcatcaagccggaccggagctggattcatctggaatttgaaagcgacagcattaaggaggaggatctccgccgttttcgcagttacgaagcggtcacctcctatatctgccgcgtcgatattaccacttatgtgatctgctcatcaacagtaaaggaaatccgtaatgaattaaagacaggtcataatacctacaaaatcatccctgtccggctgaagaataataacgcggatgaactgtttgcccgtctgtttgaaaagcagaaaaacggtgaagtgctgaaccgggcagatcttgttcctctgctgctcaccacactgatgtcaggtaccacggatcaaaaagaccgcattattctggcaaaccgcctgattacggaatccggcgccctgtcacagggagaaattgtaaagatgcaggctgtcctgtatacacttgctaacaaatttttgtcaaaccaggagttaactcaaataaaggaggtgctgttcatgacaccattaggtcagatgctggtgaatgatgggtttgaaaaaggagttgagaaaggaatcgagaaggggattgagaagggaatcgagaaggggattgaaaaaggggcccgtgccctgatttcctcttatcaggaaaccggtctttcatatgatgataccctcaaaaaactgatggaaaagctggaactggattccccaaccgcagccaggtatatggagaaattctggatccggattcctgtatgattcctcatacgcagccagtatatacttatgaggccctgcagaagagacagtctcttctgcagggcctcataggtttatcttattaattaaatgcgcactgccgttttatatgcggtatggaacgcatccagaatcttgcctgccttcacgcagtcgccgatttcatagacctccagatccggttctcccgccagcgtgtcgtagaacgcatgacgcggctttaatcctaccgcaataacgacactgtccgccggaagctctgttctgcgtccggtccggtcatttactccgcgcacgccctgttctgtcacctccgtcacccgcagccccggaatgaccgcgatgcggtttcttccaatcttctcataataggcaataatatccgtcacggcacagtctgccatgatggcatccttcatctccacaatcgttacttcgtggcctttttcagcgagatcgatggccgtctccgtaccgatcattcctccgccaacgaccaccacctttttaccgatttccggatgacagtccagaatggtgagcgcgttgatcacattcttcccatcaatacccggaaccgccggaatcacaggttccgctccaaccgctgatatcaccacatcgtatcccccggccttcaccatctccggagtcagttcttcgctgacaaccggaatctccagcttttcaatctggtgaatctgataatcgatcagatgccggatatcttccttaaattcaggggccgaagcctcgtggagatagccgcccagttttctcatctcgtagatggtgacatcatggcctttcagctttaagacgcgggcagcttccatccctgccgggccgccgccggcaatgacaacttttttcttcgtttccgccggtttgaccgccagatcctcttcgaagcccagcaccggattcaccgcacacatgacggtacgccccaggaaggagcttctctgcagacagccttcattgcagcggatacacggacggatgtcctccggacggtcttccatcgccttcttcacccactcgttgtccgcccacatcggacggcccagcgtgatgaaatctgcctttccctgttccaggatatcttccgcgtactgaggaagcgtgatggaaccggaggccatcacaggaacgtgcacctcttttttcacggcctccgccgcccatacattgtagcagaccggcattgccatggggcttacctggtgaatcatggtgtggtgatctccgcccgagatgtggaaggcatcgattcccagtttctccatctctttcgcatagtaaatggtatcttcgatggtcattccatccggctcataatccgttccggataaacggacggttaacgggaagtcaggtcccaccttcctgcggcagttttccaccacctgtcccaggaaacggaagcggttctctctcgatccgccgtaccagtcgcctctcttattcgtaaaaggagaaagaaagttcgtgatcaaatagccgtgagccgcgtggatttccaccagatcaaagccggcatccacggcacgtttcgccgcatctccgaaggcctcgatgagaacctggatttcatcgatggtcaattcctccgggatcgcgtgaaactggtcgtaaagcatgggccacggaatcgcggaagctgatttcataggcggtcccaggaatctctggcggccacagtgttcgatctgaattccggcttttgctccatggttcttgatgctgtccgccagccagcccagccccgcaatgtgctcatggctgctgatgccaacctggcagtggcaggacttgctggcaatgtcgtcaatataggcgtattctacgattaccagaccggctccgccgtcggccagatgggtgtagtgatcgaccagtctctgagtcacggtgccatccttgttgctgagtcccgtcgtctgaggcgcctttaccagacggttctttactctcagggtaccgatctgccccggttcaaacagctttggaaacattttcttcatgataaatcactccttttccttttttattgcttctaacatcttttcttctgttatgggaatctcatggaaccggattcccgtcgcatggtaaactgcattggcgatggctgcagcagtcggcaccaggccgcattctccgacgcccttcgctccgaagggaccgctcggctcgttggtttccaccagaattacatcgatatccggtgtctccagaatcgttggaaggtaatatttatggaagctgtcctgggcctgtcttccctttttgtcatagacaatctgttcgcttaaggcatagccgattccctgcagcacagaaccgtgaatctgtccttccacaatatccggattgatggcccggcccacatcgtgagccgccgcaagacgaaggacctcagtctgccctgtctccagatccacttcaacctctgcaaaatgagcgtgccacggaggcgcattaaacggtacggtctggccgattccgatgatctgccggtttgctctgtgaatcagatgggccgcttccccgatggtcatgcaaggttctccatttacggaaatcatcccattctccagcgtcagagttttcagatccgccttcagctgctctgcggtaaactccaggatcttctgttttgcatcccgtcccgccgcctctaccgcagttcccgccgaataaagcgttctgctggcatggcttccgatgtcgtaaggggtgctggccgtgtctccaaagacgatgctcacctgatccatgggaattcccagggaggaggccgctacctgcgacagcgtggtggcgattccctgtcccatatcgggaacacccaccgctaaattggcggaaccgtcctccataacggtcagataggcgttgtcaaactccaccgcaaagggccaggagttgcttaaatgagttccagccgccattccgatgccccgcacttttttgctgtccgtggtcttttggagcctgtctctgtcagtccagccgatcttctccgctcccttttccatacactccgcaaggccgcatgtagcgcagggatacggtggaagccagggggcgtatggagtcataacatttttcagacgaagctccatcggatccatgccgagccgttcggccatcatatcgaccgtggactccaccgcaaagtttccctgcggattgccaaagcctctcatggcacctgccgtagttgtgtttgtatagacgcagagaccgtcgtacaatacgttgggaatctgataaatgcttatatttgtcacgcccagaaccgctgtcacgtcgggtcccgcattagcgtaacctcctgtgtttaaaacggcgttcagatacagggcctggaagcttccgtcccgcttcgctccaagctttactgttatgtaaccggagtgcctggtggtcgaagcgataaaatcttcttttctgtcatagacaaaccgtaccggctttcccgcaaggatcgccagcgcagcagctatgggttccgcttttccgctcattcccacatgggaaccaaacgcgcctccgatataggggggattcagtacacggacccggctggccggcatcccgaacagcttcgccagaagattctttaagggatggggactctgggtcgtggaccacaccgtcaaatgccccgatgcagagtaatccgccaccgcggcctgcgtctccagctggcagtgctttaccacgggaagtttaaaccgttcttccaggataagatcgctctccccaaaccccttctccagatctcccatgggaagttttgccatgccggcaatgttatttccgataaaacatggatgaacgggcggcgcatctggtttcatggcctccaggggatcaaagaccgccggcagctcctcgtattccacccgaatcagcttaagagcctgctttgccgtctcctccgtatccgcggcgaccgctgccacctcatcgcccacataacgcagttcctgattaaagacctgctcatcctccacaggaaccgcaggcgggttcgcctcgctgcaggagctgttaaaatggcattccgttgtatttttataggtagctacggcacgtactccgggcagtttttccgcctccgccgtatcgatagacacgattctggcatgtggatacgggcttcgcagtacttttgcatgcagcatcccgggaagctttaaatccgtggtaaacgctgccagtccggtcgccttttccagagcgtcaattcttggcaatggttttcctacttcaccttccgccttcatccgtttcgcctccttccataagggccagcgcgcgggctgcaagctccacggcctgttctattttcacgtatccggtacagcggcacagattacctgccagcgcggttcggatctcctctctcgtcggatggggcttctcatcgaggagcgccttggccgacagaatcattcccggcgtacagaagccgcattgaacagcccctgcgtcgataaacgcctgctggataggatggggttttcctgctgtctttaagccctctatggtgacaacgcggcagccttccacacgcgccgccggaaccatacaggaattgaccgcttttccgtccacaatcacggtacacgcaccgcattccccctgtccgcagcctttcttcgttccggtgagccccagccggtcccgcagaacatccgccagtaagtcaaacggctcgatctccacccgggccggaacatcatttaatataaaggacagcttcattcctgctccacctcctttttcccgtttccggcatcggaaaatgcttccagcagcgcccgttccaccatcaccggaaggacttcctccctgtaatgcttcgaaccgcggatcaggctgtccctgggattcgcattttctaacgccagtcttcccgcctcctgaaacagctccttcgaagctgttcttccggtcagaaacgtctccgccgcctctgcgcgcaccggtcccacacctaccggagccatggcaatacggcaccgttccaccacgccatccctgactgccagaaatgccgccacacagaccatgggcagcgccagagcctttctctgttccagtctggcgtaaccgcttccctcaccgggttctgccgccggaaccagaagcctcgtaaccagactcttcgtgctgtcaaccgtactctttccaaatccggcgtaaagacgatccatggaaagcacttctgttccggttccatttaccacctccaccgatgcgcccagtgctgccagtgccaccgcactgtccgccgccggctggccgtttacaagattgccgccgatggtactgcagttgcgaatctgattggagccaacggaatgggacgcctttgccagcgcatatgcgtactgcctgatcatggaactcgctgccgcctgattatgggtgactgccgcaccgatctccagaatcccgccgtcccgcctgatcccggtcagctctggaattcccgtgatatccacgagacagtccgcctgatactttccgctctgcaaatccagcaccagatcggtaccgcctgctataatccttccgcgtccctcatattgggcaagcagtgcaggtacctcttttgcctcctttgccattatgtaattctgtaccataaggaaatcagtcctcctttcgttttgccttttttcgttcaattttcacagttttattataacagtttccatcaggcgccatctccaaaaaatggattgtcaattttgtagttcctatgggaatcgtaacagaattttcataaatccttaaagtcttttttccgcttcaatggtagaatcatccataataaggaggagagcctatgaaaaagaaaaccgtctggactgcatccgtactgggagccgcggcctttctggcggcattctgcctgttggcaccgcgcagctatccggtacctgcagatacgaccgtcggcacccgcagcatccgatatgaagaccggcctgaaacggcagccgagatcattgtggcccgttacttcttaaaccagataacgggggattttaatgaaatgaaaaaccttcttcccaatacggaagcagacaggattacgctgaaaaatgagaaagaagcattcctgaagggggaatccatggaaacgtatctcatccgttccatcaccaccctggatcgtgaacagtatatcggagacaacagagcattttcctatccaggcgcggaacacaaagcccggcaggagaatctgaaggattatgtggttgtacatgtggaattctatcagaaatggtcagataaggcagaggcccgtgcaccacagtggggctccggagaatgcggccggaacttcctggtaggcagaaaagcactggataaaaattacaaaatatatgattatggaatgatgatgtaaggagacagatatgagtaaggagatcacattggcaaaggccgggctctcaaactgcgaggaactttaccaattacagaccatttctttccgccagcttctggagaaataccaggattatgattccaatccaggcgcggagacgaaggaccgtacgcttcagagactgaaagacccgtttacggattactattttatctgcttatccggaaagcatatcggtgcggtccgcatcagccacttcgaaactttatgcaggctcaagcagttattcattcttcctgaattccagggacacggatatgcgcagcaggctattttactggctgaggcactgtatccggagatccaaagatgggagcttgatacaatcagccaggaggcaaagctctgccacctgtatgagaaaatggggtatacaaagactgggcggatggaaaagattaaggacgggatggatcttgtttattatgccaggcatactaaaagagcagggagtggctgcagacagtcatgagaagccgcaggagatcatacagcatggaaagccaactgtaatcaggaaataacagttggctttccatgcttattatatatattcaattttattaatcaacgatcggcctgcgcactctgggttccatcaggaaccgcccacggttccagtactgaaagaagtctgtcatcataattcaagccaataccggtgctgtattcctggctggggagagttccacggggataggtgatctctaagtgggttggaaaaaggagaatatactccggccgcagggctgcttccatctccccgcgcagttccgggctgacagcgtccgaagcatctaagagccactgtcttgcctcttcttccggcaggctgaacaaatcccagttgctgtataccgcccctgtttccctgttaaacacggcccccagccgaatctcctctgattcctggccgcttaccggaattgcagcgattgtgataaagcataccattgtatcattagctgcggaaggcgtaatctcctgacggacacggcgttcctgatacaccgttccgttctgccggcaggacaggtaatcctcataggccttctgaagctctgtctccgtgtcgtagagcagtccctgttcctcgtaataaccatctatggccttacgggcagattcatttaaatcattaaaactcacggtcccggctacgtaatagttgtccggtccaacggtcttatagaccgtcaaaagacttgttccatctgataatctgtagctgtcatacgtattatgctcgtcctgccataagtccgcgctctctcctcccggaagggaggcagcattttcctgtatcagatgcagcgtctcctcctcctgaacagggcctctgtaacagcccgacaggaataaaagggacaggaccagtgctgatgggtaaattcgcctcgctttcatgggttatcctcctttatgtttctaacaccatgttatacttaaaagcaggaattgtccaccgtttcatgcttttccgcaggtttcaggaaatcggtataatacccggcagctgcatcagaccgcacggatttactttttccggatcctttaggttctttctcagctttgggtgtggggccgtgccgatgggcttgatatcccagtgtgccgccatctggatacgaaccgcaaaaatgaacgtgactggcgaacacatgggctttgtgtccgacagtcacgttcatttttgtggcgagtaggaagccaggcggacacgggatatcaagcccatcggcgcggccccacacccgaagccgagaaagaacctcctttataccaatggccggatctcgtagtcttccatattcacctctttaaatttcgatctctggaaccggtccttcaggccgtatggaacagtgcagtcgaaaatggtcttgcagctgattccccggtctttcagcataggattatattccggtccctcggttggatccagcggatggcaacggactcccggaatggtaatggtatccacatcgccctgatatcgggtgttaagcgcccataaaacatcgtccgaatcgaagatatccacatcctcatccaccacaatcacatgcttcagctcgggaaatgcggtgagggcgataagcgccgcctgacgctgccttccctcatcactgggaacctgtttggcgaactgtatgaccgccatgtatttgcctcctccggagcggtgggcataaacgtttttcacgcgcccggcaagcgctttctcttccatggtcaggatactggcctccgttgggattcccgccatgctcacgtgttcctcgctgggcccgatacaggtctggatcattggatttttccgatgggtaaccgctttgatcttaatgaccggaagttcccctgacacgtggccggtatatcccggaaactccggcatggcctttcccgtattggtattgatatcttcccgcatccgcttacctgccaccagctccccctcaatgacaaattccgcgttggcgatggcgtattcgtcgatggtccggcattttgccatacgaaccggctttttgcggagcgcgcctgcgatggataactcattgaaaccgagcggagtagtgggtggttcaaagcaggaggcgatctcgatggccggatccacaccaatgctgatgctgatgggcagattcacgccttcccgctccgccttttcccgaaatgcgtccagatgacgtactcccggagtgaaaaacatggtcatctcgtccgccgactgcaggcagagacggtgaatcgtcacgtccccatctcccgtaacgggatcggaggcgtagcacatgcccatggtaatgtatgggcctgcatcctcctccgtattctgaggcgccggaagaatctttctgatatcgaagccctcatccgacgcataatgaatctcctcctggcacggcacatctccgctctccgtaaattccggcatgacagggttcgcggccgcgtcctttaaaagaaagcccagcttatccggcgggcagtccagcagataccccacccgtttcctggaagccagcaggccgatcaacacctgtttgtccggaaatcctttgatattgcggaaaagaagcgccggtccctccttcgtcggccgctttaccgtaccgcccgcaccgacatagcggtaaattcccgcaacttctgcgtaggaatctacctctgtatctgtacaggcgatctgattttcatactttttcagttcctccaccgcactccgtaaatcttcaaccattctgatttcctcctttttcttccttctgatcctgctgatcctgcctcaaaccagcggcaatccggtgagcgccttcttcgcacagcgcaatgacgccggtgatctgttccttcgttattccgtccacatggatgccggccagtacggccagccccccgggaaccacggattccagttcccggtaaatgaattctgtcaccacgccttccctgtggccttctctggcatttgacaggcattcatctctgtcaccgaaggcaatggctccaatatggcccgtatctccgcctgctgccagcaccagacagtcggttcccatccggagcacccgaaactgcacagagacgccgtgacctgtcatggtaaaatccatcagttcctcaaacatggtcccgcaccttctctccccatcgttttgcaccttcccatggaatccggaactggtccagaatcttcataatctggtgatttacaatgtcctccacggtctccgggtggttgtaaaatgccggcatgggaggcactatgacagcgcccatctgcgaaagttcatacagatgttttaaatgaatggtgttaagcggcgtctcccggggacagaccaccagacggcgccgctccttcagggcgacatcacagacacgggtgatcaaattgtccgcgtatccattcgcaattcccgacagcgtcttcatgctgcacggcaggacaaccacgccatccaccggataggagccgctggagatacaggccgccaagtcgcggttatcgtagcagtggtctgccaaagaaagaatctcctctttcgtatactctgtttcaatctccagattgatccaggcgtaatcactgaatatcacatgggttaccacttcttccctctcctttaatgcctccagaagctttactgcgtatatcgttccgctggccccggttacaccgatgatcagatccatgaaaattcctccttttgccgttcctgttgtcgtatagaagcccgctgtccggaacggcgctttcgtttcccctcaactgtaccggaaaccgcctgtacaatcaattccttttgtggtatcattgtttccataaccgaatgaatgaacggaggcggaatatgacatttgatcaactgcagtactttgtggcggtcgtggaaagctccactttttttgacgcggcggaaagccttcatatcgctcagtccaccctgtccaaacagatacggaatctggaactggagctggatgtccagctgtttgacagaagccgccgccacgcatctttaacggaggccggacgcgccctctatccagatgcggttaaacttttgaagggtattcagggaatgaagcagcatcttgctccatatcaggacagccggaaatccatcatacatttaggagtccttcctattctgcatcagtaccgcttaaatcccattttaaagcagtttaccgagtctcatccggagatttccctcttgattgacgaggtggaggatgaaccgctgcggcagggcttccgccatggcagctacgatctggtcatcggccgtccggagctgcttaccggcattcagagcacatgccatctgctggctcacgaccggctggtgcttctgacccccacagaccatccgctggcgggccgggcagccgttccactggaagaactgtccggagaatcgtttattctgatgcaccccgacagcagcatccaccgtctgtgtctcacggcatgtcaaaaaaaaggattccagcccgctgtcacccgtacagccaagatagaatccattgtcagcgccgtcgccgccggagaggctgtgagcctgcttccttacagcaatttagatgtattccgccatgaaaatgtcgtagtgataccgttacaggaacccgtcgccgccaatgtcgtcctggcctgcctgtctccgaaaaagctctcacgctgcagccggactctctggaaatacttatccacgtaaactgttttaacgaaaaaagaagctgtgcagaattcgctctgcgcagcttcgtctctctttatattacgttcttaccggttttcttccatcgacacgccggcgatcttgatgttcacatccagcacggtaagtcccgtcatgttctcaatcgcactctttaccttgtcctgcaccttttcacagacttccggaatgctgaagccgtacttgatgtttaaggataagtctacagatacgtgctcttccgttacttcgacctttacgcccttggataaattcttcatccccagcttcccaaccagttcattggtaatgttgcctgccatcgaatccacgccgtctacttccgtcgccgcaaggccggcaatgatggctaccacttcatctgcaatctgtacttcgccgattttatctttttcatatactttatgagtatttctgttctctgtctctgccacaatgattccctcctgttttcaattctttccactacctggcttatagactattatagcaaagacagccacagtttgcaaaacatttttctattcctgtcccagaatccccgcttctaagtcacttaacatcacatcggcagcggtgattccgccttccgccagataccatacggttggcgtcaggtagacaatacggccgtttttgtatgcatctgttttctttaccagttcgttatccatcacttctcccgccagcttcgcgccttccgtgttgattgcggaatcacggtccaggacaaagatataatccgggtttaaggaaacgagaagttcgaaggaggattcattgccgtgtgtggagtccacatcattggccagattggtgaatccaacttcattgccgatcagggagcagcggcttccgtcaccaagcgtgttgaaattgctgctggtcaccattccgatcactgcggtctttccctctgccgcctgacgaagcgtctccacacgggcgtcgattccggccagttcctcagccgccttttcttcctccccgaagatggacgcaatcatggacgcgttgtttttcacactctgaatcacgccctcctcatagtccacagccgtgtaaacgacgggagcaattttagacagttcgtcatactgcgcgcttaagcggccgccgataaagatcacatccggttcactggccatgagcgcctccatatccacttcctttaaagtaccgagatttacaatggcgtcgttgttgttatactccatcagataatcgattttggaggatttcggcattcccacaatctgactgcccagtccccagttgtccatcatgtcaagcaccgccatgtccagaatggcaacgcgctccggattataaggaacctccagttccaccttctctccgtttccattcagggtcgttacggtgacggattccggtgtttccgaagcctgagtagtttcattccggctctcagccaggacagattcggcttcagcggaaactgtcgcttcgccggactgtccgtctgttgtttttgactgtccggtcccctgcccgcaggctgtcatagaaagggctgctgccattgcaagtgtcagtaaagtcatttttttcataatcagtatctcctttttcatctgaattatttataatcagcatggtgaatcagcatccgttactgacgcagtttcgtgtcagtacactagtaatagatcgataacggtttcccttcgatttgcagaatctcaaaatctacgcggtatatttcggaaagattttcctttgtcatcacttcctccaccgtcccgaattttgagatttttccatctacaaatgcgcagatatagtcagagtaaaatgctgcgtaattgatctcgtgcaggacgagaatcacggtttttcccaactcatcacacagtctgcggacgattttcatcatattggtggcgtggtaaatgtccaggttgttagtcggctcgtcaagcaggatgtattccgtgtcctgcgcaatgaccatggcaatgtaagcgcgctggcgctggccgccggacagttcgtcgataaaccggtcctcaaattcctccagttccatataagcaatggccttatcgatgatttcttcagcctccgccgtaatccggctgccgctgtatggaaaacggccaaatgccaccagctcccggaccgtcagcttcatttggacgtggctgctctgggtcagaatagccagacgcttcgccagatcccggctcttccacctggaaatatcctttccctcgaaatccaccgagccgtcatcctgggcgatcagtctggagatcattcccatgaccgttgattttccggctccgttgggaccgatcagcgagatcacctttcccgccggcagttcgaaggaaacgccatccaccacggtttttccattgtattttttcaaaagttctttgacaaacatcgttgtcacctccttatgatggttatccacgcctacgcagaacggctcgttcgcagcagcagatagagaaagtaaattccgcctcccacagtaataaacacactgacaggaacgctgtaagtaaatatctgctctgtaatcagctggccgcctgccagtatcaccattccgatcagcgctgatccggctatcaaatagctgtggcggaacgttttaaacagctgccttgacaaattggcgataatcaggcccaggaatgagatcggcccgaccatggccgtcgctatggcgataaacagagtcacccccagaagcagtctgcgcacggtgcggtcatagtccacccccagattaatcgcctgcgcctttcccagtgtaatgacatccaacagcgccagttcccggcggagggcaaggagcagaactgcgatcagaaccagggaaaagaaaataatttccgtatttacattggtgaagctggcgaccagcgatgccagaaggctgtcgtactcgttggggtccatgatacgcgtcagcgtcgtctgcatgctggtaaaaaaggtggacagcaccgttccggccagcagaacatacagtacattatggcttgtctttttaaataagtaactgtaaataacggtggcgatgatcgccataagcaccagatccaccgcaaacgaaagattggtattgcgggccagcagactggtggatccgaagaaaaacaccaccgccgtatgaatcagcgtatagagggagttcatccccagaaggcacggtgtcacaatggtattgttgatcaccgactggaagatgacggaagcccctccgatgcagaacgccgtaatcagcatgaccgccagctttggaatccgcaggctcatggcgtagctgaaatatttcatattcacattcagaaagagatagagtacggcggccgctgctgccagcagtgaaagcatcaccagcttctttccgttgatgcttcctgtctttttcctcctgcttcctgtctcctgtttcatgcttctgttcctccagtctgcggcgagggtactgccgcggctctctttttcccgaaggggagggaaatgcttttccgtccgtggtttaagcggtagatcagcatacccacaaaaactgcgcttccgatgacgccgatgattaattcaatgggcagctcatagggcgcgatcacggtccggccgatcatgtcgcagaccaggacaaacagcgctccaaacagggcggtatccagcagagttccccgtatccggtcgcctttaaacatggccaccaggttgggaacgatcagtccgatgtaagagacgctgccgacaacgaccacgatgctggccgtaatcatggcggcgatgctcagtcccaggaaaagcacgacattgtagttgacacccagattttttgagaaattcttccccattcccacaatattgaaatgattggcaaacaaaaatgccagaagcaccagcggaagcgttaaatacaccagttcgtagcgccctctgatcaccagggaaaaatgtcccaccagccaggacgaaagagcctgggtcatgtcgtatttgtaggccagatagctggtcacgcctccgatcacgttgccgaacatgattcccaccagcggaaccatgaccacgtccttaaactggattctctgaatgaaacagacgaagatccatgtccccgcgatggccgcagcaaaagcgaagacggcccgtccccacagggaagatgacggcataaacagcagcgccagtaaaataccgaactgcgccgacgaaatcgtcgcgcccgtggttggggagacgaatttattcatgcagagctgctgcatgatcagaccggaaatactcataccgactccggtacagagaattgccagaagacggggcagccgggatataaacagaatttccatctgctcaaaatccccccgcagcacaccttccgggctgagttccataacgcccagaaacagtgataccaccgacagcacggccagtaatacggccagaaggatggttagagtctttggttttattttaggttcctcctctcaagctatgtacaggctttagttagtttgtactaactaaagtggtaaaaaaatacaacacgcaggatatcccatcacatgcatactggactactatgattctcacaccgcgcgctgcctgattatcataacacagagagttagtcatgggcaactccataaaatgcacaaacttttctcaataacagaaggaaaaaacggcgatttctggtaatggaaatcgccggaaataaagagcagggatgcgaaaagccatttgcagcttttcgcatccctgtctgctcattccgtttattcccttctattcttccagcttcatcagggtaatcacgatgttctccgcacccacttctgttttgcgctttacgatgtcctcaatctgggctcgctgaggatcggtaatgctggaggcgttgataacgacatcgacctttccgctggtaatgctgacaaccggatcggagaagcccttggccatcagaagagtctccgcggcgttctctttttcggaaattgcagtcatgtcgatcatttcctgaatcgcttcctgtttggctgcctcttcgatgttctcattgttgatcagattcatcagggtctctttgttcttggcacggacctgttctctgctcagctgaacgttcgctatgtaatctgacacattcataccactggttaagactgcttcccccggattttccagaccggtttccgtgtcactggacgctgcgtcattcgctgccagctgtccgccttctgccgccgaattgtcggctgcattggccgtgtccgcggctgcatctcccgccacgccttcctgattgctggccgccgcgctgccggagccgtctgtatcctgagcggccaggctttcatcactcggatcattgtcaaggcttgcaatctcctggtaattgccgggatcgcctgtcagcgcctggttctcggccagaatgtcctcatcggatatatctgtcacaccggcctcatacacgtcggttcccgacgccatttcctgttttcctgcgtagtttagatatccggcagccgcgatcatgaccgccagcgttgtgatgataatctgatttcttctgaacagttttttcatattcattttctttggggttcccgggactttagattctctgatatcttttaagcttctcattcctaacactccttttttattccaccctctttaatacttttattttatgtggcggcaagtcaaataatgcttccatcgcgcctgaaatttcagcttttacagttggactgcctccgccctgggcgctgatgatgattccttctatttcagggcggatttctttctccacgatcggcgccgtgttttccccggatccggtcaaaattgtactttcctgctgttctgcgctgctgctcttcctcgttccgccgccgctgtcctgttcctccgtgctggagctgctggtatttttatctacacgcagcaccttctcctcagaagatttgagcacgatcatgacatcaacagttccgacgccatccaccgtctttaaaatctgctttacccgctgttccagctgctgttcataggtacggtccgcatttgcggccgcggccaccggttctcccgcctctgtcaccagaccttcctgtaagacagcttccgttcccgaagcggcgtctttcatcatcttcttttccgtctccggaccggatggaatcgtgaggaccaggagcagaagtcctgccgccagcagaatcagccatttatccttacccaatttccagttgaatttcaatgtcctgttcctccaaatcataatattctgaaatgcgccgtcttaaacctgccagagcagaattttcttcctgccggtgatccggctgccccgccgctgcgccggccggtttcgttatctctccggcggacgttcctgtttctgcaccggctgcggccggatttctttctccggctttctccgacacctctgtgctcccgccgccgagttccacgcggatccgttccacaggttccactgattcaaccggcctgattttggtattgttcccctgatccgtctgtcctgggctgtccggagcaaggcggaggctgacggataccacgtgaccgaacctcgcattcttttcatccccgtcaatgagagccttcgccttcacacagacaaatcccgacgattctgccatggtacgcaggtcatgctccaccgcctcctcgtactggctcaccatactctttaaacgaacgctttccatatctgagatctgggccgaaagctccgacgcctctttctgaaagctgatggcttcgaagtaataggccagtttgtcatccagccggagtccccccgtaaacggctttaagaccagcagaatgagcaccatgcccgcaaacagccggaaatatttttcatacttcttatcgggaagaagattggttaccactgtcataaaaatcagatagtacgtgatatttctgatccactcatagataccttccatgtcaatcaccctgcgtaatacgttacatttgtggaggcgcataccactgcgacagtcactacgaacagcacaatggcggaggccgcaatggacagcagaattttatgccctcgggccatgtccgagatgcaggatacaatccgtttatcgcataccggctgcaggacagctgccacgcactgatacagaatcatgagaatcaccagcttcagcatgggaatcagcgtgataatcaccagaaccaccaccccggcggcacccatggtattctttacaaggacgcctgaaccaatcaccatctgcgtcacggcgctggccccctgccccacccccggtatgattccgatcagtttctgaaccgctcccgttttcatggaatccacgtaggggagcaccagcccctgaatgaggtgaaatcccagaacaataccgaccattgtctttaggctccaggtgatcacatcatttaagagatccgtcagcttcgacaggatgtcctcctttgcaatatggcctgccatgacgagaagcgcgtagaccttcaccatgggcagaagaaccgagccggtaatggtctgagccaccgtgatggcaaacagcgtaaattcataggaagcgactgccgatacgcttccccccgcgaatgccgccgccagaaaatacgccggcatcagcgccttcataaatcccagaatctgattcaccacactgcctgcgatggtaatactcgtaaaaaaactggctgccaaataggtaaacagcagcagataggtgacgaaaaagcctgtctccgatatctggcttcctgtaaaaacattggaaaaattgctaaacacggcgccgataattccaagaataataatctgccccatcatatggctgttgtttctgacttccgaaaacagtgcgtcacgaatgctcgtaccgatctgccccatcacatctcccagtctgcccgccatgatgtccttcatcatttgtttaaatgacaggttccagccgctcgttccctgtgcattaatataatcctggatttccgacagatcatactgttccagatccatggagacctcttttgtctccgcttcatccaccgtcttcccggaatcgaccggagattgtccaccatgctctgccgcaaagcttaagaagccagcgcacagtctgccttcggagaacacgcccccggttccggccagaaggagtgccagtaccagtaaaacagctgtttttaacagacgccccttcatgacagaaatacctgcagtgtctcgatgagggccagaagaatcggcatgctgacggcaagcaccgacagtttaccaaagatttcgatctgtgttcccacagcgccgtacccggcatctttgcagattccggcggcaaattctgccacataggtgatcccgatcattttaatcagggtggataagtacacactgttgatcttaatataagactgaacctgtttgatggtatccagaattgtagtcagctttccgactccgtaaaaaaagatgaaaaatccggctgccatcaccagatagataccgtactctcccttcattcccttcagtgcaacagccagaaggactgctgtgattccgactacggctatggtcactaccgtcatattctcactacccctacaatgcaaacagatttttaatggtttcaaacagttgataaatgtaaggcaccagccagaacagcaccaggattaaacccgcgagactcgttaaaaatgcctgttcttcccgcccgctgtgcttaagtacctggcagatgacggaaaccaggattccaaccgccgctattttgaatatcagattgacccccatgctatcctccttatacacacttgtttcgtccgcatccggactgccggcccgcatacgcttccgccgtccggcgtattaatacatcataatcgttaagaagattccgcccataataccaaggctggtatagagacggcttcgctcctgcttatgctcccttaaatatccgatggttaaatccagctgttccagatagagaagaatcgtccgctcctgcatttccaagtctaagtaacccaggtgctcccccagtccttttaagctctgcctgtcctctttggagaggcagaaggcttttggaagcttctcgatctcctcctgccagatatcgtaaaatggttccccccgctgtccctccatccgcccagccacccggacaaacagatcgccgatctcgcctccgcccttcttccccgtccgctcgaagctttcggggagtgcagagcgggcgtatacgatctctcccttcagcaggaagatcatttttctcaagtgttccatggtttttagccgttctccccactgccccgccaggaagaatcccataccggagcaggaaaccacgacaagaacggctcccagcagtctgattcccgtgttaaccatatgccatgcactcctcgctgttccatctctttcccatacggtgaacctccgccttatagagctgggttccgcgggaatcgtagatctgatcgatatttccgatctttcctttattattcagcacaatataccgctcgaaaatccgctcctccaccagccttctgagcaccggcttctgtttcagatcatcgatggagcttccgtgcactgtggcaatcagcttgcatccgcagttcattacgtattccacggcctccaaatcttccctgctgcctatttcatcaacggcaatgacccggggggacatggtccggatcagcatcatcatgccccgggcctttggacagcagtcgagaatgtcggtgcggatccccagctcattctgaggaatcccctgataacaggcgccgatctccgaccgttcgtccaccacccctaccgtcatgcccggatgagcctccgtcccattggaaatctgccggatcagatcgcgaagcagcgtcgttttaccgcaccggggcggggaaataatcagggtgtgcagaatctcttcactgtcgtagagatacggcagcaccggggaagcacagcccttcacctggtgggacaatcttacattaataaaggatataaacttcatcgtcttaattcccgactcatccagaatcgtttttcctgccacgccgatacggtgtcctccctggatggtaagaaatccctgtttcatctcttcctcaaacgcatacagggaataattgctcatgtattccatggtttcctttaactcgttccggctcactaagtaggcgtcccggcagtcccggctcagctggcccaagcggcttatgtagtattcctcgttcttgtaaaccattaaaagcggtgctgcaacccgcaggcgaatctcctgcacttcgtcaaagcttacggcaacccgggtcagaatctctcttatattcttcgaaaagatctttatgagctcgtcttttttctccaccttcatccctcctcttacctcaatatatgtgaagggggacaaattatgacggagaattattttcatttttcagaggtatatggtatgatagctgtatggaataccgtaaacaggaaccatcgatgtcactgagccgaagtgattcggttcagcacagcggaaaggaacatatatgaagaataagctgctgcccggccttataatcgccctgggccttttaacctccgcatgccatacagacagcggttttgacgcccctgctgagtcctttcagaaggagagccaggcggaaaccgtgtctccggctgaggaaaaacccgctgcaaaagatcagagctctgatccggcagatcatgtttccatcgggactgaggaaacgaaagatacagaaaccgctttccatactttttctgttaaagcattgaatcatttaaacgctgaccccagcctgatctacaaccggtatgtcaaggccggcgacataaggactgccatatccttttcactggcacaggattggaaagagtctgacagtctgacctgtcatttccagactcaggatagtcaatatgaaagcagttggaacggaaccgccgacgcggtaattaatacagagagcgggacaataacgtacaagctcataccggaattctttggaacgaatcagaaaaacgggacatgtgaaatcacctttcatttagacgaaacagtgccttatattgcagttgagggggatccccgtctggaaggagagtactattcatttcaggattccttcagccgtccggatgaattcacccgctatctgggaaaagctgatctgtatctatacccaaccgaagaccttaagctgctcagaaatgaaatttatgcggctcatggacggaaatttgatacggagagcctcaatcagtatttttccgctcaagcgtggtatcgcggacttctggaaccgaacgcattttcagatgccgtgctctctgacattgaaaagaagaatattacgctgatccgggaattggaagagattccttacaatgaaaggaacacgatagatggcattcaatatggcgatgagtgggaccggcttccggtggcaccatatctttcttatttgcatccgggccatgaaaccgggctgtctgccgacttatcaaaggctgaggatatgggcgtatattactgcgcccccggttccatctccattcccgcttccatcacacaggagcaattttcccaggtccaaaacggcggggaagtcgaactcgttctaaatgcactgactggcaaaagcaggatgctatccctgaatcccaacgccgggcccagcggttcaaacggctatttgacgtatgacaaaggtatggatccctccacttacggcaatgaggcggcgatcaccgcggatttagagaacggaacgtataccctgtgggaggacagtgacgatacgattatgaaaacggtctatgagggcaatatttatatcctcaaaggcgccgtcacaggcacctataccaaccttgcggaagcatctaaaactcagaagaaaatatacgccggagaaccggttgaagaaggcaaagaggaggcttcggctgaatataccgtatacggtaatgatctttactataatgagaaagggtattttacagcattttattatcttggtgattaggtagaaaaaggaaattggataaaaaaaggaccttcggatatggtgatctgaaggtccttttttgtggaaatcaaagtgtttgtgggacatttttttacagattggttgacattagtatgattttccatatggtttcaatctacatctcccgcaggagatgactccgtgaaccccgaggcgtccgacttcgcccggataatttcaatccacatctcccgcaggagatgactcttccattatattgcttccattcgcagatacataatttcaatccacatctcccgcaggagatgactcagcagggggaagcggcatggacaacggtcacacgatttcaatccacatctcccgcaggagatgactcgacatattcacccgccggaagttgcgcatggagcaatttcaatccacatctcccgcaggagatgactcgatatatctgcatattatgaagggccatataaaatttcaatccacatctcccgcaggagatgactcaatgtagtcctgctgattggctatggagaacaggtatttcaatccacatctcccgcaggagatgactcacaaccccatacaaaccatagtcaatattcaggtatttcaatccacatctcccgcaggagatgactcgctatggacggactccacggcgtttcctttgcagatttcaatccacatctcccgcaggagatgactcgggattatgtgtactgtgtacgagagaagtattaatttcaatccacatctcccgcaggagatgactctgccttgcatagtgactgcaaaaacttaatatcgatttcaatccacatctcccgcaggagatgactcgaaataaatttctttataaaaaatgccttagatatttcaatccacatctcccgcaggagatgactcagcaattttccccaatctccctccccaactcccctcacatccttaactatattgtacaacaatccctttaaaaatcaatcatcaactccatattccccccattttccccccaatttccagtgcgaacctcccagtaattctatgttcacttaaggttcgcaccagctaccgccccgtgcagccactcctcacagctaattttcttctcagtctttcacaagcaccttcacaatctccgaaatgtacattgtatgataatctttatccggataccatttctcatcattttccttatccaggaaattatcaccgggcattggatcacagtatagcttccggcagacaaaaatcatatttgcttcttcaaaggccgtagtaccatcaataaaataaggggtcagcccggcttctgccgccttatcgcagtcacgtccggaccgtgttccgcagatgttcagtgcttttttatactccttgtcataaaaagacactgtaaaatactcatttgcatccacaaattctttcgtataacgctgcggccggatataggtcgtaacgacatttttattccacataatacccactccgccccaactggctgtcatcgtgttaaatttcttctcgtcacctgccgtaatcagcatccactccgtaccaatctttgtaaaaggattgaaattcagttcttccattttcacttctttaaaactcatatgatgattctccttttctcacacctgcactcatgatacagttactttagcggcgcagcagtcattgtctaagggcgcctgctgtaccgcaatcgtcgccgcgcctctctccgaaaacggaaaagcggtcttcagccaactctaaaccgcggtcttttccatttcccatacttccattttactattttccccatcaaaagcaacctccattttctctgctgcaaaaaaaacggctctttccggtgccaaaatatcaaagcagaatctccgatcccctgtatccctatataatgcgtcaaaaagccgctgtgttcatcacatcttccatgctccgaacacagcggccccagctgccctcatctcttattccatccgaatcctgacacctgtctcataaatactattttccagcagcacgcggactgtcacctcaccgctcaacccggatttattgacgtaaacatccacatttctgggatcattcttcagaaatgttccgacacacatagcttcaaaattctttgccgccgacgtattgatataataccggtgtaccacgccgttctcctcttccaacaggagcatggcaagttcccccttttcgaacgtagcattaaacaggatgcgatcctcctcttccgtaacggaagcattgtaatgctccggtatcagttcacccgtggaaacggctggaatctccgtctcaaattctcccgtcctgttcatggaaccaagtgtttcccctactcccagttctgcagtttcattggcataatacattggaagtttctcagcacgaaatacgttggaaggcacatgcagttcataaaccacctcgtccccgaccagttcgcaggtgatagaattaagttcacacccttcccctgttccatccatgctcccaagcccctccagcggttctccgtttttataggcaatccctccggaatggaccatatagcggccttcgtcataatattccacattacagatatatggagaaaagaaatccgcgccgcgttcctttccatactgccacacctgccggatcgtcctttcttctctgtcaatatggtagcgcacacctctggaatagctgtctttcgccctgctgtagctgtcctttcttttggagcggtaatgaccgttatcaaacatcataatgtctccatccgggcataccaccacgccgtgctgctcataggaccattcaaacggatcccccacaggccggaaaaaatagttttccacatattctttcggccagccttccggatcccccagaatccagttgagggctcctgtttgaaagtcaatattaatcaccgcatcctgatgccggccggaaagtgtgatggaatccgtcttcttatcgtaccacactgcattgttatggaaccagtcatgggccgatgcagatccggaatacgtcgtcggacagttgtaaggcagaatctccctgtagtcccaggttctcacaatttctcctgtctgacggtcgacgagaaccagaacatcttccacggtatcccggtccggaatctgggacagcatcaggatattaccatcttccatctcaaaggtatcatggtggtaaccgcccggcagccggtattccctgtatatttttccgtgaactcccatttcatacacaccgctcacataatacggcagcttaatcagccggtctgtccccaccagaaggcggccgtttgcaagcctttttaaatcaaagcagacgtttaccgttaaataccatctgacatcaccgcagtagtcacaggccaaagcatccgccttggaggtctgtgtcagaaagatcacgttatctcccatgtgttcccggctgcccttacagaatgtggggactggtacttcagggggcaaaggctcggtcgtaatgatgactttctccctttctccgcctgacagcacgagctctaccgtattatcatagtccgcgtacaggccatacaccggcagaatatgaacggtatccgccggaaaggtatggctgatatcgccttccggctcctttccctttaccgtcagcgtgacttcctgcttcacggatgtcttaaaaagtatcatcgccgtcagcggagagatcaaataggggttccctactaccagagggctggctgccgtatactctcccgcctcaaatatatccagaaatttctgttccgcttccgcctgctgtgtaatcaggctttttttcttctcatatcgaatcatctgctatccctttcttcccagttatcccatgcatttcttcttatacgccgccgctgactgtgcggccaccgcgccatccgagcaggctgtcacgatctggcggagcagtttactgttggcatcccctgctccgaaaattccaggcacggccgtctccatccgctcgttcgtctcaatataaccgtgtgattccagaataccaagaccggcaaatgattccgttaccggctgaagaccaatatactcaaatgcgccatctccgcggactgtgatttcctcccccgttttgctggaaaccgcgcgcaggccggtaaatacctctccaggcagaaattctttgatgtcaaaccactcgtatacctccacattaggcaacgccttcagtttatcgcaggctatgggatccgccgtaagatcaagcatggtcactaccgttactctttccgccatttccgccagatagatggattcttccaccgcggaattgccgccaccgattacaatgacagacttatctctgtatttggctccatcacagatggcgcaccagctgatggatttccccgcaaaatccagttcgttcggcacatgaagcatgcgcggtttcgtccctgtagccagaattacagccaaagcccggtacgattttccttccccgcatatcaatgtctttacggtaccgccgccttcttcgcagtcctctatctctattttttccacagtagcgtaatcgaattcgattccaagagcctgggtatgctcaaatacctgcattgccaaatctgccccgttgaccgaggcaaaccccgggtagttctggatttcatatgtgttgatgatctgccctcccggtgccagtttatccagcaaaaggacgtcgagattcgctctctttgcataaattgcggccgtcattccggcaggcccgctgcctgctatgatcacatcataaattttcatattcttctcctatctcaaaaatccagtcatcatccagtatggataaatcagtaccatcaggaagataatgctgagtatcgtacggaccgtacagaatttcatggccttcttcatatcgaagacgtcatagctgaacaaaatcaggaacagggcccattcatacgggaaaaacagctgttctacgccccatacaaagctgaaggtagttccaatcacactgagtcccagcttcgccgcgatatcgataaagagcggtgaaaatgccgccatgccagccagaggagtcatcatcatatccgtaatcacaccggtcagccaggcaaatacgatcagtccaaaattccccacattctggagaatcggcatcatcagctcgcttacaagccctgccacgccgaccgcattggacatgcttccgatcgccatggttgccgccacaaagaataccattggaaagtttacctgtttcatgtcttcgatatctgcgacctccacacccggaagaaagcaggcaatcaccgccagaatgaaaagccacccggcgtcaatcccggaaaataccattgcgataacgagaagaatcaggattactaaaaatttgatttcctttttcgacattttgccgagagattcgtatttttctttaaaatactcttttccatcgattgaagcatcctgtttaaacagaattcgcaccatgaacaaaagaacgatcagccacacaagcatgacaggaaaattgctgatgaaatactgaatccagctcacactgtttccggtttcctttaaataggagttgaccagctgaagattttcacttgcagataaatacagccaggatggtgcaattgccgccacgaaaccggcaaacatgatgccggccccggtattgctgtttttcggtatttttaacgcgttatagattccaaaacacagggcacaatagagtgcgacacggccggtcatgttggggaccagaagccccaccacgatacctgacagcgtgattcccgttataatacccttataggagccacccgatttgacaataaaaaagtatgcgatccgctgcatcaggccgcttttctcaaagattacggacagcgtcaggccgcccagagacagccatacaaccgaaccggtccacggtgatagcactacattggccggcgccactccccagagaatcgcgcccaccgttaaaagcagaccggaaatataaaccggaagcagattcatcgcccaggtcagaatcgcccatgaggtacacacgaaaaattttctcatttccggcgagaccgcttccgactgtggaactgcaaagtaaaggatgcagggaacgccgacggctatcccccattttataaaaaatttcaaatcaaacgcagtcttcttatctgctgtaatcccctgattgtccatagttttccccttccccatttcgattcggcttgtgccctgcggcagaacagccccagggcacaggagtctttatttttcaatggctttaaatgcttctgtctgtgcagtcattccacgttctgatgcgagacgctcaatggaagaggcaccgaagaatccgtctatttccggcacatgcttaatcacgtaggcagcatcctccggatctgcgatcggaccgccatggcagataaccatgatatcctggcatacttctcttcctgcccggataatctcccggatctttacgcagcagtcatcgagcgtcagcgcagtctccgcgccaatacttcccttggtggtcagtcccatatgcgcaaccagaatatcagcgcctgcttctgccatggcttttgcctgctccggatcaaagacatatggacaggtgagcatatccagtttatgagcttcgcggatcatatcaacctccagtccatatcccatgcccgtttcctccagatttgccctgaatttaccgtcgattaatccgactgtggggaaattctgcacaccgttaaagccctggtctttcagctgttttaagaagagatccatcacacggaacgggtccgtaccgcagacaccggccaggaccggagtgttcttgacaaccggaagcacctccgcccccatttcctgtacgatcttattggcatcgccgtaagccagcagccctgacagagaaccccggcctgccatccggaaacgaccggaattatagataatcagcatatcggctccgcccttttcactgcatttcgccgtaattccggttcctgcgccaacgcctaccaggattcttccctcttccacctctctgtggaatttttccataatctcgcttcttgtcattctgttcatgtttaaaccctcctgttttatttgctctggtactgcattgcaccatacagtactggctgttattttgattatctttccataagttccattagtttttcagccgcgcataaggcaaacgcctgatcattgatgttgtaatccagttccataatctcaaccgaatcccggtttacctcgtcacgcagagtctggaacagcacctgatcctcctcgggaccgtaaaacggctggccctctgcgtcgatggccgatactcctttcagcggcagcagcagcacggtctttccggaggccatattcagtttttcggccagtttctctccgacttccctgttttcgtcggccgtagtcctcatcagagtgaccgtcgggttatgtttataaaggtttcttcccgcaaattttttcggaaccgtgtcaaatgggccaaaattcaccatatccatagcccctaccgaaaccacctgagggattttgctgcgggccgctgcctcacagcgcctctgacctgccgccagaactccgccaaccacctcgtcacaccactctgtcgtggtcagatcgagcacgcctttaaagaatccggcttccgtcagcgcctccatcgttctgcctccggttccggtggcatgaaagacaaggacttcatacccctgcgactccagatactccttggcatatccgacacagggcgtcgtaacaccaaacatggtcgccgcaaccagcggtttatgatcccctgtatccggctttaattcttccttcagtcctaccattccgccgacagcaagaaccgcattcctaaaaataaccttcgatatggaattcagccctgccacatcgacaatggatggcatcatcacaagatcactggtacccacatactgttccacgttgccggaagccatggttgaaaccataaccttgggaactccgatgggcagagcccgcatggccggagtcaccatagacgtccccccggagcctccaaatgacagaataccgtcaaatctgccttccctgtaaagctgcggtaccagaatctccatccccttcgacagcgcctctgtcgccacagcgcggtcttttcgttccacaatggcgtgaatatcgtatcccgccgcagctgccacctccgcattggatacgtccggtggaaattcaggttcaaacacgccggtatgtatggtaaatgcgtgcatccccagttcctcgatcagtccctttacatagagatattcctttcctttcgtatcaaaggttcctgcgattgcaattgttttcatgtaaacctctccttctcccagcagaatacggccgtaattccgctgtatatctatccccttttttacttccctgctacaaatatattgtactctaccctctcacatgatgaaatgttgtcaaattagcttcttttgtgtttatatttttatatcatattgtttttattaacaaaccttgtgtttatattagattttgaatgtaagcgtaacagttcagacggattcattttgggattgacattccgcccgaaacctgctatgataggccgcgtagtcggagggcagattgttcagaaagacaattggccggataaggcacagactgaaatgtctgcactttatccggcttttttttgtgagaaggaggaatgtatcatggattttctgaacggaactattaaatcaatctacttaaagtatctgtcggcagcgttcggcagtgctatgatcacttccatttactctatcgtggatacggccatggtaggacagtatcagggtcccagcggtaccgcggctctggcggtcgttgcgcccctgtggaatattatttacagtctggggcttctcatgggaatcgggggctctgtcattttcagtacaaagcgagggcttgataacggcaggtcagggaatgaaaacgaatatttcaccgtctcagtccttggctccattgccctatccctgttggcgtggatggggcttctgtttctggatcagcctgttctgttgtttttcggggcagacagcacgctgcttcctcttgcgcagagttatatgctgccaatcaaattcgtgttccctctgttcttattcaatcagatgctggccgcatttctgagaaatgacaaaaacccgggactggcaaccattgcggtgctgagcggcggtattttcaacatagcaggcgactatatgtttgtatttgcctttgacatggggattttcggcgcaggtctggcaaccgctgtcggatgtgcgatttcctttcttgtcatgatgactcattttttcagcagaaaaaacaccctgctgctggtgcgtccctcaaatatatggaacaagcttaaggaaatctcagtcaccggtttttcaaccttctttattgatgttgcgatgggaatcctgacgattctttttaaccgtcagatcatgaaatacctcggaactaatgcactggccatttacggcccgatcatcaacgtgagtacgtttgtgcaatgctgcgcttacagcgtcggacaggcggcgcagccgattatctccacaaactacggggcaggccagggtatgcggattaaggaaacactccggtatgcactttacacaactgcctttttcagcgtgttttggactgcattaagctttgccttcccgaatctgtatatacgtatttttatgaacccaactgcggaaattttagaaatggctccgggaattatccgcagctatgccctgtcctttctgctgctcccgctgaatattttctctacctattattttcaggctattttaaaaccaatggcggcctttatcgtatctgtatcccgtggtttcttcatcagcggaattatgatcatggttctgcctgttatcgcaggagccgattttctctggtttgccatgccgatcactgagctgctggtcatgttctacaccgcaggcgccatgagaaaatacacaaaagccttaattgtgaacagcaaagctacgtaatactgcaaaatttcataaagcagaatagaataagcccggctgcagacacagccgggcttattctattctggaaagaagaaaaatgttattctctgcaattccatgtgccatcctgtttatcctccattaaacatccagcagaggaatgacattaataaccggttcttcataagggtgtattctcctgactgttttgacagcctcctccagaaactcaacgggacagcgtacttccaccctggcttcagtaccgcagcagatcgttcctttttctccgtgaaacgggtgactgttctccaatggtctccaaaatcctttcgtgctctggtaagaaagaacgtgatcataattaccggcccggcatgcgcctgcaagagtcagcgcattccgtatttcctcgatgtattcctccggtatatagatttctatctttacttcttttatatcaaaattcatgtttttcctcccaaccgtgtcatgtctgtcgctcccgaacgctgtatgatatcggcttccttctggttcttttatttttcatacttcccttttatcttccaccgtatttccatcattccggcactttcctgcatattctaccggcggaatccccgtatacttcttaaacattcttgaaaactgggcgtagtcctcatatcccaccatggcagcgacctccttgcaggacatttttttctgttcaaacagctcctttgccttgttcatgcggaacctcaccagatattccgtaaagctgcatcccacttcctttttgaatttaacactcagataggaaccagatacgtgagcaaccaccgccaaatcacgcagctgtatttccttcatataatgctcttctatatattttttcacaaattccacatagtcacccggattccagtttccattgagaagcttggacatgggatccttttcatcaaagcttccatagcttttgaacgccttcgttgtattaagaatggcccgctccgtgggaatccggtcaaaggtggagccgcctatgtatccctggcatttcgtattctggtacagatactgcatatctatgggcgtattggcaggccccgcatatatcatcttgattacatcgctgcgaatttcgtcacttgcattaaaaatttcgtccgatatctttctggcgtcattgatggatatatatttcttcgctcccagaaatcccccttttgtcagccctaaatgagcacagatcacatcggctccggccagcgtcatcgccctggcctgctctgcattgacgacaaatgcaatggtaaataaatcgagaaaatgagcaagcttaatggcctccacttctttctcatacgtattcccctcctcgctcagcgcttccccgaagattccgtcgatcagagacagagtcggataattaacaacaccggaaaaaccgttttcacggatcttttgcagataatcatagagatgaatcatcggatcactggcaaacaggccaaacagaaccggcgtatccctgataatcggcagcaattcgttgcaccccatatccatgacaatcgtgttgctgtcaccgtaacacagataactggaaaatgaacttctgcccataattctgaatttgccggcgctcagcgccagaagcaaatccgcacctcccatggccgaatatctggccgtcatacccgaacctgctaccgtgcctataatatggccatttacattaatctgcgcacgaaggcgcttaagaatttcatttctgggaatcattttgcctcctgggagcctcttattataaaacgctctggattttatactctttattgtaccgtatctcacggtaaaatcaacagccaaccgttttttcttcattttccgattctattaccggtgttttcccatgtaagctcccgcaggtcacaaaaaatccgggggcctccgcccccggatcaatctcaatccctctgatctccgttgtctcctacactcttctatattccaacggaagatcatatccaaacgttctctttccatttacctcaaacgtctccgaaacctccagcacctcgctgtcaaaccgctcttccagtgtgaatttcagcactggcgaaaacatgctgacgcttttgcccacaaaggccccattctcctcatgatagatgatcggcgtgaatttttccgaaatcctgagactttcaaatgcagtctctttcagattctcgtatgtaaaactctcacaaccgggcactgtaaataaatcaccaggaaagatcacaaaagtttcacactctgtgcttttcacacggtactgcctttcccgttccgtccctgtcctctggcagcagcctgttctatttataatcgtccacgtcaaactcccggtctttgaaataatacttccggtcttcctccgtgatgtagcggatcacacggcaaggattgcccactgcgatcgcattgtccgggatatcctttgtcacaacgctgccggatccaatcacaacgttattaccgatatgaacacccggattaatgacggtatttcctcccacccagacattatccccgatggtgactccgatgccatactcatatccactgtttctcgaatcgggatggaccggatgacctgccgtgtaaaccgccacattcggggcaaacattacattttctccgattaccaccttcgccacatccaggatcacacagttaaaattggcatagaaattattgccggcctcgatattggttccatagtcacagcgaaacggcgtttccacaaagattgtttctcctgtttttccaaaaatctcacggattaaagcatccttctctttctccgcctccggcgggagattattataacggtaaacccgttttctgctctccttacgctcttcctcaagtccgtccagccatgccttatatggcagctcgctcagcatccgttctctctgattcatggttttattcctcctcatctttcattccatttcttcccacagcgcttccagcgccagtctcttcattccctcttcataatcgtgttccagattctcttcaaaaaccagattcatatgaaattttccctccagaagtctctcactgtaagtcctcaactgttcctgcagctcctctgtaaaaaaatctccataatatattaacgtttccggtgccgtcgtaaagccgtagactgctgtcagcagctttagattctccagaacctcctctgcactcccataatcgagactgtcccacgaaaccggtaccggcaggcccgcaagctctccggcacagtgcgaggtcccataataaatctttccctgtatcacaagtccggctcccggcgggtaaattctcggtaggtagattcccgctaccgtggctctttccatctcatcatcgcggcaggccccgtatgtcatggcattaatatcgttctcaaagatgaccggaagatggtagcgttccttataatgagccataaaatctggtccgatgagcgcctcataatcatgaatcgtcaccacatcattcacgacctcccccggaagcccaaaggccagcaggccggtctccgggaaacgcccgatcacatcatcgagaacggattcaaagctttctacccgtatttcgtcaaaatactcctctttgcgccatacacattcaccggtcagattgactacagcaaggtgcatcagatttctgccctcactctgatggccgtacagcagcaccgcataacggtaatccggccggtattgatacagcgcgctggggcgtcctccccccgaaggggccattcccgactgcactgcctcgccggtctttaaaaaatcttccagcagactgttaatagtcactacgctcagcccggtccggtccgccagctcgggtttggtcgcttccccgcactgccgcagaacacggcgaagctgccgtttattcagttccttcatcagctttgcatccgctctcatacatgtctcctctcaggatagttcaaataagcactttataaatatactttataaactttctttattaagttatcacagaaaaagaaatctgtcaatgaaattctgtccattcagactccttttttgtgtctaaccgttccccttcaccggatgtacgaaaatccggttccctcttttccatctgtggctgtcaatctgcagaactttgttgtataatctatataaattactctaaataaatgaatctctatcatttcagtccgtttcatcggacccggaggtgactgccatgtggttctggttatttatgttttgctgcaatctgcttatcccatgcacaatgattgtattcggatggatcatgcgggaacatccgcccaaagatatcaacagcagcttcggataccgcacccggatgtccatgctgaatgaggacacctggaaatttgctcataaaacctgcggaaccttatggcggaaaactggctggattacgctcttcccctccgcccttgtccagtttccgtttctccacagcagtgatgacaccattggcacggttgggctcattctgtgcctccttcagtgcgcggtgctgatcggttccatcttccctgttgaaagagcactgaagcggaccttccatccggacgggacaaggaaataatcaccgtcgtcattcatgcagccgtttaataatcttaaatataatcgttccctccatcacaagcggctgggagtgggcaaaaaacacaattccgtcagccggtgaaagaatcctgctgatcacttcgccttcatagggatcgatgatctccgccagaacatctccccgcgccgcctcttcgccgggccggaaaaacggtttatagattcctgcccggtcggtcctgacgctggccaaatccccttcttcaatcacagtagcgatataaccgctgtgactctggtaacgcaccatccccatcctggtcagaaaacgcagcaccgcggccaccgcccgttttgctgattcttcatcaatcttgtcggtagcgcttgaatacacggaaaacgcattggtctgattcatctgccagttatagttcaatgtcgtcgtatcaaacggactcaccttccttaccaccacataaggcagaccgaacaggtttgcaaggcttgggttctggtagcccgtgtccatcatccgcacgtgcggtacaaaatcgccgggaatatagaaactcgtaaactgaatcccatagtgatactgcctcgccacatcaaagacccccgccgcgatccgtttcgtcgtctccccgcccgaatctcccggatacatccggttaatgtccgtatcatccgtcggccagaaccgtttactgatattcatggaggaaggattgacggagggaatcaccagaatctcattattttttacgattgcgccccgctcttccagttcctttaactttttcacaagctgggaacagatatagagctgctggatttcattgccgcggcaggcgcccacgatacaggccgattgttcgccttttccgaaatgatatccatagatattcatatccgcccggtataaatttttctgggtgtaaatgacttcctttctcattcttcctcacctcccagtacacgggcgatcagagagccgccggaaaccacggggtattcccggagcgtaaagaccatacctgataccggagacgttactgtctcaagcaccgttccatcaagaggatttaaaatctctccgatccgttctcctgccctcaccgtcccctgatgctctgccgatggaatgaagattcccggtgtgttggcatggacaagaccgattgtcctgtggtccgatgtcagcggttccttcggtacaattgtcctgccgtcccagattcccagctgtttcatcaggcacaggattccctctgtcagccgaagtccgtaacttctggtaatcctcattcccacgcccatttccaccaccaccgttggcacaccgccggcatttaagccgtgagccagtgtggattccagtacggtagccgccccgtgaacccagataaagtccgtattcagcagctttgcatagggaagaagccgttccgctgtcccctcactcatgcgcacctgcaggatttcacgaagaaagatgttgctggcatgaatgtccacacagaaatccgcccccgcaatatcccccataatctgtccggccatatgctccgtcaccgcgccctcgtcactccccggaaagatccggttcatatcgatgtcaaatccggggacgcctctggtgatggaatccacccccagcggattcatggccggatagatatccacgattcccttcacatgctccttctgctccttaagaacccggttcagctcatagcagacatactgcccttccagttcatccccgtgtatgccggtcacgatacagattcttttttcattacctgtcatctgctccggctgtattctgtttttatagatcgtaagccgctcatcaatggcgagccctacggatgccacagtctctatcatttgtcctatcacccttttcggaagccgcttgtctcattcgaattcctgttaagaataccgcagtacccgaaaaaggtcaagcaaaaggaggagaaacggcaaccggcttcagcagacctgatgccttgaaaagatggatttagagccccagatccccgctgcagccgccactgccgcaatgactccgaccatgaccgtaagaggaatcataagccccgccgccggaatgccgcccgccgtcatgaccccggaaatactgatgctgttggccgggaacagtatcagtatgcgccttgccgcctcgctcccgggattgataaacatgggcgccagataggtgacagccgccaggataatggatacaaaggaggtcgggcagagaaccgagaacagcagggtaagcccggtcactgtaatggtcgacatcatagccagaaacgctgtcataagcgctgcctcacagcatttaagcggctgccggattcttgaaaataccatcatctcactcagctgaatatccgtatcccagcccgccagcccccgcccgacacagaacatcataaatccgatgagcagaatcacagcttccatcgtgatactgaaacagaatgcggagaaaacctttgccagcacacaccgccttttaccataccgggaggtcagaatcaacgcatccatcccgctggtatattcatctgaaaatacaggcgagacgataattaccaccaggattccggacatcaggacaagatacatcatactgtaaagaaacgattcccaccggctggacatgccgagcaccggcggttcatcaaattccggaaatacctcctgaaccgttttgccgttccacgttccatcccgctccgcaaacagattcgcaaccggatagtacgtgttgttggatacgtcccccgtcgtcatcccgtctgtcctcggaaatgcagccagaatctcctgcaccttctcatcggtcagaggcccggcaaaccggtttgtaatctctgtattgtacgcttcggcctccgcgccgaaaagctgttccccatcctgtgtcaccgcccactcatttccgaagatccaggaccagagcatggtggcatacaggatcgcaaagattcctattgcaatcaatacgagcttctttttaattaattttgaaaattcgaattttattaatcgtttcatcagtcattctcctcctcaaagtagtacaggtataagtcctccagaaccggtttcaccggaacggcatttccggccggacgtttctctgagatgacccgcagaaccgaatactcaccgtcatttctcagatttccaatggtgtatttctcattccagtgttccgcctcaccggccggaaccctgcactcccagacgtatcccgtgatttccttcgtcaccgcctccggttttccctgatggatcagttttcccgatttcatgacaagaatctcattggcaatgtattcgatatcagatacaatgtgggtggacagcagtacaatcttatccttggaaaacgaactgatcaggttccggaaccgcacccgctccttggggtccagccctgcggtcggctcatcgagaaccagaacctccggatcgtttaacatggcctgtgcgatccccagcctctgcttcataccgccggaaaaagtcttgatcttcttgtttttcacctcagacagccccaccagttctaaaagttcccccgttcttgccgcggcagcactctttcccagcccctttaaagccgccatgtacatcataaatttatccgccgtaaattccggataatagccaaactgctgcggcagataccccagcaccatccggtaggcatccccctgttccgagattggccgtccgtcatagaagacttccccggaagtcggtcttaagatatcacagatcatgcgcatcagcgtggtcttccccgccccgttggctcccagaagcccgtacacccccgctttcatggtaaaatccatacgatccactgcaatttttgatccgtactgttttgtcagtctgtctacacgcagttccatacgactgtctcctctctgtccatctgttttaataccccgtatccgctcaccagcagaagaacgaatcccgcggttccgattgccgctgccgcccccgaagatactgcagacggcagatccggaagatactgcttaagcataagcattcctcccgccatacagatccccgccgcagtcagaacatacccgctgcagtgacgcttcagcacgcgaaacagccacagataaaccgcattggacagtaagaacggcaccagaacagccagaacagcccctgaaaggccgcttcccctgtttcccacagccgccatcagaaaaatcaggaacactccgtccacgattcccatgaccgccatttttgcagccatcagctttcttaaatgaaagcagcagctctgttccagctcccacattccaaggctgaagctctttgtcagttccggcacacagatcactcccagaaacggaatcatggccgatacattccagagataccactcctcgttctgcccgttcgagattccaatagccagaagcagaaaaaccgcctgtaacatccacaccgacggcgcgataaactgcgccagccgccacatatggcgccacatgctccgatccggcgccaaacgttttttatccgcctcttcctttaagagaacccacagcttctgttcctgaagtgccgtcatatccggcgcttcatactgtctcatcatacttctcaaccgtttctcctcttcggaagcttcaaatttctctttcatatccgcagatcaccttcctttcccaggaactgcttcatcttttccattccctgccttaatctggatttcactgtggggatccccactcctacgactgcagcgatctctttaaacttcatgtcgtagtagaatctcaggatgatcacatccttctgcatctcgggcagccggtctaaagcggcctgtatactgtttctcatctccgcacggcggtatccttcttcttccctctgttccccatccagagctcccgtttccatggttacgtgcttcctgctgcgaaagtagtcattgcacacatttcgtgcaattccaaatatccaggcacgaaagtgatcgcgttccgcataaccgtccagaaaccggatcacatggaggaatgtatcctgggtgcagtcaaaggcgctctccgcatctcctgttttataaaagcagaaatggtaaatctcctgatagtacttcttcgccagtggttcaaacagttccttttctccctgcttaatcctcctgaccatctctttctcattcactccctgtcaccgcctcccttctgctctctgtccggccgcttccggcagtgttttaattacatataatataacggggaaaacttaagaaaagatttataaaaataaaaagtttaaggtgaaaacgccataacattttcaccttaaactttttatcagcaatgaaacaccgcctggttttaagcaggcctccgtcttctgaaacagtggattcatatcctcaaaccatgtaatcgcctcgattgtaaacatgataaaatcgaagctgttgtgatacatttcatcaatatccagaataatgcacgcgacaaactgcatgagagacaggatctcccgcccgttattacagcaaaactgtgcggctttcttgcctttaaaatccatggaacgcagttcctcagccatatcgttacaaaaaccgggagttcttggttcctcagacgcttatcattctctatatgatccatttttattccgtatcctggtaaggcttcagatatcttaaaacctcatccaaaaacaactcctgaggctgtcccagtgattcctcccgatacaccagcaaatacttcagttcatagcgctggttcatctcaatcggatacagcggagtaccgaataaaggattcgtcatttccagcgaaactcgcggaaccaattggatacaatttctcttgatcgtatacaggcgggaaactccaacatcgcccaggcaggtaatagattttgtatagccctgcttcctcatctcacaaaacagggaccagtagactaagtcctccgcccggacaaaaccggtggcgatctcatagggcatcatatcctcaagcgtcacctctgtcctcccatataaaggatgctgtggactcacacccacgactaaatgagactttaatatatccgagctagtcaactgagcatactccaccttggcccgtacatatttttcattaaactgattgatctgaaaaatccccaaatccaggctgccatcggaaagttcactcaaaatctgcctctggttacccccttttaatgccacggaaatctccggataccggtcctttaaattaacagctgtattacccagaatattcatacaacagtatccatccccaccaacagttacatttccccgaactgctccggagattctttcccgaaccgccttaatatcctccatacgctgacagatgatttttgcattttcaagaatatactgaccctcagcagtaatatggacgccttttgtcccccgccgcagtacttccactccaagctctgtttccagagtcttaatagatgtactgatagaagactgtgatgtatataactcccgggctgcacgggaaatagatccgtatttttctactgcaatcaaatattccagttgtgtcagctgcataaaacgccccccgtgatggttctgaatacaatcatatactacattatatcaaattctgtttctgttttacaactacaatatccctgaaatattttcaagtgagaatgctgcagttacggtttattcactgtctgtaagcaccccacggcatcattccccatccactcccaggtacgccctgactgacggtactctatcccggtcagcctgctggccagggtgagcaatgccttggccgccggtacctccacatcgaatttttctgccaaagaaaccagcaatgcaacaccgcaggcggcatcctcagtgacatagcgatgccacagcccgtccggtcctgacagcttcttaaaagcctccatttccggatagtctgccgatgccttcagcatggtcataaatggccgcagcggcgcagcgtaacactctgcccccataactttgagtacctcgctccgctccgcttccagaatctccaggcatcgaatatacccatcactgataccgtctgtaaaaagtgcaaaatccccttttttctgttcgattccacccagattcaacagtgtaccggacagatgcgtaagtacattaggcgagtttaaacagttctccaccagactggctcccgcctttaaggagaacagcttcccgaaacgctccagtgccctgcctgtctctgttgatggaaatgccgcgatccgccgctgccccggcggcatggcagatacatagctgcccggccccagacgccgacaggcccaaagacactccgctaactcagccagcaggccgtaagtcacccctttttccttaaatttccggtgaaatatcaccgttcctaaattacctggcataagaaggaggtcatgatcggggcgtacccatggagccatccaagcggcggcttcctcctgacgtccactggacacacataccaaaaccagccgggcctccatggcctcagcaatttcataagtcatcctgtcaggacagagccccgaaatcaggccgggacccttcactacaatgcctttcctggcaataactgcaaagtcttctctacactgttccttactgtcacataaaattactttatgaccctttccagtaagccaggcggctgtaatgactccagctgcccccgctcccacaattgcaattcgttcatccatacctgccttttcctgtcgcctctgctttcccctcatgatttactgactctgacgttcctcgaagttcataagaggaaatatcctgcgtttttcaaagagaagcctgcataaatcccgatcactgccaaccatggcatacaatgcggttttaccgataatctcaatagaatcatctatcgtggcccccaaaaccccctggttattggcgattctcacttgactaagcgccagatctgaacactccagtgctatccctgttcccgaggagatacgcaaagcacaagccagctttgccccgtcacacaccacgccgaatacattcggaatggtattctgcatagcggcagctacctgttcataagtccctcccctcataagtgtggcacctgcggcaattcccaaagccgcggcaacctcacaggagcacatcgaaggcgctttgccaatgcggtgaataatggatatggctgtcaaataactgagggcaatccctctcagcaaatccatctcttccagatttaaatccttcgccatgctgaccagcggcatagaagcagcaatccccacattacccttattgccgcaggtcatggccggatggctgacgcctgacatacgagcctcgcatccggcagccgcatatgccttggctctggtaatgtagttctgataatcactgtggtaaagttcatatccaatccctgcacccagacggttttcaagcgtagcgttggccaggcggctgttgtaagccactgcatctcttaagaatgccagttcgtcctcgcttaaggaagtaaccatatcgtagaaatctttcactttatacttcagaatcggcagcttgccagactgagctgagatatcgggttccagttccagcaaaatttcgtcgttacgctcttttaaaatcagtccgtcactgcgctgagataccaccgcccgtcctgttcctttatccgtatgaacggcaatgtcgcagtaaatctccagttcctgtaagttccactgtggattgatcttcacacattcagccacttttcgtgcttttctttctccctccggcgttacagtgtggagtacctcaagtccggcaccaggatctccgcacaccgccccaagagcaatagccatctcgactcccagcatccgggatccgggaaatgcgacatcgtcattctttgcgctcatgcaccagtcaagtgtggcatcaatagacttgatctcacctccaatcgcgtcataagcctgcgctgcgcagaagcagattgcaatcggaccggtacagcccagagcaggcttgatttcttcccgtaaaatactataaagttccgtgtcattcatttttaagccctccctaaagcttctgcatttctgtgtaatccttaccattcattttctttatagtcatagacagagaattccacaaaggatttgtataaggatagtccacacgtttatgcagtcctctgctctctttcctggccagcgcagacaacaggatcagacggccaagagccagaatatcgaacgcctctaaggtacgcatcagttcatgtgagtttgcacatttgattcgcttgcaggcaatctgattcagttcctccagataactgacgccacaggaaagaagtgtctcggaacgcggtgtttcaatgctcgcataatccctcataatattctgtacggcatggtttaactcttcccagtgagatccctcttcccgttccatcagtgaactgtaaaatctctgagcctccaaaacctccggggcttctgcaatgtctgtgaagctttccacacctttgatgtactccgatgcactctcacctgcaatccggcctgtaactgccgctccgctgacgccacagaaaaagttgccgcattcatcacctgcgctgtatagacccggcgtactggtttcacatttttcattgatacaggtaccactgtactgaatatgaggcagataacgcccccactcaatcatatcctcttccaaatgaatatcctgctgttccatcgcatccaaaagagagctgatcccctcactgtaaaagcattctttcatatgctccatggtatccttcggattttctgtacagtccataaagacagggccggttccattttttttgctcagatcaaagacttcatgacaaatatctgtggtaatatcctgttcgcccggttctggacggccggctattcccaccgcattccccccggcatcgcagcaggctccaatccaggttcccttaccgccgcggacaaagtagcgcggtcctatatgagccctgggcttatcaaaattaaccatgaccgcaccgatctcataggaggctacccttccggttcctgtccccgccggacaattcgccacgttaaacaggcaggatggagcgacagccgggtatacacgcgcccccgtaccggtaacactaataatactctttgcctcatacagcgttatctccggttcgggcctggaaatatctatagcaattgcccccaccacgcgcccctcacgagagatatacctggtgacactggtccggttgtcgatcatgacaccgcaccggcgcgcctggtttgtcagacactttttctgatcacggccgtcaattttcaggaagcagcggggatggcccggcaaagtgtgtccttcaaatacatactcatcaccaaatgggcgcatattgatgccccatttttcccagtccttcacaatctcaaaggaacgctctgcaaatacccgttgaaccctgggatcagcacctttacacattccctgctccaattcgtgcatataagaatccacactctcgtggtatcccggaatataacacgcgaaatggtcattcccggttgcgcctccgccactgcggcgagtatctgccttctctgccacaatcactctggcacctcgttcagcggccgcaacagccgccatcaggccggcggttcctccgccgacaatcaggatatcacactgttttggtgaattaaccttaatcatttctggcaccttctttctcaatcttgctcttgggtcttcgcagcagcatcatgggaagcggataatgcatggagattgctccaaccggacagtcgaattcacaggcacggcagtgccagcattcgttgggataaagaacctccggcttctgtcccttaatcaccggaccgtaaacatccagcggacatatctgggcacaggtagtacaactgatacattttgatttgtcaataacaggcggcatatttattactcctttccaaaaatgttcttgattacaggccaaagattccggctactacggaaataaccatccaggcgctgatacaggccattggaccaattttccacagtcttctggttccaatccactcatttccgttgattaaagccgcagtggaagaaccacttgggaataatactgaaatatggacacacatgataaccgtaactacggcaccggtaggattcattcccacactctgcgtagcagcaaaaacggcagccatcaaaatcattcctaccggaccattcgtcatcacattggtaatgagtgttgcggccaggccgataagcagaacaaatacaaaggctgaagtattcgtagcgagcggattgataatcgccttcagcgcggccggaaaaccgcttgcttcattgctcatggcattcgctaccggtattgccgccgccagaagtaaaatggaattccactccacattacctaccatctttttgaaatcaatgatgggaactccttctatacgaattagacacatcagcagaaccagaagaatacatattcctgtgctgccgatttttttcaaaaacacaatggcaaagaatgatgaacccgggaaaaatcctggcagcagcatcataaacatcagcagaaccaaaaagaacagaaccaccttctgtaccctattcattttaattccctcattacccaccagtgatttagcatctaaatctcttaaactgctcatatccggcttaaaaatcagctttgcccccagaagatagacgatgatacacagcactgttgccagtatcacgatcagcatgtacggccccagcggaattgagcggcctgccagactctcatatactcccatcaccagaagcggaattgatttaaaaggtataatgcagtctccgatctgagcagcaaatgcagtaccaaaaatcaggatcaacggataactgtctcctttttggaatccacactgttcactgataacataagccagactccagccgataacgatggtaggagtcgcactggtaacaccccccagaaatgccataaccatcagaaacacaaacgtgaatacccaggggcgtcccaataccattttccgtgtaatactccatacggcaatgatccgtgaaagcccgtagtatgcaaaagttccgcaaaaaataaagataaagaacattaatactacattggcctccccaaaactggacttgatgacttcgcctgcagtcatatacccggtctgcatcaaggcaataagaccagccagacttggccaggcaattccgacaaatatccatccatacaccatcccaaggaaaatccccagaatctgcattcccaaaaccgtgattggagctatgggcggcaaataaccgaatccaaacataataatcaggcaaattgcagaattaatatagtattttacgttcccatctttctttgttgctgttaaatcagcagccatctcttattcctcctccttcattaaaataatgtttaccgctggccgcacaaccaagcagtaaccggcatatcctcctctatcccccttttcccccttctttcttttatacaaaaagtctaacactcctttaaacaaatgaaaagaatcgaattttgataggaatccatcaaaaaaacagatagcataattcgcttttacctgcacttgaatgaaaaaagcggcgtttcttcctccccgccacgagaagcagtaaacgccgctgtaattctatacctttttgctgcaaatctacaaacctgaaagcctgtctgtctctgtactgtaatattttatttcaattttaaactctctccatctctgatttttctctttttctgccgtttaccgcataactcacctcatggtacagcagacaaattccaatcgtaaccgccatatccggcagcgtatttcccactggtgtatccacatgcatcagaatccggtagagaacaaatccgcatatccagataattaaattcggtacatgaaactttgtacttctgaaatcatttttaagaataaatgtatcagcaatctgaatcgcaatcatcggtgcaaaaacggaaccgataagataaaggaaaccggtaatattgtccatgggatagacaacggccgcgatcgtaccaatcaccgtaaccgcgatggccgcccatttctccttcactgcatgggaaatgaccgtgctggatacaccggcggaaaacgcgtccagaaatgtagtcgtaacggtggataggacaatgataaacagaccggcgattcccagtcccgccttaaccataatgaccgcgatatcgtatgtccctgtaaacagtgccgctcccatgccgatcacatacataaagcagctgaccacaccgtagaccagagtgctcgccagcgttgcctggaacggtttttccgcctcccgcgtataatcgctgattaatggaagccaggacagcggcatggccacagacagctccaccgcggcgccaaagctcatgctctcatcagatacaaagctgcttcctccgtggctggagaatattaccctgccaagtatcagagtcagaagaaacaaaagcgccatcgccaccgtgttgagtctgcccagatttttaagtccaatgagaatccagacaataatcagtgctccaatcacaagacaccacacccaggcgccggtattgtatatgctgttcgccgccagtgcaccgtcatagatcatgattgcggtccagcccacaagctgcaggacatttaacacggcaaacaggagacagcccttgccgccgaagctgagttttaccgtctccatcgcgctcagccgtttcattcctccgataaggcctgcaaaaaacagcatggcgcagccaataaagtgtcccagtaaaatggccgccagccccttttcaaatcccagcggtgccaggtacgttccggtcaggatctctgcgatcgaaacaccggctccaaaccagatcagaccgttgcttaaggtactcgttcctttatttttcatcaccggtacctccacaggctgttctcacgccatttacgcctgactttccggcacattcccatcctgacatttcttcgctctctccgtactctcctgcaatggcgaacgcatgattcatgggtccgcttcccttacccagatccagcatatcaccgagcgcgccggataaatacgctttcgccctgcccaccgactccgcaagactgcgcccctttgccagatttgaagcaatagcgctggacagcgtacagccggtgccatgggtattggcagttgcaatccgtttcccgtagaaccagagatattcaccatccgcgtataaaagatcattggcatcgttcaactgatggccgcctttacagagaacggcacagtgatacgcatctcctgtttccttcgcggcccgttccatatcctgtgccgactgaatcgccataccggataacacttccatctccggaatattgggtgtgatgacatctgccagcggaatcaacatctctttcagtgtagatatggcttcatcgctgatcagcttcgagccggccgtcgctaccatgacggggtcgagaacaatgtttttcgcatggtactgcttcagtttttctgctatcaccctgatcagagcactggacgacaccataccgatcttcaccgcatccgggaaaatatccgtaaaaacatcgtcaagctgctccgccaaaaattccggagttacctccatgatacctgttacgccggtagtattctgggctacgacggccgtgattgcgctcatcccgtagactctgtgggcagtcattgtctttaaatctgcctgaattccggcgcctccgctgggatctgtcccggcgattgttaatgctgttttcatctttctttctcctgttcgcattaatttttctgtaacgttaaccaagagcatgcacagctggatcgttacacttttgttaagcgacagaaggtggtgcccccaatctgccgctggtctgcaggcggcgctgtcccgatctgttaacagccggccgccgccttactctatttcattttcatttgccgcctccggaagcaatccggaaaaaggcgggaaaatcattgaaatccgttaaataataatctgaaatccgttttaactcttcctggtctctttcactggcttcatcgtagacgcctgcgaccggaaaccctgccgttttcgcggttgccgccgcatacagggcatcctcaaacacccatgtacgaattttctccgtaccgagacaggacagcgccgcgtaatagatatccggccggtccttgcccgccccggtctccgtacaggtaaatatctgcttaaaaaacggtttaaggccgcatcgggaaagcgccgcctccacctccgtccggctgctggaggtcgcggccgccatctgaaagccgtgggtttccaaccgggttagaaactcctttactcccggttttggaagaacctcctcccggtaataacggcttacggttttctccacgccctttacaatctccgcttcggtctgatccagaccatactgttctctcatgtaatttgcggcctgctccatactcatgggcagtaaaattctccccagtcccggttcggcttttctgcctgagtgttccagataccactctcccgcatgatcccacatagacatggaatccaggagcgttccgtctatatcaaagatggctccctccacattttcttcctttctgacggcgcttttatcagcctgctcttcttctcagaccgcttttcttctcagaccgcttttcttctcagaccgtttctcttctcagtccgcttctttttccgcatcggctgtttcggcagcggcgcgttttaattttctggctgctgcctcgatatctgcctctgcaaaaatggcgctcacgactgccacaccacagatgccgcttcctgcgagatgtttcatattatctgctgtaattcctccgattgccacaaccggaatctgtaccgccccacagatggccttcagtgtctggaagctcacatcgctggcatcctttttcgttcccgtgtgaaacacggctcctactcccagatagtcggctccctgcttttccgccagaagcgcctgctccaccgtctgcgcagatacgccgataatcttgttttttccaagcctcctgcggacatcacctgcttccatgtcactctggcccacatggacaccatccgcatccacggccaccgcgaccgctgtactgtcgttgatgataaaaggcacaccgtatcgcccgcacaattcttttatggactgtgcctcggcgataaaagcctcctccgtcatttctttctctctcagctgaatcatcgtggcgcctcccttcagcgcccgctccacctggctgtacagagtctcttccccaagccagctcctgtctgtcactgcatataacagcaggctttttttatctaatttcatagcgtgcccccttctccagagtatcaccatccatttggcaaactgcgtcgatgatacggttcctgtacgtagcattgccctcgaagctttccaaatggctccagccaatctcacccgccagtcccatggcgcagacagctgcggccgcggcctccagcaggttgtccggattcgctgccagataagcggtcataagcccggacagctgacagccggttccggtgatctgccccatttccggccgtccgttgcgaatcacaaaggctctgcttccatccgataccaggtcaatcgcaccggtaacggcaatgatgcagccaaggcccgcagccatctccttcacaaacgtaatggcagaggaaagcgtttcctccgtgacagcgtcagccgcatcggcatcgacgccctttgttctgccaaaaccccgggccagcgtcttaatttcggaaatatttccgcgaattacatcgaaccgaacttctttcatcaggtttagtgcagtctcagtacgaaaggtacccgcaccggcaccgactggatcaagcagtacttgatgtcccagctcgttggcttttttccccgccagaagcatggacggaacggtgttttgattcagtgttccgatattaatgtttaaaccgctgcagattgtggtgatgtcctccacatcatttctgtcatcggccataatcgggctggctccgcaggccagcagaatgttggccacgtcgttaaccgtgacgtaattcgtgatgttgtgtaccagcggcgctttctttctgacattttccagacattcctttaacatgatatcctcctttttgtggtaaggatttaaaagcataagaatccggcaggccggataaattttgttccgcaaaacttgcgttttaagaaacaaaaaaagctgcaatgaggccccacaggtatcattgcagcataaaaacacatgcttttctatgttccctacgttggcattatccaaatcaggttaatgggttaaggcagtacagcctactctcagcccgctttgcgcgagcaccccgttttcgattacaaaatttattatactacggatgagaaaaaattcaagtatctatttcatacattcagcaatacaagcgcagccagaatcacaccgcacccaaacgcctggtgcttcgtcatccggtcctttaaaaacagtatgcttacaacacagaccaccagcacggcgccgacgctgtagcacggatataccacataggcaggcagcttcgtcaccgcctttaacagcagaaggctggaaagatagttcggcacccccaccgtaattccgctgagaagctccgccgcctgcagtttcttcttttcccgtttaagttctgcggcgaaaagggatgaacttaagaacagagcggttataaacgtataaaacagaaaaagaccgtcataacgccgttctccaatatgttcaaatacctttgccataccatctccaatcccgtaaaaaaggagaagtaaaagaagccctgttttaaatgaggcttttgcctctcctttctcaaagtggatcagtaaaatcgcagccagtactaaaagcatccccaccatctgaagcgccgtcggccgctctcccagaaaaagaatcgaagctcctacaggaatcaaaagccccagttttgaaaatgtggttgccagcactgcgccatttttccggatattcaactgaaacaacagcaaatccgccagaaaaataaatccgttgaataccccggcagccatagctgtccacatggctccgcttacgggtaataccgttttttctgacagggaaagccaggccatcagcacacaggttaaataatttcccacaagaagcccgtatcggctgctgtttggccgccccgacagacgcagcgcaatcgccatggaagcactgcagagcagggcgagtatcagttctatcattttactgttctcccttttcgtatgatcttttgtaaatgcagcaattgagcggctttaaatttaccgacttcatggccataaaacaatcataaatctatgttatttcaacaaaatcctgtcacatatcttctatcatactaaattatatcgtgaagtcaagctggtttcctaattatatccggttcaaacatatccccatatcatgttaaagaagggatcatacactctaatccgggcagtcctgactattctgccagtgctaatcagtttccagcaataggattcttcttttatatatccttaaaaaaaggaatatgctgattagaatagagcatacttccgaaatcggccagcaaaaccagataagagccatatctccaaactgagtcagaaaataagccagcggaatcctgatcaccaactgcctggacgtagttacgatcaggctgtaatggccattgccaagcccctgaaacaacgaactgcaaatcacagaaaccggggaaagcagaaaagtaaatccaacaatgcgaaaaatcggaatacctacccgcagcatctcccgcgtaggctgaaaaggtgacatcaaggcttccggaaagaaaacaaaacaggatgaagccaaggccataataaaacagccatagatcagtccccatttcacagaagccattatcctctttttattttttgctccataattataggctgcaatagaaaccatactgctgtttataccgatcattggggtctggacaaaatgctgaaggcggttgtaaatcccaaataccgccaccgccgtcgtagaatacgctgccacaagacggttcatcaggaacgacataagagaagtgacagaggccatgactgtcgtaggaattcctacgcgaaaaacagcagccatcatatggcgatccggacgaaaccgtttcagagaaaaggacagttctgtattttttcttaagtttaaccagacagccagacccatggcaatccactggccgcataccgtagccagcgcggcaccccggatccccatagcaggaaatccaaacatgccgaaaataaacactgcatccagaagtatattaattgcagccccagttccctgagttaccatcgtacatgtattcttacccgtagcctgtaacagacattcaaacgtaacttccccgaagattccgaaggaacctatcatacaaagctgcaaatactgcactccataaaaaatgatttccctattatccgtctgcagcagaaaatacgcttcggtaaaaaataagccaaaaatcagaaaaataagcatacagaaaaattcaatcaaaatcccgtttaaagctgctgcagaagcctgatcccggtccttttttccaagacaggaagttaccagcgcattaattcctactcccaggcccgctgcagtagaactcatcaggttttgtgcggtaactgccagagaaatagcggccagagcattttcacccaagcgtgatataaaaaggctgtcaataatattgtacatagcctgtaccattaatgagacggtaagcggacacgccatattgaacagcaaatatggtattttcatagttcccattttattttctttgtttccagaagctggtttcataaaatcccctcattcccatatcagtcagcctgtaatcgtttcgatcttatttacataaaacaacgtcagagtgcctctttttttgtcccgtcaaaaaacagaacagtgccataacaagataggcgttaacgcagacaacaaaattaaagcggccgttctcatagccaaacatacctgcaatggcagtcataataaacttggaaagaaagctgcccaggcttccgaaaacattcagaaaagaggctgcattgcttcgggcataacctggtatctccagtccgacaaatacctgaagagcaggcatattcacgccaaacccaattccaaccagcattgctcccacccccataataacagcattagagctcaaagccatcagcagataaccggccgacaggaataggtatgcacctcccaaagcacgtatctcccatttgttaataaatttataaagccagccgccggctactcctgacagggtaaccagagataatattactgcagctgtcatggaacttccaaatccgctcttcatcactacatcagaagtttctgtaacgcagacatagaacaatatcatatgaacaaagtaaagattacaccatttcaatatagggcgaaacatggaaagcggaatttttttatttttttcctcatcggtaagggcaggaggctccggcatgaatcttataactatcaacaatgccggaaataccacaacatagatcaaaaaggttgcctgccagccccatctggcacacgctacaccgcccatcatctggaacattacagctccaatattagtaaaaacagcatttaagctggcttgctgatgcacctcagccccgcggaaaacagacatcatgacaggcatgattaatggagtcagaatacccgttccacagccaaacagcgctctccacaaaagaagcagataaaaattatgagtaaaaaacggagcaacgccactgatcagattacaagtcagaccacagactgtcaacacacggtatgacactttttttccggctatctgcccgcagaacagggtcatgggaatcgccaaaagtgaggggatggtggtaagaagtgaaatcatggtggaagggatatccggataagcttctcccacactggccagtaccggacttaccgcactggaagccagcgtcaaaaaggagagtgccacaagggtataggacgttgcttttttattttgtatcatagaatctcctctgtatattccagtccttaaaaatggcccgaaacgctgaacatgcagcattcgggccctactatcagttctttttagaaagatggcatgctaccagatggcctccccctgcatccttaagggaaggaacctctgtcctgcaggcatccgttgcataagcacaccggggatggaacggacaaccagaaggtgcatgaatcgggctcggaacctctccctccagaagaatgcggtttcttttcttctcctcataataatccgttatcggaaccgcggaaagcagtgccttcgtatagggatggatcggattggtatagatttccgctgcatccataatctcaacaatatgtcccagatacatgactccgattacatcggcaatatgacgcaccactgccagatcgtgagcaataaatacataggtaagcccaagacgctcctgaagcgattgaaacaaattgatgacctgggcctgtatggatacatccagggcagagaccggttcgtcgcaaacaatcagttccggattacaggccagagctcttgcaatcccaagtcgctgcctttgaccaccgctcatttcatgtggataccggtctcccatttccggtaataattccacggtctccaacagttccttcactctggcggccacggcggcctccgtatatttttccctgccggtaaccacggcctctttaataatcgagtatgcagactgacggggatccagagaaccatagggatcctggaaaatcagctgaatctccctgcgaatcgatttaatctcatcttttgatgctctgctgagatccattcccttatagtaaatatgaccctctgtcggtgtattgatccgcagaatacattttcctgtagttgtctttccacatcctgattcccctaccagaccgaaggttttccctttttccacttcaaaagaaacatcatctactgccttcacgcaggaagttgtctttccaaagacagatttggcagcggggaaatacatttttaaattttctacttttaacagtgtttctttttcaggcacttgttttcccccctctcacatccagatggcaggccataaaatgaccgttcccgtcaatgggccgaagttcaggtgctgctgcatttctgcacttatcgcacgcatatggacatcttgggtagaaggaacagtattccgggatgtttgccaggttaggcggagcaccctcaattggaattaacttctcattccgattgtcaaccagtttgggtacggaagccaggagtccaagagtatagggatgtctcgggttggtcaaaagagcttctgtagtacctgactccacaatgcgcccggcatacatgacataaatacgatccgcgtaacgggttaccagccccagattatgcgtgactactatgatggaagtccccttctcttccacaagagagaggagaagctccataacctgagcctgcgttgttacatccaaagctgtggtcggctcatccgctataatcagcttggaattacatgccacagaaatggcaatcatggccctctggcgcatccctccactcatttcaaacggatagtttttcatgcgtgcttccgggtctggaatgcctactgcagccagagcttcaacgcctctcttccatgcctcctgtttactcatattcttatgatgcgcccgaaggacctctgtcagctggtttccaattgtataaaccggatttaagctggtcataggctcctgaaatatcatggaaataccatttccgcggatattgcacatctgctttttggaataggttaacagattctcaccttcaaaccagacctcgcctccaagaatttttcccggaggagactgtataagctgcagaacagacagctgagttacagactttccacttccagactcaccaaccaccgcgacaacttctctttcatttacatgaaagcttacatcattaactgattttacctcccctgcctccgtaaaaaaggaggtacgaagatttttcacatctaataatacttttttctcttccattatattttccccctcagtcttggatccagggcatcacggagtgcatcacctacgacgttaaaggcaatcaccaccagcataatacagataccgggaagaatcgctaccagcggctgattaaacagatacttataaccttccgaaaccataaccccccaggcaggtgtaggaggaataatgcccacgcctaagtaactgagagtagattccagcatgatggccgttcctacgttcatggtaaaggtaacaatcagggaagccagacaattgggtaacagatgtcggaacataattacaagcggcttctgtccgatcagattggaagctgtaacgtaatcattttccctcaggctgattaccagaccatttaccatacggatgtaactgggaatgatcgaaactccaatgacaacgctgatacctatcaggtttcctgttaccatggctgaaagtaccatcgtaaatataatagggggtatggcaatcattgcatccgtaatccgcatcacaagtgtattgagccatccgcctacgtaaccggcaatcagaccgatcgaggttcccagtatagccgcccatatactggacagcaggcctgtaatcagagatactctggcaccatacaaaagtcttgtcaaagtatcccgtccaatattatcgcagccaagtaaatgctcaccgctgggtccggccaaaatatagcgaagattctgttcataaggagtataccgggttaaaaccggtgcaaaaacagcaataaatacaaacgctgtgatgataccgaaacacagcttagtcacccagccccggctgaagaatatccggaagaagcgtttcatgccaactgcacgttttgaatttttctttgacatacggctcacctccaggacttacggatacgcgggtccacgaatccatatagtaaatcaatcaaaaagttaaccagaactgtaaacacggaaatcacaaatacacagccctgtaccaccatatagtctctgccgttaatcgcacttacaattaaagtaccaataccagcaatattgaacacctgctctaccatcagggaaccgcctactacgacgcgtacctgcaggcctatggtagtaataacaggaattaatgcatttttaagcgcatgcttgtaaataacacttttttcagccagcccattggcacgtgccgtacggatataatcctggttcacgacctccagcatatttgaccgtgtctgccgtgcgaccgatgccagaagactaaatgaaaggatcagaatcggcatgactccatagtagatgtattgaccgaaattttcacctggcgatacatatccggacagcggcagccagcccagcttcatgccgaaaatatagattcccacgataccaagccagaactgtggcgccccgagtcctatggtactgacaaatgtaatcaggttatcaataaattttccacgccgtatggcactgataataccacacaggatccccaggatactggaaagaatcaaagcgggcagacctatggatatggtacggggcagtctttcagccagacaggttaataccggacggctgtaagtaatagaatcgcctaaatctccgcggagtgtatctgtaatccagatgaaatactgttccactatgggacgatccagatagtatttctcgcggaaggttgcaatatcctgttctgatgcttccgagccgagagccagaacagccggatctccgggaagcatatgaaccaatgtaaaagaaattacagagaccaaaaatatgactgcaacagatattcctaatctctttaaaatatatcgacccataataatcaccaccttttcctgcacaaaacagggcatacgtcacatctcaggctggtaacgcatgcccattttctaatagtaaaaattattcagcctctttccacagttcattccatgtagcgacatactgctgaactgctccgtaatcaccatgaagtttcggactggtcactgcagtagaataggttattgatacagtataaagctctacattatcctggaacagaatcttgaccgcttcctttaagtttttgcttaaagtttcctgatcagatacaattgcttcattaataaggcttaccgatttgtcatcatgcaggaatgtagctccgccgaatctggcgcctggaatcatattggctgcaacctgggagaactgaccatttcccagacccatgggatggaataaaatgccgtcccattctccaagatagtttgcataattggcaacttcaatctgatttaatgttacagttatgccgacctgttgaagttccgcctgaataatctggcagacactctttgcaaaatcccctacctggaaattaattgtcagttcaaaaccattatcatatcctgcttctttcagaagagccttagccttttccacatcgtatccatagcctgtaacttcactgttatattctgctgaactggaaacggcccactgggtagatgctgttccataagcaccgttccccaggagagattcgcagattgcatctgaatctacagcatatgcaatcgcctgacgtacacgcagatcctttaacggaccatctgcctggctgttaaagcaaagagtgtaaccagtagaaggaatagcggcattggtcagtgaatatcccttagcctttaatgcatcagctgtgatcgcatcacctgacagattcataatatcgagatctcctacttccagggccgcctgctgcgtcgctgtggaagcataaatcttaaagttgacaccgtctaagtaaggtgttccacgccaatatccatcatatctttctgtatagatgccttcgccatgcacccatttcgtcaccttaaatgcaccggttccgacaggtgtctcgttaaacccatctaccccaagggattccactgcagaagggctgcagatatagcaggtacgggcaagaccgtaatcaaacagtgcatcccattttgacatatgtactacaactgttttttcgtcaaccacttcaacactgtccacataattaaagtaagatcctgtcaaaacaccattttccttatagtaatccagattccactttatcgcttccgcatccagcggagtcccatcctggaaggtaattccatcctttactactattgtgtaggtcagtgcctccggatctccttcaaaggattctaccagatatggctgcggtttaccggtttcgtcatattgcagcaaagtttcatatatggcaggtgccagaacggattcattcgagttgcgcagcatccagccctgcagggtagtcggatcatctgtaataggaatattaaccgttcctccagaaacaggttcaccgctttctgcagcaggggccgcagtactttcctccccagcttccttacttgtggtaacctcactttcattcgccttgctctcaccagccatcgtctcactggcacttttgcttccgcatgctgccaaagacatgctcatggtaactgccaacaccactgcaatcaattttttcattttgcttcctccctcgtattattatctgatactataattgatgtacccagtacaattttcttacattctgcgcatggaaataatctttttttgctcgtcatctgtcaggcctcccatggcgtgtccggtgctgtatactacgtttttttctcttaaatcctccatgccgtatttaatcatgccgtacaacgcggctttttcaaacacatgcatggtcaccagattgaaatccagctttttaatatcttccagttcaacacacggcttaccatttaccacaataacgtcaggccacattttccagcccaaatccttttgtgcaaccctggttcccatggccaggtcattcattccgccacatacggtagtcataggtgctcccagtttcttagcaaggacacagcgggtaatcgcctcatccatcccataggatggtcccgattctgtacgggcgatacacacacagccagtcccttcacaggcagctactgcggctttgattttagacagccagtgatcccttctgatggtcttgtaggaaggatccaataaagcaggatttacttcgtccggattggcattgtaatactccatacgctcaaaaccacgatggcctgtactgtcatctaatgtaaagcctgcggcgcccgcacgaatcagcctttttacattccggtaaataactgccggactttctccatagccatcatcaaaatccaccagtaatggtatatcagtacaattggtgatcgcttccacaattgtgataacctcatccaaagtcccaaaagccatatcgggctggccatccatactgtatgcaatggctccgccgcttaacatcatacatggatatccgcttctctctgcagccatggcagtcatacagtcatatacacagggagcaaatacctgctctcctttttcaaaaagctccattccggttattttctttttcatttcttcacctcctggaacgcttcttttcccagctcacttaaatcttcaaattttttctcgagaggcatccattttttccagtaactgaatatataatgatagtctctcaaatttccttcctcatccagcagataaccatcaaaatcatgtagatcggcatatacggtattcttattagcccagtttttggttccaaaatctatatcgccgaaccatgaggctttttccataaacgtgatgaaaaccagtccatacccaagttccatcagtgtctctgccgacacctccgggcttccatcttttacagttaaatcactccaaagcttagaaccggcaatcgccccggcaaactctctggcatcgtcctccgtatgcatacacacggctcctaccatctgtgcccctgcagcctgcgccgctttgcacctggcaatggcatctgcctgatctgcagcgtagctgcgggccagcaccatgcaatccgtattagaagcagcctctacagcaatggcaacttttctggcaaatacctcaggacttaccaaagtaatctcaggggaatcgcttccgcagccaaaagtgcggtcatccaacagcatggccgctgctcctgcctttacaatacgttccaaatcatagggcatgatacgaaggttatcactgaaaccgctgcgtacctcaacaatcagaggaatactgcagttgtcttctacaaaacgagtcagggaccacaccatttctgatgtgcttaaggtaccctcatccggcgtcccatgtacggtatgagttaatgccgatgcactgagcaaagcgcccttacagcccatatactctgctgcccgggtggaaattccatcaaatgtatccggagcaatcagttgaccttcagccaaaactgactgcagtgtaggaatattcatttttatcctcctcctgtatctttactgaaacaaaataagcgcaatcacttccagcggttcttcccccaccgcctccagaccgtgtccttctcctgcgccggtaaatgtcacatctcccggcttcacggtctggatcgtaccgttgtcattaaaccgtcctgttccttttaaaatatagtaggtctctgactccttctcgtggacatgatagccaattcctgatccaggcattaccgtggtatgcccgaagaagcggcccttattgtacatttcctccggcaccttcagcagctccttacaggaaatggttcccggtccgttaaacgggctgggcttgtgttctgtcactaattcttccgctctcttaatcattttcagctggtcccccctttcttttctcgtttccaacgagctgcaaattcatatctccgcgttttctgcattaatgcatacttgatatgtatctgtagtatacaacaagattatctcattttcaatcaacaaatcagagatatcccgtctgtttttttgtgcactttttacatatatctattttatcaatctatttttttatcattttacgcagttttataactttattataatggataattttcgaaattgaattgtaaaaatatgggaatcctatgttcgattggtaaaatcataacgaaaaattatacttgttgttttgtcttaaccgttgtataatatacttattgtatactttacacccaaagaataggagcgtaaaaccatggcagcaaacaatcgggatttaaaaaataaagcttatgaaacaataaaggagcggttactggactgtacttacgagccggggacacttcttaacgaggcgcgcctggctgaagatctcggattcagccgcactcctgtccgtgaagccatcagcaggctggaatccgatggatttgtaaagatcatgccgaagaagggaatttacgtatcagatatcttactgagcgatgtacttcagatttttcagaccagaatagagattgagccggttgcgctccgcatggccgccccctatctgcctgaaagcgaactgatccagttccgcggaaagtttctggaggactttgaggatattcccaacagcttccgcctggacactgccatgcatttatttatcattgagtactgcggaaaccgttatattatcgatatgatgcacagggtctttgatgataatacgagagtcattatcgccagcaaacagaaccgggtacaaatacacgatgccagagcggagcacatgggaattctcgatgcactgctggaaaaagacgtggataaagcgcaggcactgatgaaaacacatgtggaatcctgccggcgggctgctctcgattacttctattcccttcaggcttataacacgacgccgcccgagacttataagaagcagctaaaagactggagcagttaaaagcctttcgcagttaaaaacctgagattgacaggatttgaaaaagagactttgactcggtatatacgaaaaaacaggaaaggaagagcgggctgcatattgccgtccgttcttcctttccatacgaactatatcaaatatgatagttatttcccaatcccccttacttctcttccggacattccccggttgtctccgcatccgccttcaccggcatcgtataatcaatcacgactttttctccccttgcaaacggttccgaataacgctcatgggtataaatctcacaccagtaaaagttgtcgaagtctatggttccgcctgttttctcaatcgcttccgtaatcagcaggtaagcggaatcaaggatttccgccacattgctgccctcaatctgaacataagccgcccggcctttgggtatgtgttttacgaacagtccctccggtatttccgtctgcatccggacaaagtcgcctatcactatcttaaaattcattctgtcactaaagtcgtacatgaaaccaattccgtcattttcgtctatgtcatcacagcatttgacgtccgccagcctgtccagtttttcaatggtatctccctgaaaaaattcctgccacacaaagccggcgtcggtaaagctggtttcccggggcagcccctccatgagccgttcgggtgtatccttataaatgatgcgtttcatttcagccataatacgttttcctcctacaaatctcatatctgagaaattgatcggaagataatcatttagccgggcatttttcattctggcctgagaaggcgttatcccgtgatgttccttaaaggcccgggaaaaagaagaatgagactgaaaaccgtattttaccgctgcgtcgagaacagaaatatccgtatttttaagctcatagccggccagtgtcaatctacgttttcttacataatcagaaatgctgatccccgagataaaattgaaaatacgctgaaacaatgcggccggactcatggctattctggatatttcatgataatcgatttcacagccatcaggaattattttttccaaatacaggattacgtcattaaatgttttgctgctgttcataattacctccgtcactccatatattaccaaatttaccggccgctttcttttcatttcgcgtacagattatgtcacttaatgactatccccagccgcttcgccagttccgccgcctgatatagatccatgaccgcgccccgcacctcagaacactcatcggaaagcaccagacccttgatgtcgcaggtggtaaaatccattcccttaagcggagtcttaaaaaagctggcattctgaagactgacctgactgaacgtaacgcctttgcacctgcactgcgcgaaattaccattttccaaatcgctgtcttccacccggaaagattccagcttcgagtcgtctaaattcaaatactgcatactgcattccatgatcgacacatcctttaagctgctctctgtcatcctggcccctgtcccctttgaccgctgaaatgacacccgtctgagaaagctgtcgcggaacagacagttggaaaagttacaggagacaaacatcacatcgctgaattccgccttttcaaaattacatccctcaaaactgcagttttcaaactttacccttgaaaaacagagtccggaaaaatcttcctcctgtgcctccatattctttaaatatgcattctgaatcctctcgtcctcttccctgcactgatgaagaagctccgtatcccccgttacaagttcatatacttcaggcagccacggctctgccagttttattcccgccatacgttccttttcctttctgatacatgatcaaatgcacgatgcttccattatgccatataccaggaaaaaggtcaaaagatcatgcatcgattcccgcagaaaatgtcaagattaaatttcttctttacgttaagatagcattgcagttcatcaaacagtcaacaggaggatttttcttatgaaaacaattacggcgcgaacgctggagctcagcggcaccagttacgaaatcggacaggcactgggacgcatggccgcctcaaatcccaggatgaaaaagttctacactgcgggatacgaaaacttcggtgagaacgaagtacaggaggccgaaaaaatgtttaacgagtggtgtccggggctgaacgaagaactcgccggttttgccggagagctggcggttcccataaaatccgttgtctactatgccatgacatacttaaggcccagctgcagccatctggccctgctgccctccaaaaccacaggcggccacccgctcattgcccgcaactatgaatttaacgacgaactggaggatttccagctgatcagaaccagtgtaaaaggaaggtatacccacatgggcaccagcgtcctaagctttggacgcgaggatggcttcaatgaacacggccttgcagtcaccatgagctcctgtggatttccggtcggagccgatcactgtatgcgccggcccgcgcttaaaggcctccagtattgggctgtcatccggtcgattctggaaaactgccgtgataccagagaagcactcctctttttaaagggcatgcccatcgcctataatatcaatctgatccttctggaccgttccggtaacggcgcactcgtcgaaacactggatggatccatggcagtccggatgcttaatgaaacctccccggttccctatacccatgccaccaaccacgctgtaatccgggaactggcttcccgggagccggaggccatggtacactccctgaaacggtatgagtacataaaaaatgtggcagaccattcggaaaccctgactgtaaaccagttaaaagacatgcttctgtctccctatccggatggcctctgctgtcactgctataaagatttctttggtacaacaaaaagcatgatcattgatccggcggatggtataatagatttatgctggggcggacgggcggaaaacgggtggcatgcgtatcggataagcgaaccgctccccaccagggaacatgacgtaaccatcacctgtgagcccgctgctcccaccatgtttcgtttcgatccaaatccgttcgcatagccccatgaaactgaaatgaccggtgatccggccgaatcctataaaagaaataaggagactgaccatggactatttaaaagcgctggagcgcgccatcctctacatcgaacatcatctgggtgaagacatcaaagtcgaagatgcggcagccgcggccggatactcctactatcactttacccggcagtttaacgctctgttgggagaaagtgtaggcagctatatcaggaagcggaggatcgccaaggctgccaaggaactgctctatacggacaggcggatccttgatatcgccctggactgcggtttcgagtctgcggaaagcttcagccgggccttcaaaacgctgtatctcaccagcccggcctcctaccggaagaaccggctcgatttattcatcggttccaaaccgcagctggagggggaacgcctcacgcacatcacaaagaatctgacagtccatcctgccatcgtggaactgcctgatattatggccgcagggctgcgcggcagcaccacgctgaacgataatgttctacccggcctctgggccgcctttatggaactgtctcctcagattcccaaccagctcccctgcgggagagggttcgggatctgcgaggcctgtgaagagggcaatacactctacaatatgaacggagacgtcctcttttcagaggttgctgctgtcgaggtgagcagctttaacggcctccctgatcaatttatcccaaagatcataaaaggagggcgctacgcggtattcactcacaccggcagtctctccctccttcaggacagctactcttatatctggggaacctggtttctcggaacaaacgagaagctggatgcacgagaagattttgaattgtacgatcagcgttttttaggatacgaccatccagagtcccagatcgatctctatatccccatccgttagggcgctgcaccagttaccagcgcagctcacacaggccgcaggcaggcatggagaggcggatgagatcctgtatcctgttatctgtcccattcagttccatagactccactgtatttccacggcagtccttaaccgtgacggttaccggcctgaccggatccaggatgaggatctgttcctgtgcgtgcagggcgtttacgcagctgcagattttctttccttttgctggccggattacccttcccacggaatagtgaaccagaatctcctccgtctcattttccacactcacctccggatagaggttttccggctctttcgcacggatcacggtcatctggagcagtgttctgtgctgtctcatgaaattcagccagaaccggagcatctctgccattccgtcatctatatccgccaggcggaccgatatctgcggaacgccgaacagacagcttaacacctgcatggcggcctcctccggccgctctccccggttccacatcagcatatccgaatggactgcgctgtctccgcacagaagccgcaaatccacacagccaacccggttagtcaccggggaacacggacagtccgccacacggaacatgtttccataccggcgcatgttcggcccgatataacgctgccggaattcaatcagaagactctccttttccctccgcagcgtctccctgacagcggtcataaacacgtccagcgcctcctggatatccctgtagtccataccagcccgccacacgggagtttcctctctcatatagaactcatcgatgaaatccagtttcagtccatccaaatcccattcccggacagcttttatatagactgccagtaaatactcccgcacctcttgataacgaagatccagtaccccggccctctgccgctcatcgtaacagagcagtttatcggagaagcggtcccagcagccggtgttctttcccacaaacggcacggaaaaccacagcatgtactttatgcccatagcgtgaacccgccgtatgtgctccggaaaatccggaaattttcccggctcaggagcccagtccccgcagaatgcgtatccgcggttattatccccggtctgccagccgtcgtccacgatgattgtatcaaatcccatttctgccgctcgcgcggcttcctcctcgacaaccgatgcgttaatatcctgatgccaggaataccagaacgagtacaccggctctctggcttcttccggcacttccatgacagggggcatcccatcttcccaccactgtctcacctgattcagcgtatcccagtatggaatattttcctgtgactcccacagccggaaagaatatccctcactcatcttctgcgcactcagtacgaactggattttaaccgccatccgtccatcttcctcgtgcactccggcatttatatccacttcctgacacagctccgaagctgcgatcgtgtgcctgttcctgctttccgaattgaaaaaacatacgaccggggcagacacggccgtcatggacgccgccggcagctcccagtccgccttcagcgcccggtcggcgcggcagttgggatgccaccgtccgcagatatcgagaattggaaaggaataacggatttccacggcactccccttttccgaaacacaatccgaccggaaacaaaactccgtgacggcccgtccctctcccttttccattaccgacgcggtacaggaagccgccgcctctgaaaacacctcatattcaccgtagtttaaaatacgctccatttttcttctcctttcggttcgcttatttcatatctgtacagaacacattcagcctggagacactggttcctcacggaagcggatcagacataatttctgccagcgcccctgtcagcgtcgtattttcctccatactcagaattgtcagcagcgcgtcccctctctgtttcttaactgcttcgaacattgcttccttcttatcataagaaatctgtgctctgtttaaaatttcataggcctgagccccccggtttgcagcagcgacccgcatgccggtttcaaagcacacttctatgtttttttcagttggaatctctgaaagctccagcgtcagaattttgcttgcctcatcataggacagggccgcatccgtccgcgatcctccgattatcactgccggaactgcaaatcctgaatctgcaaattccacattgcggaaattcagcttccatgaacgccgttgtggaattgcgctccgatttccttcggcgccgctgactgcgaaacggacagaggagccccactccagaacaagacgcgtagatacccatctttcaaccgtatccccgtctgtccttccgtcatcctcccatatagtaaaacagccgtctgtacccggaaatatatcgaccgccatacagtccgggttttctgtactgcccttcccgtcaaggcttctggggatgatggcaccggcttttgcaagcaccggcatctgttccagggtacggtagagagtcatctgtttcccaccctgatagatccgtgaattctggtaatcaaaccagagcccctccggaatccaggccttcgctcccgctaaatccgcctcgcgatccagcctctccgtgatggggatgactaacagctccgagccaaaatagtattcattaggaaactcatatgcctccttctgttccggctcctcccagtacagaggccgaatcagaggacagccctctaaactggcccggcggttcgccgtatggagatagggaataagttcatggcgcagccgcaaaaagtctttcataatcatctcggcccgcttattgaaattccagggctcctttccgctgaatggattggaggtactgtgaagccggttgattggtgaaaatacaccgagctgtacccagcgcactgccagttcatcgtccctggcccccatcatgtgccctccgatatcatgactccaccagccataccccacattgcttgccgaagccgtaaaatacggctgaaaccgaagactttcccagcttatgatggtgtctcccgaaaaaccaaccgggtaccggtgactcccaattcccgcataccgggaaaatgtaagaccggcccctcccttccgcgtactgtccagatagtggtaatggttcagcatccagaggggatccaggccgggaattctggttttctttccctgctgccagtccacccaccagaaatcgacgccttccccttccatcgggtgatgcagtacatcgaaataggcctccagaaacctccggtcagtcacatcgaactccaccgttttttcgctgtccggatcgattcccagcgcttcggccattctcggatatgcctcctcgtgagcccgcactccatccgccggatggacgtttaacgttaccttaagtccctgctcatggagccacgccagaaattcaggcggatcagggaacagctccttattccaggtatatccagtccacccggaaccgtatttcgccggaatatccaccagatgccagtccatatcgatgactgccacggaaaaaggtatcctctcccgttgaaagcgtaccatcagtctcttatattcttcttctgtatatttatgatatcggctccaccagtttccaagagcccaccgcggaagcagaggcgtatttccacacagcctgtaaaaatcgcggatacattcctggtaacggcggccgtatccgaagaagtagacatccagtccgtctcccccgcgcggagtgacccagccgtcctctgtaatgaccatggaagcgctgtcatcaatcagagtacagccgtctttagaaatcattccgtgttccagcgaaatcgcgccatccacctcgtccagagtgcgcgcggttcctcccagatccttaatctcatcgccccagcgccataaacggttttcccccgtctcctgatttaaaatcgtgcgaatacttaatccctcttcagcaaatttccctccccggtacttcacctgtaaaaattccgtagtaatcgtaaggataccattctcctttataacatcaaattccgggacctgaaaatcccggttcattacaatctgtgtggcccggtcttcaaagttccccttttcgttgtattccatacgaatcagagaggatgtcaatacggtgaaacgatagtccggtccctgtatgaaggcactctccctgcctgccggatttccatatctttttatatctcttaccatgtgatctccttatttcagaaaagccgtacagacatctgtacagctttccttctatccttttattatacctgatgcagtactgctatgattcaggattgttcccatcgccgcacgtatatgaccaggttccattttccttgattttcaccagccgttcctcacctctccattttaccagcagcagccgttcctgagcaagcagatttttcacgaaaatggtattttctcccacttcatattcgatagcgtactgtggattttcaagcctcactcttccgtctccggcaagcatcggttctatctccagatcggcctgaaggccaaaccgcactcccgcgtatccggcgatcagattccagataaacacgcatggatattcataataatgggccgcgccatgccagttcttctcactgagatagtaaacgtaattcatatcataccgttcccccatccggtattcgtctgtcctggcctgacggcagaccgctaacagctgctgttccagaatatcgcttcttcccttctctctccagtattcgaaatcccagcaccagtatcttcccgccgcacagagatcatacggtcctcccgaaccgatctctgcctccgtataatctgcaatttgagcggatacaaagctgggaaaacgctgaaactccaggaagcattcctccatcagacggtccacgccgtcctcctgttccggtttcgtataatggaacagcgagggaagctcattagccagaagatggatatggtcatggggtactgagtttctgtctacccagtcgacaaaccggttcttcgaagcatcccagaaaccggccggaagcgattccacaagcgccttcccgagtatcttcgataccgtccggtaatgctccgcctgccgatcccgctttaagacctcctccagctgagccatgagttcaaaggacctggccgccagcgcctgagccatgcattcccggccatccttgatcacctgatcctcgtaataaacgtcggaccacagccttccctgacggtcaatacagctctccacaagagagagtgattgttccagcccctccatatgatcgccaagccaggcccggtctctcacggctgagtaataaaagaaagctgattcaataatttcgatgttcccggttacaaggaacatttccgcgttctccgaattgtccaggctgttccgcctgacatgatactctctggccccgttcggctggatggcgcagggatcacgaaacgcctgctccggatcctccgccatcatcttaagctgcagctccatcatccgctttaccactgccagatccagttcatcggccatggcaaggcgtcctttaatctggaactcatggtctacatccgggtaggtccccgcgtaagcgcctttctgaagcgtactcaccacatagccgtcgctgtcggaatatgattttgctctcgtccgttccaccacggagggcagaagtgtttcccagtagaaatggtaataggtgtccaggaaaatgcctccgttctcaaagtccagctccatggtattgcccatgacatcacagcgcggcgggccgtcaaattctttccataccggttcagaaaatgcgccgccttcccccgccgaaacagttacctccgtctcatctgcgcttatgcggataaaaaacgcctcggatgcttctgcctcataagaccggtactccccctgcccgtttaagggcaggataaagcaccgggcaacaggcggaaactccaccgcaccgtcataattatgtatcagatacggctctccctcttctctgctgacgcagtaaacaattggtctgattccgccgtacgaaatttttttctctgtcataatccctcttattttgtcttattcttatttcgtcttattcttgtattcttctgtccagtaagcttccaccttattcatgccaagctcatcgatcttctgaataaattcctgataaaccgactcgaagtcctctgtaaaaatcatcttcacagaatactgctgaaggaggctgaatgctttctgtctgataattccctcttccgattccggagacggatcctgaatgtccagttccggacggaattccacatactttccgaactgttcgttaaatttattcattctctcatcctgatcgttccaccatggcagattccacaacagctcattgcaggcaatccagtactcacccaggccgtttctggaggcaacgccgccccagtccgcatttttatccttcacatactcttccagcagaaccggtttcccgtctaccatatgccattgcgcgcctgccaccggatcctgataggtatcgccttcaattccccatgatacatcgctgtgtccctcaacagaggccagatattccaggaaacggatcgctctctcagggttcttgcaggtcttcggaatcacagtcgccagccagccggctcccgttctgatctgtccgtatgtctcgaagggaggcagaatctcataagtagtttccgggttgtctccaggtaccttctcgccgtcggagatcgtccagcagtaggagatcacatcgccctgctcaattttagcttttcccacatcctttgtgtcaataaagggatcttttgtcagaataccttcgagatacatctcgtttaaatacttcatcggttccttaaacttgtcgtcacgaaccacccactggatccccccgtccttctctgcaaagtcggtgctcaatcccatctggataccatagtgggaaagcttcgcgctctttccgaactcatcggcggacatacttccgtcagcgggataaaagcctattttatccgggtggttttccttcatctgcttaacggcagcgataaagtcggccatattcttaatctccggacggccaatctcatcataatagtcttttctgaccgtcatgaccggctggttggtacccacaatctgatcgtactctcttgcggccttctgccatgcctcaccctgaatccatgtcgtaaactgatacgtctttccatccgccatctgataattgcttaagatctcctttggcagaatttcacgcattttcggcgcatactgatcaatcagctcgtcgagtgaccacagcatccccgcttcggccattttctttaaagctgcatcatttttatccagtgtcagaatatcaggcagctgattgccggcaatcatcatatttaacttctgtccgtcgtctacaaccggtttcataaagtttaaatcaacaccggtcttggcggtcacacgctctgccgtagcatcattccagtccagtgaaaaccaggaaaagttggcgtaataccctaattctatgggcgaggtgtcttccttccattccagatcctcaggatccgcctgccagccgatcctctcccagtccatctcagactggaaatctgacacggctgcctccggcgcctgtgtctgcggctctgattccgccttttctgtttccgcagcagtctcccctgtggtctccttcaccgtactctggccgcccccgcagcctcccagcatacccgcaatcatagcggagcataccatacatgataatacacgtctgaactttctcatattccctctctcctttttttattcgcagctcttcagccgcgcatcttcttgttttcgtgcttcttcttgttttcgtgctgctgaatgggtacgcttattctttcaccgctcccagcatcattcctttcaggaagaacttctgaacaaacggataaataatggttaccggcagaatcgatacgatcagcatcgcgtaacggaccgattccatggtggtactgctctccgacggtactgcgatcatcttctgcaaagtctgctgtgcctcagccagagacatggcacgcatcagaacagccggaagtgtcatcaggctctcattctgaataaagaatgcagggtggaaccagtcattccagtgccatacccctacgaacagcgataccgtggcgataaccggcgttgacagcggaattataattttaaacagaatcgtaaaatatcccgctccgtccatctgtgcggactcttccagagccgccggcagttccttaaaaaacgatataaacagaataatataataaaactgaaaaatattaggcaggatatagacccagaaggaatccagcagatgcatctcccggtaaaggagataggactgcaccactccggctgaaaagtacagcgttatgacacccataatcatatagaccttccgcccctttaaatgatcctttgacaatccgtaagcagccatcgccatacaaaaaacagccagaaccgttcctacaatactcctgagcattgtcataaggaaggcaggatagatcgccttattctggaaaacaatcttgtaattttccagagagaacttcctgggccagaagtaaagcgcctgcctggccgcatccctgccatcgttaaatgaatagatcagacagtaataaaccggatataccgtcacaatcagaacaaaaatacataatacggcggtaacgacattaatgattctgtcctctcttgatcttcctaatttcatacgcagcatatcatcaccctcccgttaaaagacgctctttccaaatactttttttgatattttgttggcggtcagaagaagcgttaccgagagcacagaaaggatcagattcccggctgccgcaaaggaaaatctcagctggtttaacccttcatcgactatgaatttctgtattacataggatttcgaataattaaaggcgtttcccagcagatacgactggttgaagttggaagccaccggcccgccgctcagtaagtttccgcagttcataacgaaaaggacccctgccgtccatgcgatagacggcagcgtgatctgtgtgatccgtttcaaacggccggcgccgtccacagctgccgcctcataaatatcctggttaatgcccgcaatggccgccagataaataatcgcattccagccgctctcctgccagcagtcgatccacacgccgatccaccagaaatacttggaatctgccagaaattcgatgggcatatctgtgatatgcagtctcatcagaatatcattgatcagccccttactgtccagaaacacgatccagagagtcgctactatgacataggacaaaaaatgcggtaaatagcttcctgtctgggtcgccttcttcagccacttgaacggtacctcattgataatgagagccagcagaagcggcgatgtaaaggtaaagaagaattttaaaaagctcattcccagagtgtttttcatggcgagataaaagctctcgctggagaacagttccttaaaatacttcattccggcaaatgcatggccgaaaaatccatcggtcagcgaataatccaaaaaggcatttgccagtcccatcacagggatataggaaaaaataaaaaagaatatcatggcaggtatcaccatcaactgcagctgaaactgcctctttccccatctcttttttttcggtaactttttcatagacacataccaaacctcctccacctgttgtttttccctttgcaaaactaaaaaaacgctatataattgattactgggaacatttccgtttgcaaatacagtatatcacatggaatttatgaaataagtacacgttttttggaaatagtacaataaatatagttgttttcacacaccaaccgtactctggaggtcttacaaatggaaataatcaaaaaaatgcattataaatcaaagctgattctctgttatcttgtccttgtctccttcccgcttatcctctgtcttatccttctgtatcaatctatcgttaagccagtccgggaaaatgcggtgagcgccatcgatcagagactggagcaggaactgagtaccatcaattccaaaattgaaaaaataagaaatgtctcttatttagtctccaccaacacggtcatcaacaagtttttcgtacccaaattttacggtgacctggaattaatcgagattttgaacaacgatatttctcccctgctctcatggctggaggcctccagcccggaagtatcctattaccactttttcacgaacaatccttcgattccggatacccagtatctccaccactatgatgattaccgttcagagccgtggatgcaggagatggagcagtctgtttttgataagggctattatctggagccatatcatcaaaaccgcagctacagttttggatacggcgtggaagatcagatggtctattccctgttctaccctcttctgactgccaataactttcttgaggtctgcataaagccctctgtatttttcgaagacatgaaagccataccggccatggagtccggttttgtggcagccgtcaacagagatggaaaagttatctccgaccttccgtcaacggttaccgccgctttccgcgaagctctggaacagagtcttacagaaggcggctatctgtccggccctgccgacagccctgtcctcgtctctctggaacagactgagtatctgctgtcgcttcggaaaatcgatgctctggacagctggattctctgcgctgttcccaatgctgagatcgtcgggccggttttaaaagcgcagcagtcttttgcactggtaatcttagcagcggccatcggcatcgtactgctctcctaccttttatccacactgctgatccggaaaatcaacacaattattgacgccgtacataagattcaggaaggcgatttccacgtctccatcccggtaaacggggaagatgagatcgatcagctggctactgacattaactatatgtcatacaagataaacgaactgatcaaccgtgtatacaaggcccggatgctccagaaggagacggaactgtctgccctccaggctcagatcaatcctcactttttattcaatatcctggatacgttcaaaatgatcgccatcatccacgacctggacgatttttccgacagcattgccgccctgggcaatctgatgcgttataatatttcccctgccagctatcgatgcacgctggaacacgaactacagatcatacacgactatatcaatatccagaatttactgctgaacaaccgcgtcaccctgcttttaacggtccctgacgatctgcttcgctttgaaattcccaattttattattcagcccattattgaaaattccttcgtccacggattcgaaaataagctgaacgaactgatcataaaggtttccatctacagggacggctcaaacatcatcattcagatcgaggacaacggaatgggaatcggcggggaacagcagcaggcgctcacagacgccatgaaaaagtccacggaaacactggagatcggaccggcccaggacccattcagggaaggggagacttcccgttccggaaaaagtattggccttctcaacgtgaatctgcggctgtttctgctttacagggaccgctattccttcaccttttccgcttcggacttaggcggtgcctgtaacacgatttccctgcccgtctcgattccgacgaaggagcaggaagaaaattttcttaaggagcggagtatgttatgacactattaatcgttgaagatgaagatatcataagaaaaggactgatcgtcacactgagaaagctggagatggattttgaacacatctatgaagccggcgacggagaagaggggctgcgtctctgccgggaatacactcccgacatcatcatgacagatattaaaatgccgcttatggatggcctggcgtttatccgtgagagtcagaaactgctgccggaaggacaatttatcattctgagcggctacagcgactttgagtacgcccgaacggccctgaaatacggtgtcaaagactatttattaaaacccagtaccaaaaatgagataaaagaagtgctcacccgggtagtggaacagctgaaagagcagcagtcactccgtctggagctgacggaacggattcacacctatgaaaaaaagctggaccgtttccaggaactgctgctgggaaacatcctgtctggacgttatccggccggagagatcggacgttatctctcccactactcaatcgtatttccggaagaatatatggaagttctctgcatcaggattacgtctgctgtttcttccggcgaaccctcgatcgactataaaaaccattttatgtggatcgcctccctgtttacaccgtattacactgtttatcaggcggatatcttatctgtttataaatgtctgcttataaacttttcccgcatggagcccggttacagtcagaagatatggaagaaagcagaaacagagatccgggaatacggacagaaacacggactgcggatctgtctctccatcagccgcgcggaagtctcagaggaagcacttcccgatctgtatcaggaagcctgtatgctgctgcactgccgtctctttcagcctgaagctgtgatattcgatccgaaatgccagagagctgcggagacaaaaattcctgcagttcccctgactatgattgaaaccctgtatcactactacattggaaacagccagtttgatctgcgccagaacttttacagctttatccaccacattacacatatagaggactcctctcccggctatgtctgcgaatgtctcgacaggctggaggaattctttgccgttcagtctgccaaagacggcctcgaaccggacaccgcttaccggatcgccttctccgtttccgagtccatgacagtgtgcagttccctggaagacttaacggatatgctttatgcccggctgttggattactggaaactgaaaaaagaaggaaccgcccccgccgcccacatggcttcctctccggtggatcaggctatcgcctatatggagcaaaattattacctggatctggacttaagtatgatctccgacctcatctccatgaacagcagctatttcagttctctgttcaaaaagaagactggcatgaatctgatcaattatcttcaaaatgtgcggattgaaaaatcgaaacagcttctgttgaattccaatcagaagctgtacgaaatatcagaagccgtggggatacccaacgtaaaatacttctgcaaactttttaaagactacacaggtgtcactccctcagagtttcggaaacatgaacactctttttagaaggcgttcacacacgcactccgcgcggcggtatccttcaggatccggccctggggatctcccgccgcgcctaaaaccaaattacaccagaaaagaaaactctccaaaatcaatcgacaaatcttcataaattcccaccggaaccgtatcgtgcatcccatatatcttcatatccatatccccatcgttaaaacagtatgtcaggatgcgtccctttaacggatcaacgatccagtattcacgcactccggcggaccagtatttatttaacttgatagaataatctttttttcccgtgctctgggatatgatttccatgacgaaatcaggggctccggctacacctttcgattccacacgggtctggtcgcagataatcatcagatccggctgcaccacagtcttatcatccgagtccagaaacacatcaaacggggacagaaatacctcacagggtccggcctttcgcctgatatactctttgaattgaaaatacagttctccaataagcttctgatgaacaaggcctggagatgacatataatagaacgttccgtcaatcagctcggctctgacatgatccggaagcgcatagtagtcctccagggtatatcggccatgaaccgaatactccagggcctcctcatgcacgctgctgacataagggccatcctcatcgcggtaaaatgtcatccccaaaactgtctccagagcaagaatcgtatcgtactgcggcgacttcgtggcaccgctgaatatcttattcacggtccccagcggcacaccggaccgctcagaaagttcctgatttgttattcccagctctttctttctctttttcatcttttccagatccatcatggctgttctccttccgcagttttgtttcctccattataccacaattaccttttatggtcaattcatctaatataatacggtaattttatttccccatattttatcatattgaatctttcaccgcctgcggcgcagcccctgtctctgaaaccggcaggtcagtcccgattccgatccgcattccattcctgaccttttctctgcagagtttctcttcttttttccataccatctcatattcatccagtttcaccataattccctgactgcaccaccgtttcaccatgcttctcgatacgcccagacgatcagcgatcagaccgtccagcctaagcgtcacaggaaacggaaccaccagttcaatcagccggaagccgttcttaaccacctcactgttctcatccgcattaccgtccgcttccacctctgtccggtatccgccctccggtatcacagcttccgctctgttcttcacaaacaaatccattctccgtccgtaagcttctgccagcgtgcggtcattctcaaggaatccggcatactcttcctgcaaaaccgaactcaccggagtccgttcgtatatactcatattccaggtagtactgcatttttcacagcgatagatcagccatacatccacattctttccatttgcatttacacggaatttcatactgtttataaattcacgtttttctttacatttagaacagtttcgtcttacggtgggaacggcctccggagtaattctccagcgttcttttctgattgtatctaaacctgtgtttgaattatttatgtttttaatattgtctcgcatcacattgcctcctgaaactactctagtacagttttgcattagtaacgcagtaacagggcctgagatccgcgtcaggtgtgcgtctgcaaagcgacggcgtagtggacctacatttagctttgcaggcgtgctcccggcgtggatagctggtgctgttactgtggaattagtgcaaagctgtactagtctttatgcaaggcaatactagcatggttgtggacaaaggcatacctcatcaacggttctgccgaaaggatgcggcatacagacaggaagcacaaaaaaacgatatgccataatcctgcacatcgcttttctatcattattttattttatttttctctgacaagataattctctgaatgctcttttccgaaaggaagtactcctccgccagcgtctttacaccgaatccatccagatatctgcgataaatctcttcgttgcgggtcttgagttctctccgaaaggaggtctcctcgccccactttttcttattctcttcttttctggggatatagacgtatccaccatccatatatttctggattgcttccaccagttcctccggcagaatctccgttgctttccgatagcgcatcgctgcctcctaaacataatttactgtcaggaatagcaaaggctatacaattactcatattttctttcactgcatagacctgttgctatgcagtcttaacctctttcatcataaagaaccggcctcctctctatctttttgcatacaggatggttgtgttctcctgtctccataccacttccacacttgagcttccgtgccgtcttcttctccagtatactctgaagcgcgccggaaaaaaacctcaagtttccggcagaaacaactttaagcccggcattaacactgggccgctgtgtcgagtatacagaaatttgattccggtgtcaacaggcgttctccttccaaaattttcctatctcctctgccgacagctcctccacaaattttttctttatttccagaaactgctccagctccagcagaatctgaaataataccgcgcggctttcaaattcttcccgggactccggaaggggctgctcccgcatggagcacgttacacggtccagtgaggcaagcaggtctaccgcgttgttatactcatgaaagcttacactgatccgctccatcaattccgcaatgggacgcgcctgggagggcagttccttcagatggctcatctccgcctcaatccgtcccagtacaaacgcctgggttcttctcatgttcatataacggagataatacctcgtatcgctgagaagcttattctccatatcctcgtatgcacttttctccccctgtttcagggtttcatcaagctccgtcaggcgggaagtcagcggcggctgatctgaaggcatgtttgacctttcctgatccgcagcagtcagctgttttgccatcttccacagaatctccttcatgcggccctcgatctggcgctggctcattcggatcacgcgctcttttcccggaatatagagattgagcagcactccgatcccggctcctgtaaccagaaggcccagctcattcccaatattcaccgcattcattgatcgctctgccagaaaatgcgtcatcaaaacagtgtttacagaaattccctcctgcatcccaaacgccatgcagaccgtggaaaacatcagcagaaagacagagacagctgccggtccgtagccaaaagcggaaaagcatgccgcagaaataaccattgccaggacaaacgacagaagccgccggaccaccacccggatggtctccttctttgtgtcctgaatgctcaaaagtgtgataactccggcggacgcgctgtaattcaatcccagacgctctgccagaatcatagccaggcctgcgcctgcggcaattttcataacctttccataatccggtttcttcacaaatacatttcctcctgacggtgtgaatcagtttcggttccatttcctatcattattaccgatcatggaaataaatacaaggtttgtttcaccaaaagttctccttgaccgaactttttttctgtgttaggattttctctgtaaaatttatgccaaagctactgacaacatcagaaaggaactgaaactcccatgaatttcgcagcacttatgcagttgaaggaagaatggacttcatttaaaatacgccaccccaaattccccgccttcttaaaggcagtccgtggacgtgctctggccgagggcactgtaatcgatatccgcgtgaccgctccggatggaacggtactgaactccaacctgaagctgaaaaaagaggatttggaactgatccgccggattcacgaactgatctgatacattttgagcctcgctgaggccgtgatcctataattccatcgccttcgatgtcttattcaggaaacggtcgtaaacgacgatctgcacctcatgtgttccggcagacagtccggggatgtttaactggattctgccgtcagagaccgcttcttcggaatactgaaagagcccatccacaaatagttctgccttgcaggcattttcccctgtcttatagtgaagctccagctggtctccgttcttttccgctcgggcctccagagacggcccagttccggcttccagctgtataccgcccagctccggcttcctgattgtaaatttctttctcagttcatcgacgtatgctccctttacccgaatattttccagttcccccgcttccgtatgttcccgcagaagattcagataaccgacgctctcaggatcccagccggttaccagagaacagatggtatcgaccgccaccgcatcgcttcctcccatgataacgcccatgttcattttatcggtctctttccgctcgtgagacatggggaccggaccgctctgaaagccctgaaggccatccacaatcacatagtccaccggtctggccatataatagtcgtaaatccatcggtccagctcaccgtccgtgatcttgtgggagaccatagccgccttgctgggattgtcaggcgccataccgtacagatttcccggcggagtaccaatactcacatttttgattccgcccgtcactaccactcccgaagaagtcttaagcgcaggaatactgatgacaacgtccgcctcatacagaatccggttaaagtaataggatttatgaagcaggccctccggaagttccacctttactacctccggcgcatcaaaatcctgccatgccccgcagtcttcctccaggcagataaacgaatccacaccttccatataatccggcgtataatggaaataattcataacctctcgggtcggccctgtcgccgagccctccatgatatagacctttccatccggattgaactcccttaccatttttaagacagcctttgtaacacgccagtccgccgtaaccccattgacctcctgatccagcagttcccctgtggaatccacaatcatctgaaccagattgggcttcagtaccacggtctgtccgtttttgacaatgtcttttaaatcggaggcagccgtcctcaccatagcctcgatttctgattccgtaagatcggccgcttttgctttctgcgatttggcaatcgtgacggtggaaccatgaaaaacggcttctttgacggtttgcacagctgtatccggctggtaccccggcacggtctgctctaaaggcaccatctgcccctgctctgattttcgttctgccaccgtattcaccgcggggactgcttctgccgggtgaatctggcagccgtttaaaagtgtcattggcattgccatatagatccatagtttcttcatcgatgatccccttttctctatgctgtatttccgtattttgtcgaaatgtgtcagtatcgattctacagggggtatgcatcaaagttgcatcatccgattattttaatcaaaaccgccgtaattttggaatgacttctcaaactgattcgtgtataatgtaggaaacagcaactacaaccattggattccattaccgcctccggctttaaggagttaccatgagttttcgaaaaatactatcacggtttcagatttctatctttgcccgttccatacgccacgggctgacgcttgccatcccattcctgattatgggatccttttctctgcttctgaataattttcccattgacagttatcaggtttttcttgcatcctggcttcacggcactgctgcccagctcttaaataccatttacaccatcagcctcggatctctggccctggttcttaccgtcaccatcagcatctcctacggacagctggccgagacggaccagtttctgctttaccctgtggtttcggtctgttcctatctggccttctgcggcggcattaaggatcagacggaatatatcttcagcgcagaatgggtctttacagccatgtgcattaccatgctggcctgtgtcctgtttcagcggctcttaaggtttggccgccgctttgagaggcttcacacgacaggggctgattatctgtttaatatctctatccagagcctggtccccgtcatcgttatcactctgttttttacgataacagggtatcttgtccgcatcacctggagtgacagcaacattacgaatttcggctcctatctctttctgaaactctttaacggaatcagcgggaatttattcggcatcctgctttatgtggttatcacgcacgtcctgtggttcttggggattcacggaacaaacacgctggaagccgtttccagacagttgtttgaacagaatgtggagatcaatcaggccctgatgacggccggcagtcttcccacggagatcttttcgaagacgtttcttgacaccttcgtcttcctggggggctgcggcaccgccttaagctttgtcatagcgctctgcatcgcttcaggacagagtcacaacaggaagatcgctcacgtggcgctcccctcggtactgtttaatatcagtgaaatcgctgtcttcggtttcccgattatctttaactttaccatggcggttcccttcatcatcaccccggttgtgctgacggttaccagtgctctggccatccacctcggtctggtgcctgcggtgactcagtctgtagattggactgtccccgtactgctcagcggatataaatccaccggttccattgccggcagcctactgcagctgtttaacctcatcatcggaacgatgatctatatcccgtttatccggcggagtgaaaaactggaggccggcaaatttacgcaggcgatccgacagatggaggcggatatggcctccggcgaaaagcagggaaatccgccccgctttttaaccccggaatatccatgctattactacgccaaaaccctcgccatggatttacagaatgccatcaaacgcggccaggtacagttatactatcaggcgcagttatcccatgacggaactctgcacggcatggaggccctcatgcgctggaagcatccggtcacaggatttatcgcgccgccggttttggcaggtctggcctatgaacatggatttttggatgaactcggcagctatctgatcagacgcgcctgtctggacgcccagaccatggagaggcttttaaagaaagacgcatatctgtccgtcaatgtttcctccatgcagataaaaagcgatgtttttttcgatatggctctttccctgattaagcagtatcccgcggagcatatccaccccgtattcgaaatcacagaacgggcggcacttgagatatcggatcacttaaaaatagaaatggagcatcttcgcagccagggtgtggaattcagtctggatgactttggaatggggcacaattcccttcttcagctgcaggaagatgccttcgatgaagtaaaattggacggcaatctggtctcccagcttctcacgaataaacgatcccgcgaaatcgtctccagtatcattcaaatgtcccggaatttaaactgccggatcgtagcggagtttgtggaaaccgcagaactgcgcaatgttctctcagagcttggctgttccatctatcagggctattattactgccgccctctgcctttggaggaattcatggattatatcagcagactgcctgaaaaaggacatggttcctgatgataagcggcctgcttccaacgggaatggcctgcacagttagaaaatcggcataaaaacgtaagaaaactttatttgaatgaatccgttatttgtagtagattaaaagcatatggatttaaaagccggacaatcaactgttgagcaggaggcagaaagaggaacgaatatgaaacgaatggtttgtgccgtattaagcggcatactaattttaggaaatgccggttatgggggaatggtcagttacggggcccccacctatgcagaggccaatgccgtagggcctggtattaaagctgcagtcggcctcaatgattttctggatcaggaggttccgaaccccattgtaaagccggcagataagtactcgtacgagcagatggaagccgatatccagtctctcaagaatacctacggagataagattaccgtcaatgtcattggtacttctctggacggaaggaatatttatgatatcatccttggcaatccggaggcgaaatcacagatcctcatgcagggcgccatccatgccagggagtatatgacgcctctcgtgatgatgagccagctggagtatgccctggccttttacgataccgggcactataactacaagtctgtaaaggatatgcttaagaaagtagccatccatttcgtccccatgacgaatccagacggcgtaaccttaagccagtttggaattgatgccatacgctcggacagcttaaagcagggtatccgggactgctatacacgggatgtaactttaaaaagaaccgcggattccttcgaaacttatctgactaagtggaaggcgaatgccgccggcgtagacttaaattataattttccatatggctgggatgaactggccacgaagctgactgagccatcctctgccagctataaaggccctgctcccttctcggaaccggaaagccaggcactgagaacactggtggaccagtatccgtgggccgtcaccgtgagctaccattcccagggccaggtcatctactggactacgagcagcaatggagcagagctggcttccaatacgctggcggaagcagtctcggtaatgaccggttaccggatggataacagtgacggcaaaggtggcttcaaagactggatgcagtccagaagcggagcagtccccggagtaacactggaagtcgggaaaacgccctgccctgtcccattcgcagagtttcctgaggtctggaggcagaataagggagtctgggtacaggttctcgattatgtcgtgcgccggatctaaagaaaaagtgtccctgcagcagatttacctctgaccatcacaaattaaacagcagcggcggagcccatatgacacagtgtcatatgagttccgccgtctttataagtgaaacgtattctttttccacgcgattttaacctggctatttatggtacgcctgcccattcataatccggtaccctctgtagatctgttccagcagaatcacccgcatcagctggtgcggaaacgtcatcctggaaaaactcagcagataatccgcccggtcgaggacctgttttgagagccctaaggagcctcctatgataaagataatctggctcgtgcccgacacgcccagagcggcaatcttttctgacagttccacggaatccagcatctttccctcaatggccagagcgatcacataggcgccctccctgatgccggccagaatccgttctccctccttctccctgatctgagtttccagcgcctctccggcatgatccggtgtcttttcgtctgccacctggataatctccagtttacagtaccggctcagccgcttgctgtattcttcaatcgcagcagtgtaaaatttctcttttatttttccaacggttatgagcgttatcttcatgtaaattcctcttatcttaccggcaggttcttcttcatcgattccagcacccggcctgccacctgggctgcggttttctttcgccgcgtcttgaccctttttaccacttttccatccggtttccggctgattccgcaggtaatccgcaaaaattcttctacttcctcccacgcttcccggctctccggaattaagtccatccccatctggaagacatgaaacatcccttcgtagacagataaacggcggcgcactcccgcccgcttcagtttctccgccacctccagggtatcgcttagcagcacctcatagcttcccacctgcatgagcaccggcggaaacccgtgataatccccaaacagcggcgacagatacggctccttcggatcagcctctccgatataggaggaatgaaaaagcatgttgtcggtggagttcccgaaaaggggatccgtctcataattatccgtgtagctggcgccgctgttggtcaaatcagtccagggcgacatggtaataatacctcccggcatggcaagcctgtgatcccgcagatacatgacgagagccagagccagcccgccgcctgcggaatctcccgctatgatgatatggtccggctcgtactccttttcctgaatcagccacttatacgcatagactgcatcctccagggccgccggatacggatactccggagccacccggtaatcaatcgtgagcacatctccgccaaaactcagcttggaataccggactgcgaatttccggtaaatattcttcatggggccgatgtaaccgcctccatgcagctgcagaatcacacgtcccgtaaagatcccctccggacgtaagtattccatgggaaactgctccgtttccacaatttcgtactcataaccggccggacagatccacgccggctccaccggattttttctcagttcaccgctctgtatgggctgctttaaggaagtctccatcacgttctgcatcatgtcacgcactagattaccgcggacactcactcgtttatctctcatctgttttccctttctttccagccgtctgcggctctgccattctgttccatctgcctgcgccctgccgtcattccatcccgctttacagatgaaatctccgcttcaattccgtcttcacacttctgtcaccccacttaatggtgacaaatagaatcagaaccgtgaccaccacggttacgagcgtcatcagcggacgtgtcaccagcccggccgcccacagaatgacgggaataaagctgaagatcgtgatggcaatctgatacataaaataactctgccagttcaaacggtttacgataatcaaaaataccaccgcaaggtctgcaaacagcagggtactcggtatgccgaaattgactgaccagcctgtatatcccgtcacatgatcgatcatcaccagaagcacctccgccgcaatggtctgtatcacaactttggatgccagattcgcatgccgcatgatggagtatcgtaatgtcagcgccacatagatgatacagccgatggcgatgactgaccacatggatcctgagtatgtggcgaaattgaccactcccagtatggcggccacggcaaaaaggatgccgtaaaaggtgttgactacttccttccaccgtttcggatcgtactggatccttgggtacattgccttgtcgtcacgggaatccggcacaccgttgctctccgtctccacagagactcccagttcttttaaaaagccgaaaaagcggtcctgcagcctcgtatcctgaaataccgaggtgaaggtaaccaccacatgctcgccgtacgcgcacacggcacacttcatgggctgacgctttgagacaccgatcatgagatggaaccgttcaatctcagcctcatactcttcttctactttaatcggaccaatattggaaagcgtcatggtatatgcccggtcgtttctgcggaaaatcacattcagggcaccccatttcaggaagagcggagcgattctcaaataccatttcttttcattggaaacattataggagatcgtctcctccagcttttccctcgtaatattctcatccatctggcggcttactgcctccactgcttcggaaaactcatgctctttcccatctgccagaaattccagcagcgtaaccgcaaagaagttggccatggtctcggaatcgaaaaatgcccgcagattaatgggcagactgatcccgatcgaccggtccccggtcccagcttcttcatattcctgataaatggcccagatcagggcggcggcaagaaattttgtgatgcttacgccgtaagactttccgaccttttttaactctgccagatttacataaccgtgcagcacgctttcctcatcgagaggcagcggttctccgcttatgtgaaacgccttcctggtgctgtattttctgcgggcaacctctttataattgcgtacgtagctgtcttccacgttcatggatacatcagaggatatcttctgtggagccggatgaccggtcctgccgtcgcgggttaaatccagataccggtaaaccagtgctttcagaaagttgactgcccccagcccatccgttaccgcatgaaatacctccagattgatccgtttctcataatagctgacccggaacagatagtatggactggttcgcggatcgatatatttacatggatacgcagtttcccgctcaataacaggcatccgtttattcgactcaaaataataccagaaaaacccgcgtctcagtctcacggcaaagccttcaaactgaggcagtatctcctccagcgcccgctgaagcgttcccgggaccacctcttcctttagtgttaccgatattctgtatacattacttaaatgctcattggcaatgacaggaaatattttcgccgtattgtcaagacgtctccatctctccccctgtggactcttcttcatcgcaaaactccatcctttccaactgccgcactctcctgaacctcaaaggcaaaacggctccgttccctaaaattccaggagcatatcataccagacagccccgccgtgaaccgatgccgacagccccagattccgatagccgaatttctcatagtaatggatcagacggtccttgcaggtcagaatcatcccctttttcccccgcgctttcgcctcctgcatcaagcggttcatcagatccgccgcgaccccctgcctccggaactccggtatcacatcgagtccgaaaacactctgatacagcccctccgggcggtggagcccgctgtcctcgaacatctcatcacggatggttctctcatcagtcacacagccgttgataaagccgatgattctgccgttctcatcctctgctacaaaaaagctgtccggaaatgtctcgatccgctgccgaaaggacgcttccaccgctgcctccgctgtcggaaaacacagcgcttccacttctgtcacctgatctaagtcttctattttaacgtttctgatcgtgtaatccatctgtctgatcccttcttatcattcgtttttatcactgttttattcccgcgggcaacgagccggacgcgctggcgcgaccatttggcgactgccggcagataaaagaaaaggcggaatctgcggcgtcagacccgcagatatcctcctcttccatcgtctcctctatgactgggcgcggaaatagtatccgaccccccatttcgtatgaacatattttggatcgctggggctcggctctatcttctcacgaagacgtctgacatggacatccacggttctgacatcaccggaatccatggccttgttcccccacacatacgtaagcagctgttcccggctgtaaaccttattcggattacaggccagaagctccagcagatcgaattcctttgctgttaaattgatctctttttcgccgataaatacacgcctgctgtcccggtccagctttaaatcgccggaagtcaccacattggacccggcccggctctcccgcctgttcttcttcgtattccgacgcataattgccttgattctggccttaacttccaggatattaaacggtttcgtaatatagtcatcggcgccgtattccagccccagaatcttatccatgtcgttgccctttgccgtcagcatgataatcggcatctcggaaaactcccgtatggcctggcagacctcgtaaccgtcaaacttcggcagcatcacatcgagaagcaccacatcatactccttctgctttgctaaattgatggcttcctctccgtcataggcgcagtccacctccatgttgtcctgctccagactgaaccggattcccttcacaatcagtttctcatcatccactactaaaatacgagccatgtcacacctctgtcttccactcacactgttatgtcatctttaatcttttcaaatgctgcgttcttaataccggatatcttcttgatatcctcaatcttctgaaacccgccatggctttcccgataagcgatgatatcatcggcttttgcttctccgatcccctttaaggtcatcagttcttccctggtggccgtattcaaattcactttctcttttgccgcgctgccgcccggctcacttccagatccggctgcggccatgcccggtaccataacgccgccgcccatgctgccgcttccgctggcggaatcaatcccgtagcgttccgccccttccatggattctccatccggaaccacaatcttcatgccgtcactgacaatctgtgccatgttcaaatactgctgtgccgcgcgttcggtaaatccgccggcccgctccacaacctggaaaattctgcttccctcttccatctcatagacgcccggcaaaaggacttccccacagatatgtacgtagcagaccgctgccgttgtactttcagaaaccggagtctgtaatacttctgacgtctctgatgcctcaccggatcctttatcatccggcccgcttttttcctccggcatctcttctccccggctcatctctgtgtcaccggggccgctcaaaaccgacagttctccggattcccatccgccctgtcgtccatcacagctgcagcatatgcatgcagccaacacgcatatgagtatgacagccgtttttactgcctgatatctatatttcatgatatccctcctcttttctcagggaatggataccatcttcagcctatgatactattctacaaaaagataccagtaaatacaagcactatttccaagtttaagcgaaaggttccgccgggcaggaagaggcacgggacagtagcacacgccagagggcgggacgggcatatcggagttttttgagcagaagcccgcggacagcagaaaaaccgtctgacagccagaggtgccggacggtttttctgcgtaactttgttaattaaatatgataataccgatcacagctaccaccgcgccaatcagctttttccattcaaatccggctttttccacaccgaacagtccaaacagttcgattccgtacgccacgatgatctgggatataacgatgataagcgccgccttcgcaggccccagtgaccccatactgcgcactacggtatatgtgataaaggcgccgataattccgcccagaagcatgtatttcggctccacctggagaatccccgaaatattttcccttcctgaaaaataccagatgacaacacaggtgataaatgcagtaagctgcacccagccggcagatacccatatgctggtctgcttcgtaaccccagtattcaaaactccctggatgctcatcagcgctcctgaaatcaatgctatgataaagcctgtcatagaataacctccaaatccgtcatgcatttctaatctttcccttatcatgcgcagaattggaacttctattcatccacatatcatcttgacaccgtactgtttttgcgatatactcacacacggaaaagaaaacagaaaaagacacgctaggggagccgcttggctgagaatggtattatttacatgaccctcactacttgaaccggataatgccggcgtaaggaagcagtatgatccatacttcatgaaaagtagtcccctcctgtgtgcaaacaaaggaggatttttttatgtcatttttcttaacctatgcggcggacagcgaagagtatgtactgaagcccgccggttatggcctgcttatcgtattgctggccgcgctgctgtttgtcatctataaactgggtaaagcatcgcttaagacgcagcagatgcagacgaaacagctcgtttactgttccgccgccatggctcttgcagtcgtgacttccttcatcaaagtggcgtccctgcccttcggcggttccatcaccttattttccatgatgttcatctgcctgatcggctacatctatggagccagaaccggactgatcaccggcctggcctacggcatcctgcagttcatcgtagaaccgtatatctacgccccgcttcaggtgcttctcgactatccgctggcattcgccggactgggactggccggattcttcagttcgaaaaagcacggcctgattatcggctacctcgtgggtatcttcggccgttatatctgtcatgtgttatccggctacatattctttgccgcttatgcaccggaaggcatgaatccgtttttctacacactcggttataatgcgacctacatcgtaccggaggcaatcgcaactgttatcgtcttcagcctgccgcctgtggcaaaggcaattgcccaggtaaaaaaacaggcgatcagttcgtagccgggccgatctgataagtggaaggaggggctgcaccgcttggtacagcccctgactgctattctacatgatatcgatccaggtaatcatctctccttcccccctgttattccacagaaaatagggaactgcctttagtttcactgcctgtttttccacgaaagccttctcatataagcattcctgccttctgccgctgtaacgcactccaggaactgttattccataataaccgcccaatgtttcttcccagtaaagttccggttttccctgtacatccacccggcattcatgaagatacggtccgttatcagcctcttccagacagtaaaccagaggtccccggattaaggctgctttgcccgcatcatagaatatccgctgatctgcctgacaaaaagaaggctccatctccagaacccattccagaacatccccatccttccattcccgttttaccaccagatatcctctctccacagagaagtccgtcacactatgctgattcatggtcagagaatagcggacgcaccactgcggaatccgcaaagcaagctctccggataccgggttctcgctttcaaatcgaaaaacagatctgcccttccacgggagttctgactcctgtatcaatcggaaggttccggatggcagcgtcacctcccgttcacttccaatatattgatgaacataaaaccgttctccgtctacagaataaatcaggctctgtaaatccgctattgtccgggcaatgttgggcggacagcaggcacaggcataccaggcctgacgtacggtttttacatgatgccgctcaggattagcttcgcagacctctggcacggcctccagcgggttgacataaaaaaagtgtctgccatccagtgacagccctgaaagcaccgtattataaagagccttctcaatcacatccgcataacttgaatccgcttcgttaagaagcatctccatagcaaaacgaatcagccccaccgaggcgcatgtctcactgtaattcgtgtcgttaggcagatcatacgccctggtaaatgcttccccggacggtgtcgaaccgatgcttccggttatatacatctgtgttccggttatatttttccagagttccctgcaggtatcgagaagcttctcatcacggcagcagcccgccatgcgcgccatggctgcatacatataaacggctcttacggcatggccaaccgctttcttctgctgccgcaccggaatatggaactgattataatacgcatagggatactgattgtattcccggttaggttcatctacctggcctctggtccagtggcttatccgtcccctccgctcaaactcttcctcgaaaaaccggttgtttccacgcgcttccagaaaataggaagacaagttcaaataccgttcttcgcctgtaacatcgtacagctttaacagcgccagttcgatctcctgatgtcccggatagccgtggaatttcccctcctccgggccaaatgtcctgtcaacgcagtcggccagccggcaggccgccttgaggagaccgtctttaccggtccctttgtgataggccacagcggcctctatgagatggcctgcacagtaaagttcatggcactccaacagattggtccatttccggtcaggttccttcaattgataataggtatttaagtaaccgtcttcctgctgggccgatacaatatagccaataatttcatccgccttttgttccagatcttcatctcttccgtactgcaggatatctcccaccgcttcaatccatttatacagatcactgtcctgaaaaacaaaaccggaaaattccccttctttcacgcctgcagctatctgaaagtttctcaccgcgtgactttccgtttcgcatgggatccggtccgttaaaatcccccattggtagggaatcagctgctccctgacaagctttaaataccggtcccaaaagggtgatttgatcatgcagtccatctatttatcctccttttctgcctgatgcagagattcgctgtactccttcggtgtacagcccacatatttcttgaacactgaaataaaatagctgttattctgaaatcccgtcatatctgccacttcactccctttaaaaccactgatcgccagcagaagcttcgccttttccagacggtattccgtaagatactggacaaatgatttcccagtctccttcttaaacagctctgaaaaatagtttttattgagaaacaccacctcactgatggattctaaggaaatatcctcgtggtaatggtcctccatgtaattgagcgccttacggatcacccggctgcatccgttagaatccacaggcatatcatccgttaagtgctctgccttcagcttccgtatctccgtctccatcagctgtacctttttgcgatgcttttggctctgcatccattccgccttcaccgtctttagaagctgatacatctcctccggttccacaggctttaagatatagcctctggctccattggcaatggctgccttcgcgtattcaaaatccgtataggcactgacaaaaacacagataatttcgggactgatcttttttactgcctccagcatatgaatcccgtccaaaccgggcatcttgatatccgatataacaagatcaggttttaaacttctgcaaagctttaatgcttcctccccatctcctgcctgccccgtcacttcaatccccagatgaaacgattctaataaatctgccagcaaatagcggacattctcctcatcatccacgagtacggctttaaaatcccccatctccttcctccttttctatctcaatgcggaaagacacactggttcctttccccggttcacttatgatttgtaagtagccggatgctccgtagcttaagaaaagccgcttattcacattctttagaccaatgcttttcccacttcccatcccacttttctccgttccaatttccttcgtggcaaaatccatgatatccccggaaagctctttcagccgttccgcctcgattcccagcccgttgtccttcacttctacgtaaagcgtctcgccgtttaccgaacaggtaatcataatccattttaatccgtttttcagttcaaggccatggataaaggcgttttctaccagaggctgaatcagcaggcgggccattctgcattccctggaacgcgggtcgatgttataaagcacctgaatagaccgctgaaaacgatattcctgtatccggatgtagtttttcacataggtcagttcttcctccagcgtcactttctccttaccgtcacttaaaatataccggtacatcatccccagggcttccgcaatgctttctatatctccattatgttcccgaatagcaagcccccggatcagttcaaaggaattagccagaaaatggggattaatctgagcctgaagcgccaggagttttgcattgatgttttcggttctgatctcagtcatctttgtcatcatatcatccatttttgagatcatggaattatatccctgttccagaatacgtatctcttcaaactggctgatggtgtgaatctccaccagttcccctgattccagccgcttcattcttcccgtcagcttctgcagcggcccggttaaatagcctgcatacttatatacactccaaaccgataccggcatgataatcagcaaaagaatgatggaggaggtcagattgtcctttaagctttttaaggcaaacgcgttgctgtatctgacctggagattccagccgttatttaacggatagaccagatggtaaccggaatccatatcgccaaagccaaaattcttataaacaatgcggtccgttttttctccaataaaagagcggtccggaaaccagaatatagtttcgtctccggccgtcacataggccagacagtatcggtctaaattaatcatctttaatatttcttccatataagatgcccgcatatcaatctgaagaacgcctctgcgctcctttccctgtctcagacggtagacatttttcagataggaaaatacctcatccgaatcgggaaccagttggtattccggtacagagggcggcacatagcagtcatcaccaccgctctcttccaaaagggatatcctgctgtttccatagaaatgttcccggctcacattagaatccgttgtataaagccggtcataattatccagccagtagatattggtgacaaaaggaacggccctgcgaaacgtctgaaactggttctccgtgtttttgaaaaagtcaatcccctcttttgtccagaccggacggattcgatcatattcctcggattgggtcagactgtccacaatctggtactgcagcacgtccagctgatttaacatattatttaagctgttcctggcctgttccgacatttttatgatctcttcctgattctgcaggatcgtatatcggtagatctgataaagatgaagaccgcttaaacagactgtaacaagcagtatcaatatcacgttggaacggatcatatcggatctgattgttttctgcataaagcggccctcctgtcatcttctattctgctgctgtatatgattcctcttgttcaacccaaaattcttcccggtccaggaatgctgcgccaatctgttcgatcaccagattttctttatccggaatatattttgcaccattataccacatcatccacccattctgcaccttaagaacatacggcttatagacggctttttcatcaaagccatcaacatccggagcaattataggattggccggataccgctcccagccgctgatcccgtcctttgatctggccagtccgatggctgcccggtccacatggataaaaccgatatagaacatataatagtaattcttccatttcagtacctgacaggctgctaccttctctctttcccatggattcttctcttccttacgaagaacaggatttgacacctctttctcccagtttcttccatcacggctccaggcatatccaacggcgtccggttcatggtttccgcctccgctgtaccacatcttatatactcccgtctcctcctcatatatcacatggggacacatgactgccttctgctcccatggctgatccggcacaagaaccggggtgttaaaccgttcccagtgaattccatccctgctggaggcgtacccgatacaggaacggccttcattcgtatatggcttcatctgtccggaataccacatttcataaatgccgtctctttttatcacactgggccggttcagttcatccgcatcccacagtgattccggattcggccttaaaacttccaccggttctttccagttcagcccgtcttcactttccgtatagccaatgcactcgtgcgggcgccaggaaaaccacatcctgtaaattccgtcctcgtgaagaaccgataaatcgaaacacgttccatattctccgcccagcaccgggtttttctcatattttctccacccatcactggttccatatgggtaaaccgccagattttccggcgtatcccagaaaaaacgatcctcgtatctggttacataaaaaccactctttgctaattcttcgctgtacttcagcataagtatcctcctctatttttctttttctatcaggctgcattcagcccttgatggaaccggccgtcattccttttacaatctgtttctggaacatggcgtaacagataatgacaggaatcaccatgatcataaccgtagccgtaatcaacccgtaatcggccgcatactgagacctcatattataacagacctggtttagagtaatcagattctgtctggatatgataagaaggcttaaaaaaagatcattccagcaattgataagtacaaaggttcccactgtggccagccctgctttcgatagcggcagcataatctttaaaaaagtctgcagtctgttgcagccatcaattctcgccgcatcctccagttcatccggcagccccatcataaacgggaccagaataaagatgctgaaagctaaattcgtgacaataaacgccagtatgacacccactctggtatttaatatccctactctgcggaagatcagaataaaagggataataatggcattaatcggaatcataattcccagggaataataatgatacagtcccctgttcttccataccttggcaataatgtacgcactcatggcgcttaagatcactacaacggtcacggcggcggcggcatataaaatactgtttaacagatgaaccggaatatctgccacctgccaggcttccgcataattttcccactctggctgtctcggtatcccaaagggcgatccatagatttcctcgctcgatttaagagaacataaaccaatccagaacaggggatagagtgtgataaacgtcataaagacaagtactgcatatcgcagtattctaaaaggatttaattttttatgcataaccggcctcctaatcatttctgtttatgaatgcaaagatacggtttacaatcattgtaacggccagcgccagaatcagcatgcagacagctaccgcagttcccctcccgatcgaggaatccacgaaagcctccttatacatgtagatagagagaaatgtactctccgcccccggtcctccctgggtcataaggtaaggaatatcaaaagtcttaatggaacctgtcaggcagataacaacacatacctggatcattgccttaatattgggaatcataatacggaaaaatatatcaacggtattggctccgtctatgtaagcgctctcgattaattctttgggaacagactgcattccagccagaagaatgataaaatggtaaccgatgtactgccagattccaggcataataacggaaaataataccacccctggatcagtaagccagtttttaatcatacccttccagcccatcgcttcaaaaaatgcatttaccgggccaaaggccgggttaaaaaacagagaaaacataagaccgattacggtagccgagataacaacaggcacaaaatacacggactggaaaaaatggaagccacgaactgtgcggtacacaaggtatgccagaatcagagccagaggaagctgaatgcagacaccagccgccatgctttttaaggtattgaaaattactttcttaaagtatctgtcgttggtaaacagatccacaaaattagccatcccgataaattttgactgagtaacgccatcccattttaaaagggaaaaatacaacgatgtaatcatggggacaattaaaaatattgtgtataaaacaaacgatggaatatggaaacagatagaaaaaatccattttcccttctttatattattttttttcttcattctaagttccatggcaaccccctttcacagaagatccgggaatcaggatgcaaagattcccggatctttcagttgttaattttcctttgccgctgtcagagacttgttgatattttcaatcacctgatccggcgtgctgattcccgccattaattcatcaattccatcagcaaagtcagtccagcactccgttttcggacacgcctgcggaaggttgggacaggattcttttcctcttgcaaattcaatcacttcagccagtttctgtttttcaaccttatccgcatcgacttctatatccagtctggaagggatacctccgccgctgtagagagtaagttcctgaatttcgcgtgaataaagataatccatcagttcgatcaccgcatcttttttatccggatcctcccatgcacttctggaaattacataccccatgtctcctcctgaccgtgcaaaattcgacgtatcccttgttccgcccggcatacctggtgccggaataataacagtcttatctgccatctccttagacatattggacaactgccatgtccacgcatagatcatggctgcttttccttcgttatacatggcaaaatgctggttccagtctccaatggaaatcgtatcagacgggaacagcttgttctccctcatagtctcaatgatttcaagagtctttctgatattcggtgtatctacagtatactcttcatttatctttctgaaatcttcctgacagtcaggcatctgtcctaatatttcggcaacaaactcatgagcaggatttccgcccttagaacccatggcaaaaggaacaataccgttttcattaaatacctttcccactgcaatcatatcatcaagcgttttcggcagttccagaccgtattgatcaaataactcctgattgcagaaccataccccgtactccagtccaagggtaatggtagccagagttccattggctgacgttctgtcaaaggaatcctgcggaaagagttccctcttgatgttctgggatgcatccagatactcgtcaaagggaatgatgacgtctgcatccagaagcatggcggaattgccgccgcttccccagtaaaggaatacatccggtaccgtattgctggccacgtcagtctttatcttagcttttaattcatcacccagaatattctcgtgctccagtttaaattcagatgcatgttctttggcaaactggtctactgcatcataaaccggttttgtctttggatcagaaggtgtctgccagctgaccaggcgtatcgttggaacgttccctttctgggctgttttttcctgttctgtcgattgttcccgggcagcggcagtagtttcctgaccaccgccgacagcttccgttccctgctttttcccacatcctgcaagcagactgccggccatggctgcacataaaacaatacccaataccttttttcctgtttttctcataagtttcctccttaaaacgcggtatatccgccatcaattacatagtctgatccggttacaaaacctgatgcatctcctgccaggtatacaataagagccttaagttcatcggcctgaccgaaacggcgcagaggtgtccactgttcgaaattggattgtcccacttcctccggctttaacggtgtatcactccacgtcctgatatagccgggacttacggtattgacccgtattccatgtctggcccactccacagccagactcttccccagcataatcacccctgccttggaagaattatacgcacattggcactgtgggatatttgcgatatgccctgacatggaagcagtcagaattatggaacctgaaatatgattttctatcatactgcgtcctgctgctcttgcagttataaaggctcctgtcagatttacctctatcacccgtttgaattcttttaacggcatgtcctctgccggaatatcctggaacgtaccggcattacagaagcagatatccagttttccccattcagccgccacgttttcaaccacagccagaatctcttcctctgccgtaatatctgcctgaaacgccagggcatgtttccctgtcttcctgatctcttctgcagtctgaaatacctcttcttttaaatcaacgaccgcaacatcagcgccggcctccgctaaagcgagagcacaggcctttccgattccatgagccgcacctgtcacaatagcggttttaccgcatagcctcatttcttctaaaatcattctctcaacctccaaattgtccgcgaatatattcaattccctggcgggccagcttgagacgggattccagtgacagatccggatcgagatcacgccacatcctcatattatgtccctgaacgccgccgaatttataaaaagactctacaattacagctttgtcatagccaatgtcccgaagtgcccgtcccacctcattccatggaattctgtctgtatgatagggaaccttcctgttaggctcactcacatgaaaatgtccaagatagcccctggcgctacgtatagcttcaggtaaactgtcttcctcaatattcatatggaagcagtctaacagcagcttacagtttgggcttcccactgccttgcagacctctattccttctgccgctgtattcataagataatgctcgaaccggttgacaatttccagatttacggttacattgttatcttccgccgtcttcatcacctttcttaagccggcaatacagttgtcctttctcctctttttatcatcaggctcaatcacctgtaacgaataatcggcaggccagttggaatatacaattccgccaatcccggttgctccaagcacccccatactctcaataatccgtttcaaatgctctactgccttttctctgttcgcctcatcttcgccggccatatcccagcctgcaggatagccgaacgtaaaggccggttcaatcccaatctcttccatatacattttaagttctcgaattttatccttttccatgtcaaacatctctttcgtaggaaaaaattcaaatacatcagaaccggcttcctttgcctgctttaagcactcccgcacccccagttcatcataccagcttcccaagtgtccaaaatgtattccatacttcatatcagttaaaaccacctctcatactcaatttcagcttcataatcagattcctgacgacgtttccggaatatcgtctttggccgcgcggatattcttatccaaaccaatcattgatatccgccgcctttatatttattatatacaacggtatcgggatactaaatccaaaatatatcatatttatatagttttcttcggtttttgagtttattttaggtgttatgctgcaatttttatattataggagcccttttctgcaataaaaaatacgcagaaagatattgcatcctcctgcgtatttcattcttatgtatctttaaatccaatgttcccattctttcgacagatacgcctttgttcccttaagcatatcgatcaccagcaaacgcacatctttttcagatggctttttcgctttcacattcggatcttccagaaaagcctcaacaaccagttctaaatccgggctgagagccgctctcatcgtcttatcatgtacacgaacgtgaggcattatcaggtctaagaccggctgaggaagacttcccgccataatcggccggatactgttcctgtcaaaaatggcattcgtctccaccacctcatcgaccggcagattactgatctgtccgtctgtattgggtatattaacattcgagaccattcgtcccaaaccgcacagcgccttgatcagcagaattccctcttctcctgtcggtttcagttccacctgctcctcccgttcaaacagcttccggctcttttccagtcgttcttttaaatcattctttctccagtccactgtggtcaggccaaatttccacgactttaccgtctccggatccttcaaatagagatcgccaggcataaactcagccagatggcggtcacctgcggccgctatcataccatacttcttaaataagtcaaatttcacccggtgagcgcagtgaaacgcagaattcatccagcttctatccttttcctggaacccttcctcaaaatgactgtcaatataatctctgtatacaggaaataagtcaattcctctgtatgacgcatagtcaaaccatgtaaaatgattgatccccaatacgttgacatgaatatcgcttctctcaatatccttcaggccaagcatctgttctgtaataccctttaagacacgctgagtgccaaacacttcatggcagcatccaaaggccttaatttcaggaaatacgcaataaagtaccttcacacacagcgtcattggattggtataattgattacccatgcgtccggagaatattttttaatcgcctcaccaatctcaacaaacatcggcagggttctcaaagacctcataattcctcccggccctgccgtatcccccactgactgccagattcccagacgttccggtgtatgtacatccacagccatctcatcgaacgttcccggcagaatagaaatcactacaaagtcagcacccgtaagagcagactccagactgctgtatgtctcataattccatttgccggatgcgtcctctcttgtacttaaatcattgccgattctttcattatggccggccgcttccatgtcaatgtcatacagccggattgtaccggacatatttttttccatagccaggtctgtcataaatgtccatgcccagcctctggagccccctcctatatatgcgatctgaagatctgaaaccgcattctgcttctcatcataattcataactgcctcctctatacgtctcacaggctttttccatcatacgtatcctctcatagggcagattaccgggcagtgtacagtcactggccagaataaaacccggataatcattttccgccaggatattatggacttcccgttccagttcttccgggcttccggaaatcaggatctggctgccgtcatccatgcctcccatgatcaccttccccggaaacagctttcttccctcaaaaagcttcacaccactctccaatattccccagtttaccgcttcacacggataatccacgtagcgttctaaatctacaagcggtttgcacatgtgcagaatattaccgataggcgcatggtcaatctctctcatcaactgctcttccaggggcgctatataacgtgcatgctcttcggcggtaaatccatcacgttctccgcccagagcggcatagtagatcccgtcagcccccgctgcaatacactcttctgccagaatcgtcagagactcggcaatcgcctgataagcactgtatacactgtcgggatttgtacgcagatgatacagctgggcgtaacgccccaccttatcatatctggaacactgcatcagcgcatgggaagccgatgccacgatcccgtgtaccgtggcaatcacaggcgcatcgtctgcggtactgtctacgatccttttaaccagttccacctgagaacggataaacggatggtttcttccacacgctttcacatcagcccagtccgcagcctccataattgggtgttggacggggtataaattttcattcataaccttacaaatatcagtttttgtttcttcaaaatattttaaatgtgcagcaagggcctcctccccatgatgctgctccgtgggaaaatgcatccagaagcccatcggcgtcctgtctggctcttctcccttaaatactgctgttatccgttctctgcggttcataacctgtcctttccaaaggcgtcggttaaagaaacagctccttcccaatcgtggcaatgtcatcgtgcagcagctgttccgctttttcaaagttgcgttccatcagcgcatgctcaatttcgatatgatatttcttctcagaattattaaaaaatttatcctgtttttccggcgtactgagcatgtgggcataggcacgccattccagcttaatcagcttggcgattacgtccacagcaaggtcatttccgccaaaagagcacattgtagtgtgaaacagtgtattatgcatccaacgcttctgtacgtcaatattgcccgtaatcacatcttccatccagtttttattcagcgtccgtattttttcaagcatttcttcattaaaagactctgacatcttccggaatgcattcatctcgattaaaagtctcagttccgtagaattcgtaatatccttttgggtcacagggataatctggtatcccaggcggggaatgctgcgcaaaattccctcattgcagagttctattaaggcctcccgcactggagccttgcttactccatataattctataaactgcttctctgtgaggaactcatcgggtggaaaacgctcaacaaccaaatcattaaaaattttcgtatatacctgttcttttaaactcatttttttagctgccataaccattttcctccgaatatctatttctttatcccgccatttttccgttcttaattaataaaactaacctaatttattaagtattagtgtaccattcgcacaaacttcttgcaagtcgtttcgatatgctgccaggttctccagcgggttagaattcaggaacagaatatcagcacatttgccttcttcgaggctgcctgtctctccccatattcctaaaagcctggcggcatgttccgtagcacttttaataatatcttttcttgccatgccggcatgttccatatagagcatctcgtcggcaaactccccctgatccataaagaatccgccgctgtcacgcccaaatgcaatcaataccccctgatcatacgcctctttaaaacgcttcctcttatcgcctatcatagcgcgggaagcaaagatagcgtccggaacaattccacatcccacttcactggctgcagcaatctcatagggcgtaaacgttggaactacataaacgccctgcctgataatctgctcattaatctccggatctaaataagtggcatgctcgatagaggcagcacccgccttaagcagaatttccattcctgccctgctgtgacagtggcaggccactttttttccgtgtttggcggcttcagacaccatggccgccagttcattaagctccagttccacagcccccggatcttctccagcctttcccagacctccggttaccatggccttgataaaatcaacaccttcgaacagaaactgacgcaccgccttccttgcttctataggtcctgtaatatcaaagcctggttcatggccacccaccactttaagcggagtcccactgcacaaaagtcttggccccttaatctttcccttcctgataaaatcccggatagccagtgtttccatatactttccgccgcagtctctggctgtcgtaatcccatgagaaaccatccgctcacaatttattactccctccattgtcagctccgctgtattctcctgaaagaaaaccgccatatgatgatctccgcctaccattgtaacatgcgcgtggcagtctataacccccgggaccaggtattttccctctacatcaaaggttctgtcacacacaaagccttccggtgcagtccctgtcatggtaatccgctccgcctccacagctatatctttccggcagaaatggtcttcctcccacaccattccatttttaaataatgtaatcatccttacctcctattcatactgtcccagcatcagatctaaaatcacctgatcggtacagttcatcccgtctttatccagaatccccagattttggatggtcttttccgccgactgttccactattccatcccggtcagtggcagatattcctttaagagccagcatagccgactgaactgcagtccccgcagctgtagccagttttaaagaacaaccgggttttgcaccatcacagatcataccggaaagatctgctgccacattttttatagctgcttctaccatcggaacagttccatgattcatccatgtaatgccggctgccgctccaatagccgccgccaatccacagccgcagatcggtgataaacgcccggtatactgcttggtatacacggtaatcagctggctcagtgcagctgcgcaaatcatcttctcctcagaagcgtcacatcttacagccgcggcggcaaccggcagcgtcgcttcgatacactggttaccgcttccgcagagcgacatcatgggaagttcacaccccgccattctggcatccgcggcggcggcagtaatatattttacctcattgacaagaccgtgttctccctgtaccgccatttcttttaaagccttcccgacacccagtccatacttccccttcagtccttcatcagagagcttcttagacagttctactgctttcctggtggatgccagacgtctggcatcagccacagaggcaaattcacaaaaatcctgaatggtataccctctcaaatctgtcttcactgattcatctgcagaacctttttcctgcccgggcaccttcagttccgctccatctctcatgacagaaacaatgtttgtatgcagtccatccacgataaccttagattcatggcctccgccacggcagattacttcgatatgaattctgctgctgtgtttggcttcacagacttcaatccggttctgcctcatcatcagcccggcctttttacagacatcgggggtagcatcatttaaaatcatcagttttttatcaatatctgtaagctgtacgcccatagccgccgcggcagtgattccatagctgtccgtattgggaatccccacccccataacattcttgagaatatttttactggctgcgatctccactttttctgcaggcacacccagtgcttttgctgccaccgcacaggcatatgtaacagccgccggttctgtgcagcccagagcaggctgtaattccttattcaggacgtcgtataactcttcataacgtttcattgtatcttctcctcttaccccttaattccagtggatgcaatcccctccaccaaatatttctgcattgtcagaaaaataataaatatggggaccagtgacagtgtagccatggcaaacattgcaccccagtctgatcctgccgtcggatctgcaaacagcttcagggcgtaagccactggatactgaaggggattatttaagaagatcagcgacgacataaaatcatcccatctccacataaaggagaaaatggcgctggtcacaatggacggcttgatgagcggcagaataattctcgtaaatataccgtagatgctgcagccatcaatttttgccacctcgtctaaatcccttggtattcctttgataaactgaatatttaaaaagatgaaaaaaccctgcccaaaaaagtgcggaacaatcaaaggcagatacgttcccacccatcccatctgattaaacaggatatactgtggtatcataataatctggaacggcagcatcatggatacaagcattgcgctgaaccatattccttttcccttaaaattgcatctggcaaatccataagcgataattgcagaagagcataccgctcccacagtggccagacctgatatgatcagtgaatttttaaaaaataccgtgaaagagacattggcaaatcccttccagccctttatgtaatttcccagatgaaaagactgcggcagcagatgttccgcatgacggaaaatttctgtcgtgtctttaaatgatcccataatcatccacaccagcggatatatcataacgcaggcaaaggaaaacgtgaacagatgataaatcactctcattgcatttcgttttaaagtataatttttcatacgcattatccttctgattcataataaacccagtacttctgcgacttaaaaaggataaaagtcagcagtccgataaacgccaccataaaccacgccatggcgcagctgtatcccagcttttcattggtaaatgcattctgatacatataaaccgcataaaaaagggtcgaatttttcggttttccttctgtgatgatataactctgggtaaatgccataaaaccactgatcagctgattaatcaggttaaagaagatagtcggagtcagcatcggcagcgtgatcttaaaaaattttgtgatcccactggcaccatctaccgtagccgcctcataaagactgaccggaacctgcttaagaccagataaaaagatcagcatggaggaaccaaactgccagacagccagaataatcagaacccatattgccgtctcttcttttcccagccatacagttttggaaggaagaccaatcaacgccagaagtgcatttatcacaccatcactggcccaaatccttttccacaaaattgctactgccacactggaaccgataatggacggcagatagtaaaccgcccggtagaagcccgaaagctttgtattcttcaccagcagcatggctacgatcaatgccataaggagacggagcggtactccaaataccacgtacttaaccgttaccattaacactttccagaacaaatcatcctctgtaaacatggtgatatagttgtccagcccgataaacaccggagatttcaaaatgttataccgggtgaaagagtacgccagtgacattaccattggataaaacaggaataccatgaaaccaatgatgaagggcaggataaatacatatcctgcaaccttctcctggtttaaaatctgtttcaacgtcttcttcgtacccggggttttctgcgtttttttcaaggcaatccctccaaaccgtaatcaagctctattgctttgcttcctctaacgtcttttttgcgtattctgtaaattcttttgcagcagtctccacgtccatggaaccatccctgatattttctacatatgtatcgagtttggttgtcacatcacttgacccctccggatcaggtgcatcgaccggtgttgcaacctctccaacttttgctacaaaatcgaatacctgggcattggcgctgtcaagcgttcccttaatcgcttcctgtacatcagtattgaccggaacgccccgttcaccctgaagaatttcgttggcctccactgaatttgtaatccagtctacaaatttagcggcctcctctttatattgagaagtctcggccacagagaaaaactgactgggctttaaatagatcggctgctgggttgccccttcggttgtaggatacatggacattccaaaatctcttcctgctgcggtgaccatggccgaatactgattcgaaaatgagaaatcgttccataccgtaccgtcaataatcggctttgtctcaaccaccttaggatttttttcaaccaaaagttcctgagatatactgaattccgcatcactgaatttctttatatactcgaaatccttcttaacagtagtctcatctcccgcttccagctcgtcccataaatgagatccatagcttctcgcgatctcacccatcagcacataccctccgtcatagtaggtcagcgcaccggttttttcgtaaatcgtctgtccaatctcatacagttcctcgatcgtcatttggtccggtattgttacacctgccttatcaacaatctctttatcataataaattgctggtgcgttgctgccaagagagattgcataacaagttccgttaatactcccactctcaattacactttcaggtattttatccgtcttaatcgtcccattatcgataaattcggaaagattcgccagagaattgctggatacatacttttccaaatatctgtaatccatctgaatgatatctggcatattaccacctgctgtagatgtagccagcttgtcccagtagccgttccagtccgtaaactcaggcataatcgtaacattgggattatccttcatatagagatcaatcacctgctgcgtcaaatcattcctgacctgattcccccaccagaacagttttaaagtgaccggttccccctctgccgccgaggaaacagcttctgtggaagcatctgcctgagcctcttgtgtgctcgagactgactgtttctcagtttccgcggtatcaggtttggaagaacatcccgccacgctgagggccataactgccgccatagtaagtgccaatccttttcgtttcataagtaacctcctcaaataataattttgtatcgcttgcttgcgtttgtaatattcttattaatcatattactaatattattaattgtcaatatatacaacaaaatattttattttaatttataatagtgcatttttcgttgactttctcaatgtcaaatggtaatatccgtttatataggcaacattttgcgtttgtaccattcattttattcatatttgtaatcatatcaattttacttagaaagaggacactatgaaaaggcaaattattaccaactgtaatgtattcgatggaaaacatgagcagctgaaactgcactcacacatcataatagaagataacctggtaactgaaatctcctcttccgacgtctcagcggaaaattttgacgagatcatagatgccggcgggcggatcgttattcccggtctggtggattgtcacgttcacgtagccttaacaggaggcggttctgaaatggagtgtatgcgggcagacgaaaccgccgtgagaggcgcgaaaaacgcggaagaaatgctttaccgcggctttactaccgtccgggatgccggaggactggtatggggaattaaacactgtatagataccggctataccatcggcccaaggattttccccagccactccggcatcggacagaccagcggccactgcgacaaccgcccgggagcggcttccatgcgcacacttaccggctatatgtctcctgtgatggacaataaaatctggattcttgcagacggtgcaaatgaagtattaaaggctgccagagaccagttgtttttaggtgcatcacaaatcaaactgtttttgggcggtgggattgcttccgtctttgatcctctctacacggtccagtatacagaggaagaaattcgcgcagccgttcaggcagccaaagattacggaacttacgtcatggctcatttatacacctgcgaatcaatgcagagagcagtcagggccggagtcatgagtctggagcacactcagctgatggatgacgaaacagcccggatgatacgtgataacggtgtctgggtctgcccctgccctgcattcgcagaagattccatgatggatttcatctccacggaggatatgcagaaaaaatacaggattgtaaaacagggagtggaacagcagacggaattaattgataagtatcacctgaatgtagtttttggaacggatatggcaactaacaaatatttctgtgaagagcatcagcttaaagacttcggcacatggggacggcgttacggcagtttcaagacacttcaggctgctaccggacgtgctcatgacctttttaagctttccacatatcggaatccatacccggaaggcaaaatcggagtcttagaagaaggttccttcgcagaccttctgattgtagatggaaatcctgtaaggcaggttgatttgcttacagataaaaataacttccgcgttattatgaaggatggcacaatttacaaaaatacccttcataatgagggtgtatgatactataaagaatggagatcgtctatggacagagaagtgatttctcaaaaaattgatctggttgtagatcggcttatggctttgggaggagcagattatgccaaagacaagatggcggattctggcaaccgttttaccggactgatcgaacgggattttggaattgaagaatgggactggccccagggtctcggattatatggtttgattaaatgtctgcagggaaaaaaacataaccgctatatggaatttcttgatcattggtttcaacggaatattgcgctcggccttccatcaaaaaatattaacaccactgctccatatctggctcttcttccactctctgagctcacaggtaatcaaatctaccgacagatgtgtacggagcgggctgaatggctgatgaatacacttccccgtacaaaatacgaagtatttcagcatgtgacctcagcatttggtgaccgcaatggggtgaaccttcacgatggggaaatctgggtggatacgctggtcatggctgtactgtttctcaatcaggccggctgcaaactcggacggcctgaatattcacaggaagcactctaccagtatctgtcccatatcaaatatctgtttgaccgttcaaacagcctgatccaccatggctggacctttcatggaaacaacaattttggcggcgtatactggtgccgcggaaatgcctggtttacctatggaatcccctgtctgcttgctgattcagacgattccatcagtcctggtatcttccgctacctggtgaacacatggaaagctcaggtggacacacttgtttcccttcaggatcacaacgggctgtggcacacagtgctggacgatccggccagctactgcgaagtatccggatcttccgccattgccgccggtattttaaaaggtattcatctcggaattctggattcatcgtatctgcccacagcagagctggccatttccgctgtatgtgataacattgctgcagacggaaccgtactaaacgtatcagctggaactggcattggtatgaatgctgatcactacaaaaatattgtgattaaaccaatggcatacggccagtctctggctattctggccctgacagaagctttagaaggctgatcggacgccacagcggcagtaattactaccaagtatcaaaaaatccagccggaatagcaataacaatcttccggctggattttacttacctccaagagccctaagcccctcaaacaatcgtatacccattcttccctctctgcttcgtctgatacagcgcctcgtccgcattctgatacagcgtatcaaaatccgctcctgccccgggggcgatggacacgcctatgctggccgacatactccagctcttgttttccttttcgcacgttacctgcagcgcctgggataattctttcgccttcccttcgatccagccgccatccggcgctgagagaaatactgcaaattcatctccccctattcgccccagcacatcttctgcccggaaatgttttctgataattgacgtaaactccttaatacagaaatctccaaatgcatggccgcaggaatcgtttgcctgcttaaaattatcaatgtcaaacagaaagaacgcataaatcccatctgtttttgcagacagcaaagcggcgattttccgttccgtctctgtctttgtgaggaatcctgtcatctcatcaatggaggccagaatctctttttccttttctgactctatgtttttccggtatgtaaacatgtggaggcagccgtcctcctgtgagaagaagatataggcatcaatccgcatccagaagtatccgtttccatcctgggtaatcataaaatcatatcttaaatgactgtttcctttttcatattcacggattacattttggggggtaaacgcagcgatataccctgcccggtactcttccttaatctgtttttctgcaatcactttaagtccctggtcataaggcagatttccggcccccagactctcaaagtactgctccgtcaatttattcgcagaacggttttttgtgatattaagctcataaatattatcgtataactgctccgtcgctctcttaaacgcatcctgacgttcttcaatcagctgggtaatctgtctgttaaagttacggagaaccgtcgttattaccagcaaaaccgtaataataatcgcagcaataatgaatccggtctgatacaggcgcgcctttatctctctgaccatcattccgttattctgttccacaatcaaatgccaggtcaattcgggtatatacctggacacaatataactcctctcctgacctcccacccccgttttcgtccacaattccaggttggaagagtcctccttccattccagaacccggccgcgaatctcctcctgtccgcagatctcaaaccagtctgtcttattatatcctgtatgctcggaagaaatctcaatctttccgtctccatcgaccagacatgcatttaagtgatatttttcctcatactctttcaaaaattccttcaggtagctgacccgcattcctacccctacaacccccaggaagtcttcatctggtccgaatatcttgcagttcacaaatacagttatcgcattatccgcaccgtttacctcatcgttatccacattcacagagtattccaaatcatttttaagcatactgaaataccagttattttcaggttcatcctccgtcagcactctgtcaactccattaaaattgtaataccggtttgtctgagcagataccagaaaaaccgagtcaaagtcgtatttttcacgatacgtcttcagataagtcttaatcttccaggcgtatgcttcatcttccaggttatctgcctcattctccagatgatccaccagaagactgtcatgagccatggtaatggaaatattgatcggctttgtaaacagagccgtaagctgataataaatcccttctgtcgtcaatgacgccacctgttcgatattattaagagacgcctcataattagcctgatagctaaaaaatgcagttaccacaaaaccaaaaatcaagatcacactgaccagtacgtttgtctttaaaagctcccgattttttcccacaacgagcctccttaatctgacctgaatcccactgttctatttctgatattccttccctgtatttaagtataccacacaatacgttcttataaagttaaaatctgtctgctttactaaacaggacagtttcttacggttttccgcctgaacaataaagaaagaagctcccacggaaaatcatgtgctgtaaaacactgaattccatgaaagcttcttatctctttcagggcaatgaatttaaaaactggtatgatccgtttttcatttactcgttccggacagccgccatcaccagatgctttgcaagcactgctgtcgtcactgcaccgattccgcccggcaccggcgtcgccatggacgcggttccctccagcgtctcaaaatccacgtcgccgcagagttttccgttctcgtccacattgatccccacatcgatcaccactgcgtcttttccgacgctctctttatcaagcatcttcgcccggcccgctgccgctaccagaatctcagcattccggcaggtttcttttaaattcacagtccgcgtgtggcagatggtgacggttgcattctcctttaacagaagcatggccagcggtttaccgactaccatgctgcgtcctacaatcaccgcccgctttccgttaatggggatttcatacgcttttaacgtctcgaccaccgcctccgcggtacacggcgcatagcctgtgctgtcacctgcaaacacttttgcgatattctccggcgatattccgtccaaatcctttttcggatcaatcatgcgctcaatgtccttctcacagatctgcttcggcagcggacggagcagaagaattccatcgatctccggatctccattgatcctctgaaattccgttttaaatccctcatccctaatatccgcaggataggcatagacttcggccgtaaggccaaaggccgccatcttcttcaccgccccgcgctcatacgacaaatcgtccggattttcacccacacggataatggcaagcttcggtatcctgccgccgcactgcttcagcagctccgccgtctcctcttttatctttgcagaaacttctgcaccttttaatgtgatcatctttttattcctctcctcttcagcgcagtgcgtgttccaccttctgatagaccgcgtcggccgctgcggtcccactctgcatcatctgatccgcatatcgattcaattcttcggccttctcccggtctttcatggatttcgtattgatccacacgttcatgaccgcaccggttaaagccgttctgataaactgaacacccacgcccacatcgctgaccgccatccggcttcccttatccgccagaatatccatgatatgcagagccttccctgcagcctccatcacctggatcggaacgagacttgccgtcaggagatgtccttccagcaccgcagctttatgcgctttttcctcatccgtagtgcctggcagactgtaggccgcagccagaggcgcaaacacctgcgcatcctcatcggccagatggagaaattctgctttcagagcttccagcttcccgttaaggtccttcatctcctcttccacgtccgcatactttttcttgccgagagtcagattgatcaccatctgccccaaagatactcccgttgcaccgcccagtgccgccgcaccgccgcccccgggagttggtttctttgatgataattccgccagaaattcttctgtcaccatttctttgatcatagttccctcctgatccgtctcactaaatgcctgcagttaatctgtgccccggccatattccctccgcgggaagcgtacggtttcgcttctgttctgccttcctttaaacggcggcaaaccggcgcctgtattacgtctgccgccattataccataatcacaaaattcgggaaagactatttttttcgttcctttctctgtccatacgctgcatccttactgtcttttacagtgcaggcccgtatttacttaaatacttttctgccagatcgtcaaactccatccggcattttacctttccgcattccgccgccatgggaccaaatacctccagtgtcattttcgcccgctcctcccatgtggccggatcaacgaaatcgatggttctcatattgtggagccggtcggccagtgcaaccagaaccacccgctcatcacagcttgcgtacttatcaaattctctgtattcgtttaaaatctctttcacagccggtgtgacggcaggatctgacaaatacgtttccggctcgtctgccatttcccacacatcatggagcagaccggcacagaccgtgtcctcatcagcccccatatctgccagaataatcgcagtgttaaggggatgcgtcacgtactcgtctcccgagcggcgtttttttccttcgtaaactctttcggccagctcgtaaacggcctccacatttcctctcccgtacgctgttccggcttcccccagcacctcaaacagcagcccatataattcctctggctgtgcatgaaccggcgtgtttctcagataaatccccatattctcccagtctcctttctcgaaagcctctccgacgcgaaatgcccggaggagtgcgggagaatatccgaattgagcccggaaggctctggtgaagccgctgtgtgtctcatagccgtaatccagcgcggcatccagaatttttcgtccctcccgtatttccctggccgcaccgaacaggcgctgctgctttacatagtccattaaagtaacccccatttccgcccggaacatccgggaaaaatggcaggccgaatacccaaaccggttcgacagcccctgaactgacagcggctctttcgcatgcgagcggatatataacgcacactccataaggatctctttctgtcccaacactctcacttcctttttcgttttcttcctgacagttttattatatacgaccggaaagggctgacgctgttccgcaattgctgaattgcagagcttcttcctgctgcgctcctgtatttttttccatccctgcctccatctcattgatttcctgcctttcttctgctatactcatcccggtttaaggcagctttgcattggaaccacaaaaacaaagagaatgggataggattacaatgatcaagaattacgtaacacagctaaaatctgaatttcgaaactacagcggcgccgattgcatgaaggatctcatggccgggctgacggttgcggcagtggcactgcccctggcgcttgcatttggcgtaagcagcggctctactgctgcggccggcctcgttaccgcgattatcgcaggcctcgtcatcggtacgctttccggcggatattaccagatatcaggtcccacgggagccatggccgccatcttaatttccatcatcgcacggtatggaatgcagggtgtattcaccgccacactgattgcgggaattctgctggttctgtgcggcatttttcatatcggcagactgacgggcttcattcccgctcctgttatcacaggctttacctccggaatcgccgtcatcatcgcgctgggacagatcgacaacttctttggtgtcacctcaaagggctccagcgccattttaaaactgttaagctatggccagctgggattccctgtcaatatccaggctgctgccctgggtctcttcgttgtcctgtttatggttttctttccgaaaaaatggaatgcagtcgttcccgcttcttttttaagtattatttttgcaacggtactgtccgtcatcctgaaccttgacattcagaccgtcggagcgatcccaaaaacacttttgctggacacccggttagacttatccgcaattacacctgatcatctcagcggattgatcggacctgccgtcagcattgccatgctgggaatgatcgaaagcctgttatgcggtgccagcgcaggaaaaatggcaaatgtacggctaaacagcgaccaggagctggtggcgcaggggatcggcaatatcatccttccctttttcggaggaatccctgccactgccgccatcgcacgtaccagcgtcgccttgaaatccggcgcccggacaaggctgaccggcatcttccacgcgctgggacttctggcattcatgtttatcctggggcctgtaatggcaaaaatcccgctctccgctcttgcgggcgtactgatggttaccgcgttccgtatgaatgactggcaggaaatcaggtatatcttctcccatcatttcaagggagccgccgccaaatatctgatcaccatggcggccaccatcgtattcgacttgacaaccgctatcctgatcggcgttgtcaccgctctggttcttctcgtcagccggctggcaaatattgaaattaattatgaaaaggtaaacatggaccgtgtccgcagctcggatgcggcgctggcaaaggagttcggcaacgcagtcgttgcctatctgaccggttctgtcatctttgccaatactcaggcaatcgaagaaatggaaacctgtacaaaggagtatgatacggtactgctgtccatgcgcggcgtttcctatatggatatctcgggagcaattgctttcatgcatgtactgtctgatctgcaggcggaaggaaaacgcattcttttgtgcggagtccccaccagcacgatggcaatgctgaaacgctccgatatctatgatatgattggcgaagagaatttttactggagcgtggagaaagcaattttacataagtaagactgaggcattgccccctggagtgcaatgcctcagtcttttccatattacgttcacgttcagatttccgtctgcttcagcacgttagccagacgctttaccatctcatccacgtgttccttctctataatgagcggtggtacaaatcgaatgatactgctgcccgcgctgattaacaccagcttttcttcgagaagcgccttctgcacaatgggtccaaccggcatatgaaactccagcccctgcatcagccccatgccccggtgaacggtaatgcagtcaaactggtcagccagttcatcaagctttttccacagatagccgccgatctgattcacatggtccacaatcccgcgcttttcaaatatacttaacacggtgtcagccgccgctgtcaccagcgggtttccgccgtaggtggtgccgtgatctcccggaaccattgcctctgccgctttcccggaggccaggaatgcgcccaccggcaccccgtttcccaacgctttggccaccgtcatgacattcggcttcacgccgtactgctgccacgcaaacatggaaccggtacgccccataccacactggatctcatcgaggatcagcagcatgccgtgttcatcacacagcgcccggacaccctttaagaattcctcttctgcaggatagatacctccctcgccctgaacagtctccatgataaccgcgcatgtattctcatttaccagcgccttcacactgtccagatcattaaaatcagcgaatttaattcccggaatcagcggcttaaacggctcctggtaatggtcattacctgtgaccgacaacgctcccatgcttcttccgtggaaggaatggcgcatggcaatgatctcgtggacgcagccttctccccgcttctctccggccgccttattgtaggcgtaccttctggcgatcttcagagcgccctcaatggcttcggtcccgctgttggtaaagaacactttatccatgccggatgccgccagaagcttctctcccgcatcgatggaaggcacattgtaaaataagttggaggtatgaagaagcttatctacctgtgtcttcacagcctcgttgtactctttgtcattataaccaaggcccatgaccgcgatgcccgccccgaagtcgagatactcttcgccttccgtatcatagaggaatacgccgtctccatgatcaaatatgaccggaaaacggttgtatgtcttataaaattcctgttccgctttttggatatattcctgtttattcggcatggtaatacctctcatctcccgtcttaaatatggcagttccaatccccttattcgtaaagatttccaggagcagacagtgcggaatccgtccatccataatatggactctggaaaccccctgcttcatggcatcaatacagttctgaagctttggaagcatccccccgcccagtgtcccgctgctcacaaaatcctgggcctcgtcgattgtcatttcggaaatcagggattccttatcttcaaaatccctgtataccccctccacgtcagtcagaaatgccagtttctctgcctccatcgctgtagcaatggcacaggctgcatcatccgcgttaatgttgtacgtcttaaactcttcgtcaaatcccaccggacaaatgataggaagaaaatctttttctaacaggtcatagataatctgcgggtccactccggtgatatcgcccacataaccgatatcctcgccgtccgcgtatctctttttacactgcagcatcatgccgtccttgccgctgatgccgaccgccttcactcccagctcattgaccagctgcaccaggctcttgttcacccggttaagcaccatctcggcgatttccatggtcggctcgtctgtcacacgcaggccgttgatgaactgcggctccatgcccacttttccgacccatttgctgatttccttgccgccgccgtggacgataatcggtttaaagcctaccagctttaacaaaacgacgtcctgaatcacatgctttttcagttcttcatccaccatggcgctgccgccgtattttacgacgataattttccggttaaaccgctgaatatatggaagtgcttctatcagtacttccgccttctgcataatgctctgatctaaatccatctctctgctcctccttgttagtggaatggcaaatctacgccaaattctttacccaaatgctcgattccctcttgaatctcttcccgagaatcaggcgggccagtactctcgccatatcctctatcatccacatgatgtaatcatcttttactgccatcgttccttctcttttctcacaaaattccggtaccgtgttttctgtcaggaacggtagtctgcattaattttcacataatcaaaagtaaggtcacagccccacgccgtcgccgaacacgatcccatcttaatatcggcagtggccgtcacctccggctcggagaggatcttcgtggcctcctcctcgctgtagggaagcgcaaccccattttcaataatctggagttttcccgctgcactctcaaaatacaaatccacgttctccgggtcaaacacagcgccggagtatcccatggcacagagaattctgccccagtttgcgtcatggccgaagattgcggcctttgtcaggctggaggtaatcaccgatttggccagggtcaccgcctgctctttcgtctccgcccccactattttcacttcaaacagcgctgtgcagccttcaccgtcaccggccatcttctttgccagcgtctcattgatgaagttcagggctttcacgaattcccggtaatcttcatttttctccgtgatttcaggattccccgccatgccgttggctagcagaagaacggtatcgttggtagaagtgtctccgtcaacagagatcatgttgtatgtatctttgatatcctcgcggagtgcttccgtcagaagttcttttgatatggccagatccgtggtgacgaagctgagcatggtgcacatattgggatgaatcataccggagcctttgcacatgccgccgatggtcacggtctttcctcccgccgtaaaggttgccgccacctctttattcaccgtatcggtggtcatgatcgccttcgacgcggcggttcccccctccagcgtaccggaaaggccgggggccatggctttgattccagccgtaatccggtccatgggaagctgcatgccgatcacaccggtagaagccacgagaactgcactctccggaatctgtaaagcttccgcggccgccttcgccgtatccagacagtatccgtacccttccgctccggtacaggcgttggcgattcctgcatttaccacgacagcctgggcatacggggaagcggctaccacctcctgatcccattttacaggagccgccttcacgatattcgtcgtaaaggttcccgccgccttacacggcttctcactgtatatcatcgccatatccatgcggtctttatacttgatgcccgcagctgtcgatgcggccaaaaatcctttcgcggcagttacgccgccgtctgtcttcttcatacctgacctgctcctctctgttattcaatgaatcttgtgatattttcctcattcagtgtaaaatcatagtaattcaaatcatcccggaatgtccagccgacttttctccagaatttatttccgatggtgttggacttaaatgcaatcagactcaccttgttaatcccctccgccttcagcgcatccatggctgccagcgccatctgatggccgattccgtgtttcctgtacttctcagccacacagacatggtacatacagcccctcctcccgtcatggccgcagagaatcgctccgatcacagtcccagcctcctccgccaccacgctggtggatggatttctctttaaaaacttttctaccccttctctggaatcatccagggttctgatcccaaatcctttgattccagaccataaatgccagacctggtcgtagtcgtctatcgtcattgtcctgattgtcatacgctcttcccttacgctttccttcctgcttagaaatgccggcttccgttacgggaacattggaaccagcttcagtccctgattctccggaaggccgaacatgatgttcatattctggatcgcctgccctgcggctcccttcaccagattatccatggctcccatcatgacgatccggttcgttctcggatcaatcttaaagttcacatctacaaagttgctgccctcaacccattttgtctgaggtacttcctcccggtccagcactctcacgaaatactcgttctcgtaatatttatcgtagactgccttcacgtcttcataggtcacgctcttaagcaaagttccgtaggccgtcaccagaatgcctctgttcatgggaacgagatgcggtgtaaagctgatggtcacaggctttcccgccgccagggacagctgctcctcaatctccggtgtatggcggtgaacgccgacgccgtaggccttgatactctcattgacctcacagtacaggttatcgatcttggccccgcgccccgcgcctgatgttcccgactttgcgtcgatgatcaccgtgttggggtcgatgagtccctccttcaccagcggatagaccgataagaaagagcaggtgggataacagcccggattggcgatcagacgggcgtctctgatcttgtccctgttgatttccggcagtccgtatacggcttccttaatatattccggtgtcttatgttctattttataccacttctcatacactgccacgtccttaatccggtagtcagcgcttaaatcaatgaccttggcctttgataaaaccgcctcattcatgagagacgcacagaatccctggggtgtggccgtgaatatgacatcgacctgctctgccagcgcttccatattatcatccatacatgcatcatctgcaaactgtaccatgtttttaaataccgacgcgtacttctggcccacgtagctcttggacccgtaccatgtaatttccacatcatctctctgcaaaagcagccttgccagctcaccgcccgcatatccggttgctcccatgattcctgctttcatcataatcattctcctcttctattggattaccgtagttcatactccgtgcctgttactgtcctgccttgattatagtaactttccttctgaaagaaaagtcccttttggggttttcctgtattcttttttataccgctttaccgaagccatgttttctccggtaatgatagttcataattatacattgcaaatgcatattatgcaagttttttttgaatatttttattttactcttgcattttccttgataatggtgtatatttatgaaagttcaagaagccagaaaacagagttttacaggctttggggaaatgttcacgatctatattcaggaggattcttaatatgaaagagaaagttattttagcctattcaggcggactcgacacaactgctattattccgtggttaaaagaaaattttgattatgaagttgtctgctgctgcatcgactgcggtcagggcaatgaactggatggcctcgaggagagagccaaattatccggcgcatccaaattatacatagaagatttagtcgatgatttctgcgacaactacatcgttccatgtgtccaggccaattccgtctatgagaataaatatttactgggcacctccatggcacgtccggccatcgccaagaggctggtcgaaatcgcccgcaaggaaggcgctaccgccatctgccacggcgccacaggaaaagggaacgaccagatccgttttgagctgggcatcaaggctctggctcctgatttaaagattatcgctccatggcgtatgaccgatgtatggaccatgcagtcccgcgaagacgagatcgaatactgcaaacagcacggcatcaaccttccgttctccgcagacaacagctacagccgtgacaggaacttatggcacatcagccacgaaggtctggaactggaggatccggccaacgaaccgaattacgatcatttactggttctcggcgtttctcctgaaaaggctccggacgaaggcgaatacgttaccatgacctttgaaaaaggcgttcccgtcagcgtaaacggcgaagcaatgaaggtttccgatattatacggaaattaaatgaactgggcggcaggcacggcatcggcatcgttgatatcgtagaaaaccgtgtcgtaggcatgaagtcccgcggcgtctatgagactcccggcggaaccatcctgatggaggctcaccagcagttagaagagctggtgttagaccgcgccaccatggaagtcaagaaagacatgggcaacaaattcgcccagatcgtctatgaaggaaaatggtttacccctctccgtgaggcaatccaggcttttgtggaatctactcagcagtatgtaaccggcgaagttaagttcaagctttacaaaggcaatatcatcaaggccggcactacaagcccatactccttatacagcgagtccctcgcttccttcaccaccggcgatttatacgatcaccacgacgctgacggcttcatcaccttattcggcctgccgttaaaggtacgcgccatgaagatgcaggagctggagaagaagaacgggaaataaagcgaaaaaaccggcattttcgccgggaagagcggcttgcccgcctgtatcagaccgatcatatttcatacttgaaaacggagcagacagaaaatgcctgctccgttttttcttccgttccctgtacagaaaaaccggcttaaggattataaagaatcatatgcaaaaccgctttcccagctcctgtattccggtaggaatggggattgtctgcccgaaaccgaatactctctcctttttcaaccggaaacgtctgcccatccacccggatgacgatcccgccctcaaatacggtaataaactctgttgtccccttcagatgcggttctgattcccaataactgccttcctccagttccagataatacactgcaaatctgcgattctcgtcatcaggaaaaatagaatagtttttaacctttccgctgtcttccaaaagaggctgaacttccgacgtcttcacgatctcatatacgcgctcagggcgtacggtgagggcgtcaaacggaaccttcatgccattggaaatcttccataatgtggacagagtcggattcccctccccgcgttcaatctgtgcaagcatactcttacttacactgctcagtttggaaagttcctccatgctcagtttcttctcttcccgcagccgttttatatttttagcaacaattgtattcatggggtccataaaaatgcctccttctattgacattatatcatacatattgtattattatatcgtacagtacaatatattaatcattttatatcattatatagttcttcctgagatttgtaaagcgaaaggaactttttcagggaataaggaggctccatatgtttcatttatctgattttttaatttattgttttatcaccgcctatacgccaggagctaataacctattgtctatgagcaatgccgtacggctcggcttccgcaaaagcatccgttttaatttcggcatccttgcaggcttctcagtggtcatggccgtctgtaccatcttcagtgcagcgctttattccctgctgccaaaggtaaaacctgtcatgcagatcgcaggaggagtctatatgctgtatcttgcatggaaagtcttacggagtacggctgatttagatgccggacaaaaagacggagccggttttctctccggcatgatcctgcagtttttcaatcccaagatatatatttatgcaataaccacaatatctctttatattcttccagtcttccattcaccaggagcattggccggcttcgccgtactgttgtcgctgatcggtgcttccggttccttcgtgtgggcattgttcggggctgcattctgtaattttttctccagacatacgaaggctgtaaatctggttatggcacttttgctcgtttactgtgctgctgtactgtttatatgacggaatgcccggccgtctttcctgggcccgttacccgcggggttttataattttgctttatgattttgctttgtgatttatgaaagaaatccttgcaattgtctccgtcctctggtattctaattctatcagccatattctggcatatctatttatcttccgttttcttaaacggtctaataccacatctgaaggagaatcctcatgaacgaagcaatcttaaaaacatgtatgcagcagtgcaactctgcgtctgaaaatgtaggcattttcgtcgactttgacaacatctattacagtctgaaggaatacggtgtcaatcccgaatcctctgaatactgcgtcttttcgctgatggagcggatttattccatcaacaagatccgtaccctgcgggcgtacgccgattacgaccaggtaggtgtatccctaaagcatctccaggaaatgcgggtacagataaagaatgtctatggaaacggtctggaagaagaataccggaagaatgcttccgacattgagctctccgtggacgcccttgaaatctactaccgatcccccgagatcgataccttcgtcttcctcacctccgacagtgatatgattcccatcatgagccgcctcacctataaaggaaagcacatccacttattctgcatcgacgatcacacctcccactatcaggatatttcccgattctgccatttcaaatgcgatctgcttaccctcttcgaaattgatccccagcgaaaaaatccggaattctggacggaccgcgccctgacagaaattgcagcctggtattccgtcagaaaaagcagcgatatgatgctgggcggtaaatggcttaaccgccttctctgtgaaaaactccagatctcatcccgtgctgccagccgtattatcacttatctaaaggacaacaatctaatccgcgaaacctccaacgacgcaggccacaccggcttttttccggcagtctgaactgatccgttatattggtctttcatgatttcagtgtttatgataaaatagaaggagaatataccatggaaaaacgaatggaggacttaaatctggaggatgatttccttttttccagagttatgtgtgacgaagagatctgccgctgtgtactggagaaaattttgaatatctctatcagaaaaatcgtccttcccgaacagcagaaaaccatcgatttactgccggacagcaaaggcgtgagactcgatatctatgtgaatgatgacatcggaaccatctataactgtgaaatgcagcgcggtaagcgcggaccgcttcccaagcgcagccgctattaccagggtaatattgatctggacgctatttcaaaaggcgaaccctatacccgcctgcgccgaagctacattatttttatctgtacctttgacccttttacagaaggccggcatatctacacctttcagaacacctgtctcgaaagccccgggcttctcctgggagatgaggcaacgaaactgtttttaaatacaagaggaatccttgacgacgtagatgatgagatgaaagaatttctggcctacatagaaaacaccaccgacacctttgcccggcaggctaaaagtccactggtcaaaaagatccatcagagagtaaccgcggtaaaacagaacaaagaaatggaggcggaatatatgacattgatgcagagagacagggagaatattgaacagggcgaacgaaggatggctgctctcacagaacttctcttagatcagaaacgaaccgatgatttaaaacgcgcaattaaagatgaggattatcgggaacagttatacaggcactttaacatcgggtaaaacaacgacagccgccggaaaagaaatggggaaccagcggcattcggccacggttccccatttctttatcaaagctttataaagttctgttctcttctaccagtaaggattccagtccttcattctcctggtcagcgcttccatataaaaatagtcaccccatgtattacattcatcaacgcccctgtttctgcatgtattatactcggaatcccgcgcatacgttccatgaagcaaaaggccgttggagcgggttttatccgtgttggcgcagtgatccagcagagcccggagcatcttatcggcggctgtcagatacttttctgccgtctcttcgtccagataacggctcatctccagaattccgcagatggcgatggccgaagctgaggaatcacgtggctctgtacttcccgtatcaaaatcgaagtcccagtacggaaccagatcttccggcagatgggtgataaaataatcggtgaccttacagaataactcaaggtattccggcttttttaggtaccggtagctcaaggcgatgccgtatacgccccacgcctggcctcttgcccaggcagaaccgtcccggtttccctgatgggtgacgccgtggtccggttctccggtcaccgtattgataaaataggtgtggtaggtggagcagtccggtctcatcacacacttcatcgctgttctgatgtggtttgccgccttatcggcgtaatcaggatttccggtaacctcgctggcccagtagagcagcggcaggttcagcaggcagtcgatgatcagacggtattccgacggttcattgacgttgccccatgcctggataaaacggccattctcccggtaacggccggccagatgatccgctgccagaagggctgcttctctggcatgactgctgccggtcagcttataggctgccacgcaggaaaggctgtagagaaatcccatgtcatggtgatttacatcgatcttttccctgatccgttttaaaaagctttcgacctgtgattccgccgcctctttaaaacatgcctctcctgtatattcataagccagccagatcacgccggtccagaatccggtcgtccattcaacattttctgttggcagataaaagccgccctcgctgttggaactctcaaaaaactcagtaaattccggcagattggatcgtatgatctccgcagccgcatccatatatttcttcctcattgccgcatccgtacccggatactgacggattcgttccatcgtctgcgccatattctgtctcctctctctccgttcctcttttacatcagaaacggatctctcgttttccttaaataggattctatcacctcatcataagcattggccagggcagaccccttatccagttcgatgggatttaactggagaggatctttctgattatcgtaaaacagccgtctctgtgtcgcagatggagatgttccattgtcaataatataggtactgtccttcgtcctaatcccccgccagccaaatgccttgttatttaatcccagcttccggtactcttccaccagttccggcatgcccggtatcatgcagagaaaggcatgctccggttcctcctccatggattccccccgggccagggaggcaaagcttcttccctgaaccgtgtcgggaaccgctgcatccagcagttctaacagtgtgggcatatggtcctgactggcaatcagggcatcagtgcgtccggccgctatccggggccccctgatatagagagggatccggatcgactcatcgtaccagatattctttcccatcaggccatgggaacccatacaatccccgtgatccgccgacagtacgacaatcgtatcttcttccaggccctcccggtccagatattccatgatccggccgaaattatcatccagtccttctatggctccgtagtactctgcgaatttctttcggaacgcttcatcggatcttaactcctccggaacgtttccgcgaaatacaagttcctttccccggtaatggtccgcgtatttttccggaagcagatcgtaagggggatggggcggattccaggacaggaacaggcagaacggcttctccttattccggttgtccaaataatccagcaccacatccgtctcatgctccggcgaccaggttctgccttccatcttttgagggtcgtctctccagtaatggggcgacatatgctgatccattgctccgtaggaataccagaaatcaaagtgatggcgtctctctcccggaggagtaaaggcatcccagttcaccgcgccggattccggcttttcatgaaagttcacctcgctggcgtcgagatggtatttgcccacataagcggtctcatacccgttttcatgaaggacatcggagatggttacctcctgaggccttaacatgacagcttcgtccagaccggtcttacagttggtccacatgccgcagcagtacggatacttcccggtcagcagagaggcacggtggggcgagcacagcggatacgtgctgaccgcgtggtcaaatgccatgctctccccggcaaaacggtccatatgaggcgtgctcacatgatcctctcccgccgcaccaatggcctgggcacgccactggtcggcaaagatgtataacagattcttctttttcatttatcggtcttctcccagaaatgtctcatacgccttctgattgatttccagcgcccggtcgatgcctctcgcctttaactccttgataaaggaatcatattccgaatcaaaatcattgacaccgaggatccaggactggaatttttcatctacataaggtttgatgcttgccatgatgtttttatactctgtctcatcatctgacgtatactttaacgccatttttccgtcgaggtaaggcggcagggaatcgtcgaaccactcgtcatgaccgttgtacagcttatttgcctcgattccgtcttccttcatggtcgcatactcatagtctccatcctggcacataccaatccgatactgggcgccgatggagcggagatatccgatcggagtcagctcagactgaagaaccttgtcagtaaagtgcttactgccatcggcatcccttgtgaaggtatctccctcgattccccagttcattaagtcgcttccttcctccgtgaagaagtagtccataaatttaattacggtcacaggatccttgcactgggaagagattccccagcctacgccaggatatctggatacacgttccttaacgacgccgttctggtcagccggcggtgcgatggccaccatctgaaatcccggaatggtctcctgaagcgtggaattatagtttgccgtacttacccagtcgtgtgtacagcccccgacatctccgccaagcagagtatcccgggaggatgcccccctcgtgaagatttccggatcaattaagccttcctgataccatttgatcatatttgtaacgcctgttttaaagttttcttccagaggctcgtatttcatctgcccgtctctcggataaaattcaaggctggtatcccatagatacaggtactcatccggctgtttccatccggcacggtcaaacagcggaatctcgtcctttaatccgtttccgttgggatcttcattgcggaatgcgtacagcacatcatgaagctcatcgaccgtagtcggagcctttaagttcagcttatccagccagtcctgtctgatccaccagaattcagcggccttcagttcctggtttttgggaatctggtagatatttccgtccagggaatacgccgtctggcggaatctggcatcctcatccagcaccttctggatattgggcgcatgctctttaatcagatcatttaacggaatcatgccgccgtcgcgccccagcttttccagtgaggaagcatctacgtagccgatgatatccgccagattgccggagctcatcatcaggttaaatgcctcttcttcattggaattcgaaagggaaatagtgcccttcaggcttacattcgttctctttgccgcctcctgccatacctgccagctggaatcgaacggcatattgttaaagtttaaaaatacggtaaactcttttggctccttactcaccagactgccttccagcgtctcctccgcagcggcctgtccggtaccgctctcctcttttgctgcctcagtgccatcgctgccgctctttgcagaacagcctgccagtgtacccgcaagcattactgccgccattgccgccgccataagtcttctttttctcattgtgttacctcctcatagatatattagttttaacccttcacgcctccaacggtgacaccggtcttaaagtatttctgcacaaacggaaataccaccagcatcggaacaatggctatgattatcatagcataaattaccgtggttggagaacttaatgaattctgtgttacgattgccgcctccgaggcattggccaccctgtctacaatcatcttctttaacagtacctgcagcggcgcctttctgtcatcatttaacagctgcatggcccagaagtaactgttccaccggttaatcgcgtaaaacagtcccaccgtagccagcgcgggcttggaaagcggcaaataaatcttgaaaaatgtgatgatatggttggctccatcgataaaggccgcttcctccagcgcctcgggaagctgctcaaagaagctcttcataataatcaggttgtatgtgttgatcgcaaatccaaggacaatggccgttctggtatttagcaggctgaaatccttgaaggttaagtacatggggataattcccgcgttgaaccacatggtgaatatggtaaataaagtaaaaaacttgcggaaaaccagcttctttttactgagagcataggccatggtcgtcgtaaaaagcatatttaccgccacaccggcaaccgtgtagaatatggtgtttccatatgccagccagatgccgctcttcttcactgcctccctgtagcttgccagtgtaaaatgtttgactgcaaacatcacatcgccgttctccacataatacggctggctgagcgaagcgatcagcacgtaatagatcggataaagcacaaccagactgatcagaattccaaggattgccataccgatgttaaataccttctcgcctgttccgattacctgtccctgatggatttttttctttttcatctcgctcctccttaccaaagtgccgtatcggaaagcttacggcttaaccggttggccatggtgacaagtatcagcgcaacgaccgcctcgaacataccgaccgcggtggcaaggccgtagttcccattttcaaatccaagacggtaggaatacgtagcgatgatatctgctttggcaaacgtggacggctggtacagcaggaggatagcctcgtatcctacctttaccatctttccaatatttaacaccagcatagtgacaatcgtcggaagaatcgccggtacggtaatattcttgattttctgccattttccggcgccatccacagtggccgcctcatacagctgcggatcgatttccatgattgccgctataaagaccagcgcattgaagcccgcattttgccacagggtcataatcgtgtagatccctctgaaatactgaggctgtaccataaagtataccggctccattcccagcttctccaggatcatattgacgataccggtactgggagacagaaagttgaccacaataccgcatacgactacgaccgatacaaaatggggcagaagcgtggtcatctgtgtcatcttgctgacaaacttgttcttcatctccgtaaccgcgattgccagaatgatcggtatcggaaaacagactaccagctgccagaaggagatcatcagtgtgtttttcagaacccttaaaaaatcccttcctgttaaaaaggtaataaaattgtccagccccacgaaggtgcttcccgagattcccttaaatatgttgtaatcgtaaaaggcaatcgccagaccggccatgggcttgtaggcaaaagccaggaaccacaggacacccggaagcagaagaaggtataaatcccagttctttctgacctggtgcaggcaggattgtttcttgttgtttccacccggttgcttaagcatttgtaactcccctctcataatgaatattgttcgaaatggttcagctcaaaattaaaacaggcagatttgcggctgaagcgtttctctgaaatccactttataccggttctgcaggaaaagtaaatcactgtttttcaggtcatctgcaataggactgcttttttatattcatttttcaactcatcaccaattcacccgattcgcgccattttgttgatttttactgcgcgttcccttatactcgttttacatgcttttcagtgaaagtattctgttacagtaaatgaatgggggtaactatcatgcagcagcacaaaaatattttaatcatcatctgcgatcagctttccgccacggcgttaagtgcctatggcaatacatattctgacacaccgaatctcgacagactggcggccgggagcgccgtcatggaatatgcctatacatcctgtcctctttgtcagccagcccgggcctctttctggacctcccgctatccgcaccagaccggcgtgctctccaacctgccggatcagggctttcccgcggtttccgacgggattccgacgctgggagaactgttttcccgtgccggttatgactgtgtacattttggcaagactcatgactatggggctctgagaggatttcaggtgattgaatccgaggaaatccacgttccccgcacgaatccagccatcaaattcgactatgaaaccttcctggatatcgataccacggaaaaatccgtccagtacctgtcttccagaccagaagggccgtttctcatggtctcagacctgcagaatccgcataatatctgtgcctatatcggagaacacagcgaaggatacggggatttcccgctggaacgggagcttccgcctctgccggaaaattacgattttgacgatattgccaaccgtccggaattcatccggtatctctgctgtgcccacagaagacagcgccaggccagcggctggaaggaggatgatttccgccactatttatacgcctattactattatctggccatggtggacaaacagatcgggcagattctcgaagcgcttgcagaaagcggagctgcagaccagactatggttgtatttctggctgatcacggggaagggatggcgtctcaccaccttgtgacaaagtatggcgctttttacgaggagacaaaccgggtaccattcttcttctcgctccctgccggagataacaaatccggtactcccggctcctgtaataagaatgcagccccactgtacaaaaaacagaaccgcatcggcggcatcacctctcttctggacctggttcccacgcttctggactatgcaggcattccctgcccggctggagtggaagggatttccctcatgccacagatcacgggggcaaagacccgttccgaccgaaccgcggccgtggcggaatggtacgatgaattccgtgattataccgtccccggacgcatgatctgcgatgaagagtataagtatatctgttatctggaaccggacagcgaggagctctacgacatgaaacgggacagatatgagaaaaccaacctggcaggaaaacaggagtacgccccggttctggaacgataccgttccctgctgaaacagcatcttaaaaagagcgatgaccctttcttctccctgaagacggcaggtaccgcaggctaccgccgccatccgctgggatttgagcatcatcagggtctcagtgcggtggagaagtacgccctggagattaaacgaaagtagatggtctgacattatgttttcatctggtatctataaaaaccgcctgtataaaattctgattacaaccggtactattgttatcactctgcttgcggtactgtcgggcagttaccttcatctgcagcaaaaaagcagctatattcacaacctgtcaaactccacggcggcgctggaagccaattccaatattgccatgaatctgatttcacgggcagttaatgatgtcagccgtgataagagcatcacaaaatgggtaaattcttcttccgccaatgatttttatttcaactccatcactgccttaaagcagctgagaatcatcacgacggactcctccatgctcaattatgagctggccgttactacggtaggcccgcttgaatttgacggaaacacctacggtatggtcctggatcagtcgggaaccgtggacagagatcagtttttaagacgcatcaagggattatcggaagaagaaatggaatccatggattaccatttttccgcttccaaccggccgttttgcctgccgcattacgaggaggaccggttaaaatccgtttactatatcgtaaaggattaccggtattcctccagccttctctgctttgtaaccattccgattgaaaccctcacaggttctgccaggccaggccggtttctgctctgcagcgacgaccggctgctggcggtaagccatcgggatgacgagatggatgaactgttttcccagctgataaatctgggaatgaaagcggctggctccggcatcggacagcaggaatacttcaagctggggaaggaatacgtatttcccacaaccctgcccgccattggctgggaaatcgcctacatctatgacagctacatgctggattccggccagatcgtattctttctgctgattctggtcacggcggcctgcattttcacctttttcatcgcgctgctggtagaagcactctataagccaatccgggaagttgtggaagattccatggaatctcccgaagacggaaaacccattgatgaatttaagatcttacggcagaattcggagaagataaaatccttgagcaagacactgatggaggccatggacgagaacgaacgcctcgcctcccagcagcaataccgccgtctgctcttcgcaccccagccggagagccatgcagaatgcggcggggagccggaagaggattacagcgtggcagtcgtggagttccagccggtaaacgagggctcctcccccagctgtatcgttattttaaagcagtatgtccatgagtttaccatgaatataccggatatgacatttgtagatctggattccgcacggtgcgccatgatcgtaaaaaacggcggcacggatgaaattctcctgcagctttacgaactgctccgctatctgacacagaagcccgaggatgaaacgatcaaccagtggattgccttaagcaatcccagaagcggcttaaaccggatatggctggcctatcaggagacgctgcggattctggaatacaaacacgtatacggccatgccaatatcctgacctttgaacagatccgttccgtggatgcagtcacttattcctatcctctctccatggagaacaggctggttcattgtatcgtggaaggcaaggaggaagcgctccagatcttcgatcagctgatccgaacgaatctggcagacaaaacactgtccatcgagtcaattcaaagcttcgtctatgtcctgatcggcacactgggccgtgtcttccaggagctgaagacatcgccggaggcccttctgaaggaggacttaaacttcaaatatttatacgagcactggaatgactcggtaaccatcaccacgctccgtcatgcgatacaggacattctcaccgctgtaaactgccgtggagagaccaatgatgagaagcttctcaatgagatgatccattatattcacacgaattacaccgatgatattatgttaaacgacatggcagaccagtttaacatctcaccaaaatactgtggaattctgttcaaacagctgagcggccagaacttcaaagactatctaaaccgctaccgaattgaaaaagccaaagaattgctgcagcaaaaaccggggattaaaatcgcagaagtaagcctgatggtaggattcaacagcgcaaacagttttatccgggtatttggaaaatatactggagttaccccaaaagcgtatatggaatccttaaaaagttccagttttagttgataaaatatacaaaatagcatatactatttatatcagttattttatcagtaaatacattaatatttatactgatatcatatacgttatatcaaaggagtgatgataatgaatatcagaagtgcgcttgaaaatacgattcccatttcccaattcaaccgtggtctggctggtaaaatctttgaagaggtaaaacgttatggcgccaaagttgtcatgaaaaacaatattcctgaatgtgttctcctttctccggaagaatatatccggcttttggatgaagcgaatgatgctcgtcttttagccaccgctgcacaacggatgtcacaatttaatccttccactgcaatctcccaggaacaggtggatcaggaatttggattcacacctcttgattatgaagatacggatgggattgaatttgaatgagttggaatgttaaatacctgcctgaagcccttgaagacctccgcaaactggatggcagccagaaaatactgatacggaaagcaattcagaaggtctgcagcaatccactgccagaaaacgaaggcggctatggcaaagtcctgggaaataaaaacaacaccaatcaatccggcttttttaaaataaaactccgtggagctggtctgcgtatcgtataccagcttatccgacgcagtgatcatatgctggttattgtaatcggcgtccgggaagatgacgaagtatatgaaatcgcacaaaaacgtgtccttaaacatgatttataaacaaaaagaaacggcaaaggatctgccgtttctttttgtttataaaacctttctgcatcttatataccatttctgattttttaatttcccgctgcataataggcatcaatcccatccgcgattccctttgcgatcttcgcacggtactcgtcggttgccatctttttatcttcctctgcattactcataaatcccatctctacaatcgttaccgggatcttacaccagttaattccgctcatggtatcagactcctgaacgccccggtctttgaagcctgttgtatcacagattcccttcaccactgcctttgacagtgctgagctcttgctgtacagatttccattatagggatttttggatgtctggcacatggtcagcgcaccgtgaacgctggtatcacttaacgaattggcgtggacccggacgaaaatatccgctccgctcctgttggccatctcggcacgctctgcattgctgatgttcacatcgtccgtctcccggatcatatatacctgatatccccggtttagcagctcttccttaagctttaaggaaactgccagtgtcagcttatattcgggtattcccgtcgcatttccctgagttccggaggcaaccttggcctttttctccgatgcccccggtccaatcggttctttttcggaattgccctttgcctggtgtcccggatcaatggctatgatcttgccggaaccgttgccggtcactgccggtgccgctgtctccggttccggagccggctgttcttttgacacaaagcgtgaggatatgtaacattcctgatcctgatagatgacgcggctccagctgtcgctgtacccggtccgcttcagagccgttccctttgaaaccgtagtgataaccgcaccgttggttcccgcgctctttctgatattaacctggcttcctgtgacgtatacggtttcatccaccggtgaaaaagcaggagccgtctctgtcgtcaccgcggcctcatgggcgcttgtccccgcctggctccccggcttagctgcatcctttttcccgtttccggtctctgcttctatggaaaccgccgctgtctcttctccgttttccggcgtgatatccccggaggcctcctccagtgccggtacctcgacaggctcatagttcctgccgcatccggccagcgtcaggaggcacacgagagcggccatgatatagattccggttcttttttttctgctcacaatatcgtacctcctccggcaacgtagttctccaaataaaatacaacagcctgtcccggtgtaatcgccctctgaggctcatcaaaccggcattccaccagatcctcgcccacctcccggatggtgcagggagcgcctttgtggctgtaacggattttagcggttacccgcatctctccgccgtgaagcccgtcgatcgccatccagttaatccggctgcagcggagcgtgtcagaaaagacatcatccgagtttccgatgacgacctcgttggtctccggtctgatctccgtgacaaaaacaggatggcccatggacaggtttaatcccttccgctggccgaccgtgtagtgggtgattccctcatgccggcccagtacattgccatccagatccacaaaatttcctttcgccggctcttttcccgtgttttcttcaataaatctggcgtaatcgtgatcgggaatgaaacagatctcctgactgtccggtttatgggccacctttagattgatccggtctgcaatttcgcggatctgatccttggaataagcgccaaccggcatcaacgtatgggccagctggtactgcgtcagattatagagcgcatacgtctggtccttcgccgccgtcacggacattttcagggcgtaacgcccgttttctaactgttcaattctggcatagtggcctgtagcgatataatcggccccgatatccaggcttcgctttaacagcgactcccatttgacataccggttgcaggcgatacaggggttgggagtacggccgttcctgtattcgtccacaaaataatcaattacattctctctgaactcttctttaaaattcatcacatagtatggaatccccaaatcccaggcaacgcggcgggcgtcgtccactgcgcttaagccgcagcagcctccgctctcctcctggacttccgtctcttcgtcctgccagatctgcatcgtgacgccgatgacatcatatccctgctccttcagcagccatgctgccacggaggaatccacgccgccggacattcctactactacttttggtttattcatcgtatcacattccgtttcttctgccggcatccggttcaccgccgtctttaatattcttcttccacttcttcctcaccgatgtcagactttggcttcttcagcccctgaatctcgatcccgttcttctgggcataatcccataaggcagcgtggatggcctcttctgccagtaaagaacagtgtaccttaaccggcggcagtccgtcaagtgcctcacataccgccttgttcgtcacttccatcgcttcctgaatcgacttgcctttcaccatctccgttgccatactgctggtggctaccgctgcaccgcagccaaacgtcttaaacttcacatccctgatgattccgttgtcatcgatatcgagataaattctcataatatctccgcacttcgcatttcccactgtacccatgccgctggcattctcaatttctcctacatttcttggatgttcaaaatgatccataactttttccgtatacattttttatttttctcctattttcagtaatatatcgacaatttactgccgttttaccgactccattcgccttttctccggccggcagctcaatttatgattacaatttctttatatatccgcatttaatttttataatctagttattcatctgtgtttaatccgggcgaaagttctccgtttaccggttctggcgctttacaaaatcctcatataagggtgacataccgcgcagcttttctacaatcttcttgatggactctgccacatagtccatctcttccatggtattatccgcattcagtgtcagtcttaacgatccatgtgcgatctcatgaggaagaccgatggctaacagcacatgagacggatctaaggatcctgacgtacaggcggatccgctggaaccgcagattccatccatatccagcataataagcagagattctccctcaataaactggaacgcgaagtttacattgttggacagccggctggttctgtggccattgattctcacatagggaacctccgccattacacggttcatcagataatcccgcagctccgactctctcttcgtccgctcttccatcgtgttcacggcaatctccacggcctttccaaagccgacgatgcccggtacattctcggtaccgccgcggcgcttccgctcctgggcgccgccatgcatgaaggaacgggtcttgatgccggtacggatatataaaaatccgattcccttggggccgttcagcttatggccgctggcgctcatcatatctatatgatactcatccacattgatcggaacgtggccgaaggcctgaaccgcatcggtgtggaagatgattccgtgctcttttgcgatctcaccgatttccttcaccggttcaatcgttccgatttcgttattggcaaacatgatggagatcaggatggtagtcgggcgaatcgccttctttaactcatcaagtttgatgacgccattctcatccacatctaaataagtcacttcaaacccgcgtttctccagatattcgcatgtatgaagaaccgcatggtgttcaattttactggtaataatgtgatttcccttcgcctgataggcttcagcagtcgcagccagcgcccagttatccgactcggtgcctcctgcagtaaagtaaatctcattggttttcgctccaatggcctctgcaatcgtctctctggaacggttaatcgccttcttggattcattggaaaactcatatacggaagatggattcccataatattccgtaaaatacggcagcatcgcctgcacaacctccggccgtgtctttgtcgtagctgcattgtcaagataaataaatcgtttcatacctgttagttccgcctttctgtagtcctaaagttaaaagcttcatctacattttctattatacacagatttcctataatttcaataggaatagttatcgttttcattatatttccggcgccgtcaaagggcggacggtgctgtctgcaaagtgaagggagaaaatgtcatgaagaggcctcctgtgaaatatattgtaataattcccatatcatggagttttcatgaaggattctttaaagatttcccaaaaactttcgccaagaaaatatgccctgtttacgggcactctcctccttacttctacagggctcatcacccgcgtgctggggttcttttaccgaatctttctttccagaaccatcggtgcggaaggactgggactctacaacatggtccatccggtattcggcatctgttttgccttatgcgcaggttccatccagacggccatctcccagtctgtggccgccaatgtaaggaaaggccgttccatcttccgaaccggactcgtcatttccatgtccacttcgtttatcctggcatggctcatcatccggttccaggattttctggccggcagcatcctgatggaaccgcgctgtgcaccgcttctcacctacatagccgtgtccgtcccctgcgccgccatccatgcctgcatcaatggctactattatggtatgcagcgaacccgggttccggcattcgctcaggtcgttgaacagtctgtccgcatcggtgccgtcttcctgatcgcggatattatgatggaagccggtgtggagatcaccgtccagctggctgtcgccggccatctgatcggagagattgcctccaccctctataccgtcgcagccagtcagttcttcccgccgaagctgccggatggcaccgatgcagctgagccggattccaaaggccgcagattgacagcggcggccgattccttccgccagacagcaccggcccttatggcgctggcgctgccgctcatgggcaaccgtctcgtcctgaatattctttccagtgcagaggcgatctggattcccggctccttaaaccggttcggcctgtcaaactcggaagccttcagtatttacggcgtccttacgggaatggcgctgccatttatcctgtttccctccacgatctttaattccctggccgtcctgctgcttcccacggtagccgaggcccagtcggagggaaatgagcggcggatcgcaggcaccatctccatgtccctgcgctactgcctgtacgtaggaatcctctgcatcggaatcttcaccctgttcggcaatgatctgggagtcagcgtctttaaggatgaaaatgccggttccttcatcatgactctggcatggctgtgccccttcctttatctggttaccaccatgggcagcatcttaaacggcctcggaaagacttcgactacctttattcaaaatgtgacggctctcttcgtccgcctggcattcgtgctgtttggcattccgaaatttggtatcatggcgtatttgatcggcatgctggccagcgaacttctcctggccctgatgcacatcttttccctgaaaaaacaggtggccttttcctggaacgcatgggatatgatcgtaaagccggctctgctgatggtgatggcaatcggtatctactatgctgctggctccgtctgcgatccatttgcagcgcttccgctgtttatccggaccagctttcacattctgattctgtccctctgctaccttctgcttctggccggtgcccacttctttaagagagagattcaggcggattaagtaaaaaaaacagaagaaggcagttactccgggagcatttcttctcctggagcagctgccttccttcccgtctgtcttccctgccgcttacatccccggcccaatcgccgtgatcgttccggttccgctgccgttaccgctccccggtgccgtcgatgagcccggacctgctgtagaattcgtgttctgcgttcccacggaaggggtcagcggcgacggctccacaataggaatatcgtcattcccgcccggtaccgaaggaccggacggcgcagacggcttctgggaaccggacgaattcgagtccttctggccggatcccgcattatcgccggaaggcgccgctgccgtctcccgggtgccgctctccggctttgagctgcttaaatacttcttatagatataagcttccccacctttataagtaatccgcatccagccattggccgactggcccgtgacagcgaccttctggcctgttccaaagcttgtgagaacatcggacttcgtggtatagctggccctcacatggaccggctgtgtcacatacatggtcttctgaaccgccgtcacggcatagaccggcagcgcttctgtctctcggggcttcgactcctgaaccggagcttccgtttccgcctcaggcgatgtctccggttccgaagacggctcaggatccgtctcattttctatttttatcatatcggtctgcgcttccgtggtaccactctcactggccgcatgttcccctgtactctttgtgttccccccgttaaagacagacgagcaggatgtgatcatcaccgccgttgtcattgccaggataattcccggatactttttcatgtcggtcacctccgcctgattttcatcttagttaaactccagatgttttcagtatatcatcccggcaggcagcgcgcaaccaccggcggaccatcttattttgccgagctgtgccagatcaggaaaaatgctgcccccagcgcacacatcacagccccgcagagcatggctgctgggagagcagcctgagccgctgcgccaaacagcagattggtggcgattccggtcccttccgccagaactgcatagatacttaaaacagttgcccggtccgccgccttcacatggcggttctgtatttccgtctgaagcggcacgaaaagactggcggacagcctcagcagtacgatgccgcccaccgccagcacacggcttccggtcagggccaggaccacacaggaaatccctgcggcaccaaataaaaggagtgcgaaccgcttcattcctatttgctccgtacatctggctgaccagactccggccattccgcttacggtcaccaggatatagatatatcccatgctggccggagcaatcccgcacgcctcgtatttcagctgatttaaaaacaccgtaatcgtctgattcgtctcccccagaaacgccattcccaccagaagaagcagaaagcgcttatccctcgccaccgctttcagacaagtcaggaaccggccttttaccggcttactgcgctctatttcctttacttcctttaaaccaaaggacagcaccgccgctgccgcataggtcagtacggtcaaaaatcccgccagccggtaatcatcgccgaccaccacggaaaacagtaacgccgccgtcagcagtcccaccgtatttaagaggttatacacgccaaacacccggtggctctccccctcgcggcaggacagatacagaaggctcacgtcacagcccgacattcctgccatcacaacgcttaacatgacccgttccagcaaaaaacctccgaaccctcctgccttccagaataccacctttgacgccacatagatcagggaactgatcaccagcgtatttttatatccgatcctgtcggccacaactccccacggcatctccagcgcgatgcacagggccagtgaaatactctcgatcagagttatttcaaacacggaaacccctgccgcctgccggtaaagcgtggcaatcggcccataaaacaccattccctgcaaaagggagattccgtacatcagatagatatttctttttatattcataatttccactccatttcaggtacacaaaataagccctgcaggatacagcgccaaaacgcattacaattcttaagctgttcatttctacgtgggattattgagattggaaatagaatggttcttcataagccgactccttaacaggccggtcagcctgttttttcagtatagcatacttcctggaggctgtaaaggaaagaccgcggattacgcttcccggcttcatacactcgttacagttcacggcccgcccggcacctcacagcccgctttggctctggcgcttttcacggcccttcccgtgactttgcagggcattagcaattcttaacgcgcaaaatttttcgttcaggggaaatccccacctgtttgagcgcagcgagtttggggattttcactggtttttagaaaaattctgcacgtttagaagtgcttatgcccgaaaccggaacgggaagggccgtgaaaagcgccagagccaaagcgggctgtgaggcgccgggcgggccgtaaactgtaacatacactccgttaaattctaaagggaccaggcgcccgcctgatccctcctttatgatagttcttatgatagtgtttcaaaataagcttcaatatatttcatggcccctccaactgcagccgcctccatgccgtagcggctgttcttcagataaagggcatcctgctcgaacatattgcagccgctcatgctccggcttaactcgaccatatacggttttatatattccccaatatatccccccagaataatatcgcagtcaaaagccatacgcagattcgtcaccgctatcgccagatagcttaagtaggaattccagatctcccgtatggttttatcaccgctctccagcctctgaaaaaacagttccaagctgtccccggtgtgatccgacaagaccctggccgagcagtaggcgtccatacagcctttttttccgcagtaacacagttttccatccggttccagaatcatatggccaaattccgcgctcttaaaattgtcccccgcatagattccccggttcacatagattgcccctccaaccgaattgctcagggatagatacaccgcgtcccgttcccggtggacaaactctgccagagccgcgctgttggcgtcattctcaaacgacacgggataccggataaactggctgactgcctggaacttcacgttgttcagatgcagaacgtgggatctggtaatcagttcccggctctggtcaatcacccccggtatggagattccaactcccagaatcttttccggcgcggtgcccgtctcttccacgaaacagtccagttcatccgccagtccccggtaatactcgtaggaattctcgtaattctttctgatgcgctttttccctgttatggttccttttaaatccagcatgaccatgctgatatggtttaacgtgatatccaggcccaccgccatcttccatgaggcggtaatagaaagggttttcgcctttctgccgccggtggactcgtattccccaatctcctctacaataccggattctgtcagttcctttacattttgcaggactgtaggcatactgattcctaattctgcggctatctccggtttggatgtatggcctttataacggataaattttgcgattttgaccttattctgcttttttttctctatcatgggatcatctccgtaagcattcttttatgaatcgttttatctaagtattatacaggagaggagagggaatggcaagggaatacgattatttcaacagcggagcgtagcagttcagccttcacttccggcagccactgtctggcccggcgctttcgtttcccggatctttcctgtgactttgcagggcattagcagttcttaatgcgcagaatttttcgttcaggggaaatccccacctgtttgagcgcagcgagtttggggattttcactggtttttagaaaaatactgcacatttagaactgcttatgcccgaaaccggaactggaaaggtccgggaaacgaaagcgccgggccagacagtggctgccggaagtgaaggctgaactgttacagcggagcagcttacaatcgtgtagtttagtccgccagcttaccagcctccggatttagaaatacctctttttttactgccttttcctggcaggcgacaatcgtcgtgcacacagcatcgccggtaacgttgacggcagtccggcacatatcgagaatccggtcaattcccatgatgagcgcgatggcttccaccggaagtcccacggatgtaaataccatggacagggtgatcaggcccactcccggtacaccggccgtcccgattgaagccagggtagccgtcagaatcacggttatataatcggccgcggacaggctgattccaaatgcctgtgcggcaaataccacggcaacgccctgcatgatagccgttccgtccatattaatggtggctccgagaggaattgtaaaagaagaaatcctcttggagacccccattttctgatgaagggtatcgatggacaggggaattgtagcattggaggtcgccgtggaaaacgcaaagcccattacaggaagaaacttcttgataaaaaggaagggactcagccccgtaaagcctttcagcatcatcatgtaaaccaccagacactgtacgaccagcgccagaagcacgcccgccatatacttgagaagcggcagaaacgcatcgaaccctatccctgaaaacgtctttgcaatcaggcaaaacacaccgtaaggcgccagtttcatgaccatagttgtcatttccatcatcacatcgttaaactggctgaagaaattgccgacagtttccacactctcgcccaattttgcgagaataatccccacaataagcgcaaataagatgatcggcagcatatcccctctggccagcgctcccagcggattggtcggtatgatattcagcagtgtatccggcagactcaccttatccgcaacagcgatctcactcctctcaatggaggacatatcgaggcctacgcccgggttaatcacgtttgccaccagtatggcggccgtaatggcgagagccgtcgtaaaaagatagaagaacagcgtcttcactccgatcgttcccagcttcttcgtatctcccatggccatgcttccgcagaccagcgagcaaaacaccagcggcaccacaagcatctgcatcagccgcaaaaatccgtttccaacgacgtagaaaataccgccgatcagaaactcatcgcgtatggcacctgccggcacggcataatggagcagaattcccgtcgcagcgcctgccagcaggccaatgaatatcttcgttgtcaatcctggtttttttctatttttcatactataaaaaatccttcctgtctctcataaagcgttccagcatcagtctccattccggaagctgggcgattccggacatgcgcagcatcatgttgtccaaaacggaatacgacggccgcatggcggtcagcttatcgtccgcagccgcaaccggcaccacctccgccttatgtccggaaaggcgcacgatttcctgtgcaaattcaaaccggctgcagctgccctgcccggtcacatggtacagaccatccggcgcagaatccatcagttcgatgatcttctctgccagctccgatgctccggttggcgcagcggtctgatcagaagccgcatagatcgtcttcccctcaccggccagcttcaggatctttgaaaaatagctgctgccttccccaaatatccacgaactcctgacaataatatggcggttacagaattccttcacgaaattctcccctgcaagctttgattttccataaacagtctgcggattcggcgtatcaaactccgtatatggagtctgtccgcttccgtcgaacacatcatccgtagaaagctgtatcatccgggcctttcccattcgggccgccacacttaaattcctggctcccagggcattgaccttaaatgcttcctctttattctcttcgcacatggccacatctgtgagccctgcgcagtttacaatgaaatgcggccggttcatgccggcataatccctgactgctttcggatcggtgatatcgacagcatcaagatccgtaagcagaagctctaccggtgtattctccaaaagttccgtcatcttgcggccgactctgccgtttgctccgcaaatccaaaccttctgcatatgattcatgaaatatcctccattctaaaatcgtgacaaggtattgtaccacagacagcagggggctgccaaggtggaaagcaaaaattttcagggttcttttgcaacttccgcttccggtatatcataaaattacagattcacaaatggctcaggaacaggtataatgaggaaagatatggattgtcataaaaggaggatttaccatgttaaaggatttagtgacccgctgcaggtcttaccggcgtttttatgaggaagaaaaaatatcggcggagacgttgcgggaattggtggatttagccagactgaccgcttcgtctgcgaactctcaggcgctaaagtttcgaatctgcaatacggcagaggaaaatgagcaggtattcggtactctgaaatgggcgggcgcactgcctgattgggatggacctgaaaagggagaacggccttccgcctatattattatcctctgtgaccttgccctggggaagaataagcttcaggatgacggaatcgctgcccagaccatcatgctgggagcggtggagatggggtacggcggctgtatgctcggcaatgtcgagcggacacgtctggcggagcatctgggaattgatactgcaaaatactccattgatcttgtattggctctcgggaagccaaaagagaaagttgtggtagtgccggttggggcggatggggatgttcgctattaccgggacgaggagcaggtgcactatgtaccgaaacgaagtctggacgagatgattctatgattctttattacgaaaacagcactccggaatgttcttccggaatgctgttttttttgcgtcgcgcttcaatcagcctgtgtatgctccagcttttgtaaacagagcatggcttttcatcgctttattagcctcaaacaacactttgtcttcgtcgatggtcaaaagcttccgatctttcatcaccagttttccgttgatgatggaatgtttcacatcagctcccgaggcgctctcaatcagggtattgacaatactcccagtcggcgtcagatggggctggtccaaatcaatggcaattaagtccgctaaattcccacggcggacacttccgagactgctgttcatcagtgcctgtgctcctccctccaaagccatggccagaagggttctggcaggcataatctcaggatttcctgtggtgattccccaggccacattcatgatgcatcgaaatgcccgcatctcacggaataaatccaggcccccatggcctgcgccgtcggagccaaaggccacgggaatcccggccgccaggagacgcggcgtctggggaacgcctttgccgcagttgctgaacgggcagtgtaccaccttaatcccccgatcctgcacaatctgaatctcggattcggacagcatgatacagtgggcggcaacaaactgcggcgataacgcaccgatacggtccagatagaggaaaggacgttccccgtatcgttcaataaaatccagcacttcgctggcatactcgttcatgtggcattctgccgtcacgttctgctccttcgccgcaagaaatatcgtgtaaaacaggtcttccgtgcaggccatcagagaagttacggaatagtacactttaagcaggccgtctttcccgtggtattccctgtgaaatttttccaggcggggcagggcctccctggtgtcaatccgcaggccatccggaacgtttgctccgtcggtggtctgccaggtcagggcaccgcgcatccccatcttcaaatactcctctgccgctgcttcgatatgaggacctccggcatccacaaaggatgtggttccgcattttatcatctctgcgccggcaagtctggctgacagcgccatggtctcttccgtcagagatgcttcaaacggcacattgatccgcttccagatcaccggcttttcgtccagcagacttccccttaagaactgctggctggtgtgaagatggccgtcagtgaggcccggcatccacagcagatgcggatcatcgatcaccgtttcggcctggcagctgatggtctgatctgaattatccgtgtccgcaatctccagaatccggctgccggaaatggcaatcgtctgatttttcgcaatgctcatgtcgggcatcagcaccgctgcatttttaattaaaatatcacatggcaacataaagaaacgcccccttctcttctcctgtaatgagtttaaatcccgccgcttccggcagatattgtctgtatttattataggaaaaaagatgggggtgaaaaaggacagatgggataatttgcagaattattctacagctttctgtgcgcagatcaacaggcacaaattgaaaaattccagagcatctttcaattatttttcatctttgttcgtacatacgttcgattgattggattaatagtgtagcgctactgattcagacaccaattacacaccactcttgaaaggaggaagaaggcctgttcacgacaggctttcaaaaaaatatgagcagtacagaatggacttaccacatgacaatcagcaatcagactggggaaacactcgtagcacataacgaggaacggaactggggaatctggtaccttggaggaaaggataagagcgcccctgtctccatcaatgcaggagaaactaaagaagtatttggaatccgggcatccaaaggtaccgccaccggctatcagggccagtgtacctggattggggcgagtggttccctgactctttccatcgaagttccatactcaaaagacaataaatcctcattaaaagtatccggaatgtataacgtagacggctggaatgaactgccaccaaggggccaccacttcgatcacctgctgaccattacaaaagtggattaaggaggaacataccatggatatatccaattgggaagcattaaaacatgatttgggagaaaatacaggcaaaccgctgagccagcttttgaatattccgtacagctatcccccaaaaccggttttcctgagcctgtccgatccctgcgatatccctccgaaatactggccggctatcaatgatccgacgtacgacaatatgatgaagaaacagcagctcgttgacagctactttggcgccgtcctgtatgtggcctataccgcgccctccaatattcagacctttccggcgggccagtcgcagacgactaccataaaaatctctcaggtatccgtcttaaaacagacaaatgtatgctccgtcgatgtccgttccctgattaagggggaagcctccggattactgaagggcgtgacactggggctcaccacagagctggagacaaaatttggctacagctacagtacggagaccacagacacaaaagaaaaaacgattacgaaaaccgtaaccatccccgcatccgacaaggatcgcatcctggttccctggaatctctccaaaatccttgtggtctaccggaaacataagacgaaaggcatctcactgatctgtgcggatgaaaccatcgaacagtctgtggagaaattctataccctgtagtctggagacagatcataccactgttttatgaaaaaacaaaagaggagtctgagcatcaggagtatttatgtaatcactcctgttcagactccactttctgttatacttacagctccatgcaggtttcctgtcgacttaccgggccgccacgctgcttctctcaatcagctgcggtgcaaagtaatactgctgatatgtgccccgctcttcccctatcttctgtaccagcatttcactggcagcttttccaagcgtggtgccaggctgacggaccgtggtcagcgggacatccatcaccaccgccaccggatcgtcatcaaaaccaatcagagatacatcctccgggatacgaaggcccagttctctggccgcccgccatacaccgagcgccatataatcatttcccgcgaagacagccgtcaccccctgctccagaaggcgttttccacattcatatccggattcaatcgagaaatccccctgcatcaccagaccgctgtccattggtatgccataatctttcaacgctttcagatagccgcaggtacgctgtctggtaaactgctctcccgcaatatgaccgatcctggtatgtccttttttcagaagatactcggccgccagatagcctcccttcacgttgtcaacagccatgaaatcgcagggtgccttctgtaagtaatgttcaatcagaatcaccggtacccggcattttcgcagtgccgcctcgaccagtctctgattggcattcacttctttttccctcggcagaacaagcagaatcccgtccacatacctcttctgaagaatatccaggtacttcacacactgcttcacattttcctcacagttgcacaacagaagggcgtactcattttcctgagcacacttttcaattcccgtagatatattggccagaaaagggttcactaggtttggcagaataaggcctatcgtatgtgttttccgggttgccagagataccgcaatcgggttgcaggtaaattcgtaacgctccgcaatctccagtactttctgccgcgtcttttcagaaatccgatagtggccggccttgttatttaaaataatggaaaccgtggcctcagagacccctgcttccctggcaatatcttttgcagtgattttcatataacgtctccagtctaacagtacttccatatttttacaaaagtgtacctatcattgtatatgaaaatcccctaaaaagcaatggttccagtcaatcagaacgggagctgctttacccggccgcttccctgacagcggtgtatcactgcctcatattctgcgtcgctcccctcccggatcagacgtctgtattcctccattaattccgggcgtttttccctcaaatattccattagcctgatctcctgtatggaatccggtttcatgtagaaacggtcaatatagagcggaatatccggtcttaaggcgtccagcaccagatccacatccgtgattcccggcatgatgggcgcaaatgtcgcaatcaccggaagccccgcttctctcagccggtttcccgtctcaatccccgcatgcccttttccagccttaagcttttctatttcatccagtcggcacagttctgtcacgatacacagctctttcatccccctcattaaatccagatcacgctcaatcagaagcgacttcgcgctggtacagatggtaagaggtataccgtgttttttgataacttccacacactgtctcgtcagcccgtacgtctcctccaccggcatgtacggatcgcagtagtcgccaatgtaaagccggactccctgcggccatctcccgcactcctggtccagtacctctgcgatattgattctaatggcgatattgccttcccagccctcccgttccagccagtagcagaacggacagccggacacacagccatcgtaaggattgatgtaaggctggccgttctccgttatttctattgctttttccaccctggtctcgtagatcatcatgttctccaatctttctttattcttttaccgaaccagttaccattccattgataatctgcttctgaaagatgataaataccagaagcgacggaatgaggacaattacagcccccgccatgataacgccataagcggatccctccgaactgttcagctgagcgattcctacctggaccgtcctcatctcgttgcggttcgtaatcagcatgggccataagtacacattccagatttcaacaaatgctgtgataaatacggtaaccagaatcggttttgaaattggaatcagaattctggtaaagaagcggatatctccgcacccgtccatctcagacgcttcttttatagaaaccgagactcccagaaaatactgtctcataataaatacactggtcgcagagccaataaacataataataattccctgataagtattaatcatatgaagcttcgatatggtctcataattggtgagaagcgtcgcttcaccgggaataagcatagtccccacagtcaaataaaaaaacagattctttcccttaaaatcaaagcaggcgtatccataagcggccagggccgccgtcaccacgcgcagacagcacgtgattgtggtcacaaagagcgagttccagataaaccgcagcatcatcgtattttcccaaaccgcgtgatagttggaaaaatcgatccgcctcgggatcattccgggattcaggctcaggatctccgtactcttcataaaggaggtgcccagtgcatacaacacaggaaatatgaccagaagtccgattcctgtcgccgcggcctgatacagcacgctcttccatatcctgcgttttcccatcagtaatgaacacctctcttctcccagataaacgaaataagaataaccgtaaatccaatgataaaacctaccacagccgccgaatacgaaaggccgtaattatatacgtagaatcctttctggtacatatagtacataatggtagatgtggaactgtccggtcctccctgggtcaggataatcacgggtcctgacatcatcaatgcgcttcctacgttgacacagaacaggtaaaacagggttggacttatcatgggggtatagatatagcgcaccttctgccacatcccggcgccttctgcggtggctgcttccagcaattcttccgataccgaccggactgcggacaacaggaatatgtaagtcagccccagtcccatccagataccaatgataatgatcgcccacagcgcatacttcttatccgtaaaccacataatatttaagtgaaacacatgattgaccagtcccagattcccatttaaaagaagcttgaaaatgacagaagcgacagacatggacaccgccatgggcattgcatacatcagttcataaacgggagagaggcgtctcccggacgcggagatcagcgccaggagataccccatcagaatcgtcaccggtatgacaaccagtgcatactcgaatgttacaacaatggattttaaaaatgtttcatcactgaacagtttccgataatttcccagccctacgtatttcacaggcatattaccggaattaatcaaaaacagactcttaaacagcgtcttaactgccggataataaataaacagcaccaggaaaaacatggatggcagtatcagcagatatggagttattttcttttttcttttcaacgtttccgcccctctccccgtatatactctcgcgaaggatcttactcttcgaccggattcgcctcattgtattcatccagcgctctgttgcactgctccgccatgctgtccacgcattcctgtgccgtgatctctcctttggcccatctcaaagaagtatctctgaaaatcagctggaactcctgctgagtcggcgccagatgctcctgcacctttgggttggatttcataagggaatcaaatgccacacggtagctgggattgtctttcaaaaacgctttcatctcttccgtttccatagtttttccattggtcggtatatagccggttgcgatacacagttttgtctgcgtctctgccgaggaccagtatttcataaattcccatccgatattcactacatctgaatcacctctgtccagaatataaagggaggttccccccggacatactccgcctttatccgtatccaaaaccctgggaagttccgaaatgcccagctcaaatccattctcattggccgcttcaatgattgaagtcatagcccagtttccaccgcagaacatggcgcttaagcctgaacagaactcgtccttgggctgatcgtccacatcaacactctgcacagcccccgtatcgagaaccttctgccactcattcaggagcgtcagcatggttccatcctcatcaaaggttaccttcgtcatgcgcccagtcctgccgccctcattgttgccaatgaaatggtaatcgccctggccgccgatccagttgtttaaatatacattctgaaggccaagggtgattccgtactgtttcaccgtatcaccatctttaatcagcagtttttccgcgcagtcagccatctccgcaatggtcttcggcggtttttccggatcgagccccgccttctcaaatgcagtcttattataatagaagatcatggcgtcgcctgtaaatgggatgctgtactgttttcctctgaaattatacgtatcccacagggactgtaccatgtcctccttcttaaaatctgcgtccgactcgagaaacgaatccagaggaacgacattctttactgtgctcatgtactccacatcaccggcataaatagtgacaaggtcaggcatattcgctacatcgtttgccaggatcagcgcttttagcttacttacaatgtcttcatcctgatagaccggcaccaccttcactccagccaatttaccggcggtgtcgttaaactccggaatcagctgctcttcgataaactttccgttggagccgccccggttgtgccacataatcaattctttctcctgtgccggcgcgtccctctgttcccccgcattctctgtctgtgcccctgccggtgcatgggcatctgcagtttccttccctgttccggaagaacagcccgctatcatcacccctgccatgacagctgcaagtactgctgaatagaaccgtttccttttcatagaaattcctccttttttcttgtgctaaagcgctttagcaactttccctcattatacacctttcctccttttgttgtccagcattttgtcgattttctttaacaatttatcttatatttaaccagatttagggcatcgcctgcggccaggcggaatataacaaaaatacctcccttccgcaaaaaacctttgattactggttttgccggaagagaggcatctcacttctgattttgtatatattctctaaggtatatattcatacatcatactttttacttcttaatatttatagatacccggcaatctcatcatcggagccagccggatactgtttaaaaagttttattactttttccacataccgctcatccaaatccagaatatccgctatctgtccgcttgataattgcttcttgtattgcttcctgataaaattaatttttgttttttccattcccattaatatgccccgtacttctccccgtacttccccatccgcaatcagctcatcgatcgcctggcacatatccatctcctcctctctcttagactccagaattttctgcagcctcttctgttctccaatcaatgcaagggccgccgccttggactcacggtccatacgattgatctcttccctgtgaactcttgtatattcatagagtttttgtttgtttttattatattttaccagcccaaaaacgtgttgtaaactggtcttatactgatcaagtttctctccttccctgatatcgatcaggttaatcttataatcaggaagacattttttcaccagtgctgtctcttcccattcctcatcaattcccatcatttcatacaggcttttcggcccatcccaggcttcgttcccatagtaaagggtcagggtcacaacaggtatgagtctgtcagccttcgtaacatgtgacagaaaatcagcaccttccagcttatccccttctgctctgtgcttttcttcaatttttcgtatctgctctgtataatcgagtgcatcgtacatcatttcccgaacggccatgccataatggaccttcccctgattctcacttgccacaacacagaagtatgccccaaactctgctttcatgacgacatctcgacgtctctgaatcgttcgtttcaccccgtccgcatcaacgaccacaatccccgcttcgttcggaagaaggcttaatttgtctgctgccagcacctgttttccgtgaaaaacattgacattgataaaatcagcaaacctggctctgtcctccagcagtattttcatataataatcctgttctgccacttttatcactccctcattatttagtttctttcgtatcatggaataaaattggcagacttgccagattacatgattatcacagaataagagtttctatggaatgatttcagtataacatggcctcaggaaaaatacaagtactaaatgttttttttactttcaaactatttaatcataaaaatctgtcaaaggtatgccggtgctttcccagtgagtaatcttaatattcttctttgcctccccctcactcactaagcacaaacttttcaatcgcctcctttacccccaaatcccgttctccggcagtgacgtaatccgccgctttcagctgcgaatcagcatttgccaccgccacaccaataccggcctttttgatcaattcaatatcattcgtatgatctcctaccgccatgacacagtcagcctgtatggaaagatattctaagagtctcgtaaggcctgatgccttggaacagccgcctgccactatctcgatcgaaaactctccatactgaaaaaaactgatctcgttccgataatattccagttcatctgcaaaagctccaatgatacctgatctcgcatcgtccaggacataaattttatgcacggtctgattccagacatccggcgtgtttcccagagtttgatcatatcctttatatttaccaaggcgcttcctgatccactccgttcttaccagaggacattcccggtctgtaaaactgaatataaccgtaaactggggattcctttccatatatcgctgtgtaatctcctgaattatttttgcatacagcatcttacaccagatcatcctccccctgtcatacaaaatgcttccgttatttgcaataaacggtaccgtaagctttgcatctcctgcataggactctgcgcggtaaggcattcttcctgtcgccagcgtaaactggatcccccgtcttttcagtttctcgattgtctgaattgtcttttcatttaagtgatcttctttgtgaatcaaagtgtcgtcaatatcacttaccaccaattgtaccggaaatttattcattccaaaaacctcctgatttaataatactccctctgcaacagaaaatcccggcagaatacacatctgccgggttctttatttcaaaaatgtaataccgtgttctatgtcttccacatccacctccagcctgatggcatctccaatccaggaggtgacggaatactcgtacggtaaattgtcttttaaaaaggatttgctcgtgatctggagaatcagtgtgtcatacgtgatcttcagcagttctatgtcagataccgaaggtcttacagcctcgataacattttctctgcggtctatcttcaaatgatatacttccttcaatgtcttcgaaagagagccttccacacataagccttttttatccagttccggggtgaagaccgcaggaatccagattcggttaatggcaaccgggttgccatcgacgcggaaaatccgcttaatgaagaaaatatctccctcatagtttaatgcacggccaatatactcatacgtcgtgtcaaaatggctcagttccacaatctcagggctcttgtcaatctgtactctgcccgcctgccccggcagtcccagcttatgaagaatcggattcggctgcgatttcaggaaagatccgcggcctctgtagcggacaatcagaccgtccttttccagctccgcaatggcctgccgcatggtaacccggctcactttatatgattctgccagttccttttccgccggaagttttccgttttcatctacaagcttgttaatcaacagcttgtttttcagatcgacatagatctggtagtagagtggaataggtgattcattcatgataccattgctgttccccatttatttcattcctcttctgatcattttagtgaaacacttcgccaagtactcccgggccgggcggcactcgatcaattattcccgccgtctgtgcatcgcacatccggcagaaaacagtttttatacacattcagtatatcataatttcccagattatggaactccattgcctgacagacagaactttttcaccgcctcaatcaccccacaggcgcaggcggaagcggcgacatagtccgccgaactcttcagaatttcattggcatttgccaccgcaactccgattcccgcttcccggatcatttccagatcatttgtaaagtccccgcaggccatcacctcttccataccaatccccataagtcccgccagttcccggactcccgtcgctttattacactgtaccggccccagctcaaccgctacatcggagtacgtcgttatccagtattgagaggaatatggctttaaagccttcctgatcctttctatttttcctgttctgtgttcatccataaacatgattttaacaaatttttgttctttccagtccactgcatgaaaatccagcagctgcttaaaccggtttcctaatttccggtgctccgcaacgtaatcagtaacactcagagcgcgctcctggtaagcgtcggaacaggttaccgtaagccccgcccggtttgcgtcacttatgatgtccctgattggatctgcacagaagcctttcatcaggacgcaggtgtcatccacaaacacacacgctccgtttgctgcgatatacggttccgtgacatgcagcttcaaccggatatcctcgattaattccttcgttcttccggaagcgagagaaaaataaatgtgttcttttctgcactgatccacaatctgaatcagctccgggattacggtttccgaatgatcaatcaaagtgccatccacatcgcacacaattaattttacccccatggttcctcctgcttctgcgggctgccgcacctttgcggcagccatatctgattatcactcatttaaaatttccatacactgcttttccgtcttatcgagaacctctttggcagagacattctcgtccataaggaactccgtgaccatgtctttgatggccttatgcacttccggtccctgttttgaaatcggtctggccagaatgtactgcagctgatccaccgctaccttaaactgtggcttttccgcgtagaaggccttcatggcatcactctccacagcactgtttgtcaccggaacgtatcctgtattctgcgacgcataaatcgtctgctcatcctccagcacccatttcatgaattcccatgctgcattggtttcctcctcgctcttattggaggtaataattaaattggcgcctccggttggaattgcaaacgttttatttcccggcaaaaatgcagtcgcgcagttaaatccgttgtcctttgccacatccagaaagtaattgatatccgctactgaagcaaaaagcatggcacagttctgagatgcaaattccgctttcgacatattgctggaatcgcttccaaagagaatgttaactcctcctgtcttctgcagatctctccaataatttaatacagcttcaccggcttcattattaaagtcaaagccattttcttctttgttaaaaatggttccgcctgcctgtcctaaaaatgcctcaaaataccattcatttacgatcgggaagcacagggcatctttcccctgctccgccatcacttccgcgtaatgggtaagctcatcccagttttccggtccctttggatcgagtcctgcggcttccagcatatccgtatttacgaacatcagaggcgtactgcgcatatacggaagcgcgtaaagctttccgtccacataggaattcgtcatcagacctgtattaaagttgttcagatcatacccgtcccgggcgacaagatccgttaaatcccttgatattcccgaccgggcgaacgtacctaccgaagccgtttcgttcatcgtaatggctggtgcctcccctgctgcaaaagcggcctgtgtcttggactgcacatcgtcatagctgccctgataggaggccaccacctcaatcttatcctgggactcgttaaaccgtctggccagctcctcgtttgtctctccgatcttatctccccaggcataccagaactcgatttttaccttttctcctccgttatcggctgccgctgtcacgttctccgcctgtgtggttccctgggtattatcaggcaccgcagccgtctcttcaacagccttctttccgcagccgcttaaaagggtgccggcaaccagcaaaactgacatcatagctaatgttttcttcatcttacacctctccttttctttctgtttacttttctcctgtatatgtaaacgcccgtatgatctggcgctgggcacaaacaaagactattaaaatcggcagaaccaaaatcacatttcctgccattaatacgttccaggaagcgccgccttccgtgtttttcagcatggaaacaccgatagaaagcgtgcggaccttatcattggttgtcataacaagcggccagaaataatcgttccagcggctgataaatgttaaaagcatcagcgtgacgatggttggtctcgccatcggaaccataatgtgccggatgatctgccactcgctggcctgatccagcctggccgcctctaaaagttcttccggaatctgcataaaactctgccgcagcataaatatgccaaacgcactagtagaaaacggaagaatcatgctggcataggaattaatcagccccatcctggaaaagatcaaaaacagcggcataaagatcaactgtcccggtatcataagcgtcatcatcgtaattccaaacaggattgtctttccccggaatttacaccgggcaaatgcataagcagccggaacaacaaaaagcagctgcagaatcatgctggaaaatgtaataatggcactgtttaaaaagaaatggagaaacggccccgatttccatgcctttatatagttctcaaaatgaaaatcagacggaataaaaatcggtggatttgtcagagtttccccgatggacttgactgacgtggataccatccagacaaatggaataataaacagcaccagcagtatggcaaacccgatatactgtatcaccgtcaatactatttttttcaatcggtatgtcagttgcaatcgtttcaccccctattggtaatgtacttttcttcccagtaaattaaaataaataatcgtcataattccgaccagtaccagcagcacgactcccgccgcagaggcatatcccattttataaaaacggaagccattctggtagatatagtaaaccagtgtattggtggaattcattggtcctccctctgtcatgatggacacggtctcaaacgcctgaaatgaggtcagggtattcatgaccaccaaaaagaacagattcggcgaaatcatcgggagaatgatcttaaaaaaggtgacgattccgggcgccttatcgagcagtgctgcttcgtaaatcgactttggaatactctgcagcgccgatatcaggatcagagtatcgtatccaatcagcttccagacagataccagcaccagcgacatcaatgccgtgtccggccgctgcagccacatggagggcttgacgccaaacagcccaagcagccagtttaagagcccataggacggttccatcatccacatccagataaaggacacggataccagagatataatgtggggactgaaaattgctccctgtacaaaagcaaacatttttcccggatggtttaaccagaccgccagcacaagggcaagtacgatcgctattccaacggaacagaatgtataaatcagtgtattggacagcacctgatgaaattccgccttggaaaacagggtgataaagttcttcaggccgacgaaatccttggttggacttataaaatcccatttaaaaagacttaagtaaatcatgtagaaaatgggataaatataacagaacagaaaaactgcaatcgacggcagaaccatcatatacggccggatcccatcacggaatgaggtctgtttcagaagtgtctgctttgctttcctcctgcaaaatgcgtgggaagctttccgcttatctctcatattctctacacctctcttttcccgcagtccataccaaacgcttttccgctgccatcaaagaaaaagagatgttttcgttctatgatcagattcaccttttctcccggctcgggcaaatactctgaataattcttcatctgaatcttacccgcctctgactcgaaggtatagaccgcctccgctcccagaagttctctcgtctgcacgacagccggcaggaccagcgcctcgccgcattccctgtcaaggctgatccgttccggccgaaaccccacataccggcagcccggcggacagcacaccgcatcatgaagcccctctgccgccagtatattcatgggcggtgttccgataaactgggcagagaatatattttcaggacagtggtataccgtcattggctttcccacctgcatgatctctccctgattcataataacaattttattgcccatactcatcgcctctacctggtcatgagtcacgtagatgaatgtcgtacccagtctgtcatgaagctgaatcagctcgcttctcatctgattacgcagtttcgcatccaaattggatagtggttcgtccataaggaacacactgggcttcttcaccatggccctcgccagggcaaccctctgacgctgacctcccgaaagctcgctcggctttctgcccaggtattctgtcagccccacgatttcgctgacatccccgatcagactgtcacgttcttctttcggaacccttcggttcttaagtccaaattcaatattatctctcacgctcatcgtcgggtagatcgcataattctggaaaaccatggcgatatcccgttttcccggcggaacatagttgacacatttccccgaaatccatatttctcctgaagtcggctgctccagcccggcaatcatccggagaatcgtagatttcccacagccggaaggcccgacgattaccgaaaacgctccatcctcgatcgttagatccacgtgcttcaccaccgcagtctccccaaagctcttacaaatatcctttagtataatctcagccacttaaagtcccccttcttttggccaggttagtatgccgtatcaatagtgtgctaacaattcatgtaagcatctgccttccagtccttccatctctacgcccagaactgctgcaaatgtcggcacctcatccagaatgctgcactccctgattacgatgttctccttaaaatccggccccttcgccatcaagaccggctgcgggcctaagtgaggccggtgcccatgggaggtcttcacataatcgtaatcggaatcttcctcgttgataatggcccttccatcccattttgctgcaaatgcaacgccgcctgcgccctcgaccacatactcaaagggacctgacagctggaatttttcctcggcttcgcgcctcgtataaatcgcctgaatcccaaatgcttctgtgtcttttgcatattccaagatggcttccacttttttccggacctctgtatcggccgcatctgccagcaaaatctgggcagaaagccctgaagaatggcagtatgcctgataacttgcaagctcaccgtgatcgtccgtctgaatcagtccctcttctttaaaaagtacattcaaattcacctgcttatctacctttaagtgcccgtggtcgctgacaatgataaaattggtttcgtcaaaccagccgctgtctgaaaccgcctgctccagtctgcatagccagctgtccactttccggatggcatcgtcaatcgccggtccaaacataccgtttccatggcgcgcaatgtcaactgctgacacatgaatcatggttaaatcaggcttttcattccggatcacgtcttctgcgacagatactccgaattcgtccagctccggtttcggatgccagcccagtttaaaccggtgtttttcgaaatatttgtcaaacagctgcggggaacagtttttcttatatataattgcaggatcctcccatttttgtaaatcccatacttccggcagaagccagtcgatgtccgcctgtgccgtcaccggccacatcacggcgtgagttttaagccccttccggcgtgccgcgtcgaatatggtcggaaccctgcagtcccagatctgccagaaccagtctggcgaaagacgtcccggcatgacgcgctcattgttgtaaattccatgattcatcagatttcttcctgtcatctgaactacatgaataggatatgtcaatgtcggatagacactcatgacctgctccactctcgctccgccttccataatttttttaaaccccggaagtgtggaggcaagttctaaatcttcgcctactaatgcatccacagatatgattaccattttctttgccaaagttttcctctcctttaagctatagttattaatgtattaacataaatacatttaatactaaaaaataaaactgattttgtatctcgtctttacctttgcttatttgttttaatgtattatctttaatacatttatattataccgaatatgctttcatatttcaataacttttttaaataattttcatcctgctttccacacactgttccgtacaaataccaccgcctggaaacgccgtagctggcaggagaagggggggcctcctgccgttatcactatctgacttcctcccccctcggaatcgacggcaccgccccctctctcgacacggcgatcccagccgcacgggcggccatatcgagcgcttccttcacatcgccttccagttcatatgtccccaggaagtaccccaaaaacgtatcgccggccgcagtcgtatccttcactccgaagtgacaggcttcctgccgcaggatcgtgtccccctggcagtacatggagccatcttctcccagcgtcagaacaacagccatagcgggataccgggtaatcagattttttacaatcttctccggctcctcttctccggtcaggccatatccctccgtctcattaatcacgagccaggaaaccggagacaagtccatatgcagcaccgtatcatcgatcggggacggattaaaggcgatccgcatcccccgttttcccgccatttcaatcagatatggaacattgctgatctcattctgggatacaagaatatctccttcccggaaatgggacagaacctcgtcgatctccgccggactgatctctccattgcttcccgcataacagatgattgcattctggccgtccttatccttctgtatgatggcgctgccgttcggcccttcgctgtttttcagccaggtacagtccacgccgttggccaccaggatctctttcaggaatccgccgtcatttccaaccctgccggcgtgaaagaccatggctccggctctcgccatcgccactgactggtttaagcctttcccgcccgggaaatccttaaatcccacagcggaaatggtttctcccggcctgacaatgtgcggaaccgagtacacatgatcaatattcagcgaaccataatttaaaatccgagccatgttctgaaacttcctttctcatcccttcaattccttcgccgcccgctcgataatctgttcaaaatccccctcataaatcttcatggaacttccaaacatcaaattggccggataattgaaattctccacattgcatcccgtcatatcgcggaactctgccgcttcacccagatgaggaatcttctcgatgcacggccttgtatctctcatatagccaaacagctttttccccatctcaaatcccataccgcattcaaatcccacatcattggagcactcatagccgcggtaatcattcagatcagcgatgacggcatcacagcttctcaccagccggcagtaattctccgtcagcgcagccgccctcacatagggattggcgctttctgtctccgggaatccgtccgcccagtcacagggagtgacagcctccagaccatacgaagcacagagctccttcaggcgtccgtagacctccctggcgtcctcttcataccggatcacatcggataagtaaactctcggcttcaccggagcgttggccggatcatgtgtctcattagtccggccctgcgccttattggcctccccggacgcctccggaacctgcgctgcggccatggcgcccgatcttccctctgccttccactcctcctccaaatctgtcatcagcatggcgaggcagtcgtcgaaatcaccttctacgatcttcgtcgaacctaccacggttggtgaaaacggcagttccctgtaaggtgcttttttaccattttcatcatagacaatgccatccttcatcacgtacttctgatctttccatgccagaggccgcttatctctcgtgtatccgtagcattttaatccatccgcatatgccattccgatctcgtagatggttccgctgtccgcttcagaaccgcggtacgcctctaagtcggcgataatgaccgtagtttccttcattatcattttcaaatccgcaaaaatactgtccgcccgcttctgaagctccggattccccatgtccagcggatgctcgttgggaagcgtaacgccaaagcccaggctctccgccctccgtctcattgcatttaaaatatccggtccgccctgatagaagcactcggggccggctatataaattttttctttttcaaacatgtataaacctcccgtttaagccagcacaagcttcatgagaagctttaagaatctctcataatcggcgctctctccgatttccacaaccggcagcgattcccatacgaaatgatgtctccggtccagcaccgtcatccccagcgtcaaatcactcttcgtctcaatacccacgtgcccggaaatggtctttaccagggtagcatcgatagcgtatcccaccgccatacagtcaattaccgcacagtacgcctcaaagcctttttcatttacaaaatgaactgcctgcaaaaagaactttgcctccggcttatcgctcgcctccagcatacggatatcttcatctgtcaaattcacatcgaaatgagtcgccacatcaaggcccagagccaccagcttcacgccggaattgtatacaatatcggctgcctccgggtccacatacacattccattcgctctgcggcgtatcgcctgtagcattggtatatgcgtaacggttcagtccgaacgctcctgatatggcatagattccggcgatcatctccttgatctcaggcgcctttttcatggccatggccacattgctcatcgggccggtgcagagtatgtaaatctctcccggatttgcctttaccgtatctataatcaattccacagcattcttatcactcagcgcagtcaccggatcgggaagataattttctgcctgaccatcctttccatgggtaaacgggtccttcgggcattttctcaccatgggctccggcattccctttccaaccggaatatccgttctaccgatcagttccagcaccttcaatgcatttttgctggttacatcgacgcggtagtttccatttaccgctgtaatcgcctttacctccaaagcgtctgatttacaagccataataatggctatggaatcgtccatacccggatcacagtccaggattattttctttttatccattttattctcctcttttcttaatctgaatgctcctgaaactttttcaggaaccggatgtgtttctacgcatccgcctgaatcttcacataaaattcccggtttcttggtccgtcaaattccaggaaatagatcccctgggaaccaccggccaacagctttccctcatgcacgataaaattcccggaaatgcccagcagcgccgattttacgtggcccgcagcatcctgcggagtatcgtgctggtgtttaaaatcaatccgggtcggcaccagcctgcggatctcctcgtccagatccaggaacccgtccggatcccatggagaaaataccgccagccccgctgtggaatgagggttgtaaacgaggcaggtgccctcttttactccgctttcctccaccgccttctttacgtgttccgtaatatcgtaaacctcattgtacttcgtctttattttaaagtttttcagcatttttccatcctccgctatttcaaaacgatctcattattctggacacagaagccattttcgcagaagctccatggtccttcacatccgcgcccatactcctctcccaacatggcggagagataaccggcgagaagagacatcggaacgaactgggtcaccggcatattgaccggatatttgggagacggcacggttacacaggatacgccttccgctccagctccatcggtgatgactaacatcggccgccccagcttctttccataacgaatgacgtcctttgtcctgcttagccccggattcgtggtattggacaccaccacggtgccgatgtgttccggatccttggcgaaacagttcaaatggaaccattcctccgagttgatatgcatggaaaatttccctgtggcctccagcatcttcgcctggccaaaccatgccgccgcgtagtcgaagcccgctcccacaaaatcgaagcaggggaaatccttccattcttccgccgtcttggcacacgtttccgccatctgcggcagaagcgcttccagcaaatccccctgatttttcatatcatagcggtagtccatggcctgatccatggtgtacatgccccgcacctcaccgatacggacagccagcagaaggagcgccatcacgctgaccatatagcttctcgttcccggcgcgctctcaaagggcggaatatccagcttcagcactttatccgagttctgggccagtggggaagtcaaatttcctgtgattccaaggacgaaacagtcatggaatttcgcccgctgaaccgcctccgaaattctggccacgcggcccgaattgctgaccgcaatcaccagaggattctgacagtccacgcccatgtggcgttcactgtaataccggccaaaatcgatggctgtcaccacctcggcctgaatacccgtcagcatctcaaacacatgcttcgtggccatacacgccgcataggaatccccgcatcccgtcagcaccacgcgctgaatattaaatatctcctgaaaagacaggactttcctggtctttggttccaggtcctcatactggctccgaatcagctccggaaggctcatcgcctgtctgcacatgggattgtcatactctttcgtcagtctttcactcatatcactgcttctcctctgcctttttctcgttcttttcctgatctaaccggtttaagaccgcacagccctccagtgcgatatcaatcgcaaactcatggccgccgcccgcttcaaacttctctccggtgcaaagattatccgcaacggaacagatggaaccgcccctgcgtccaaacagcgcggacagagtcacgatcgccgctgactcccggtcgccgttcagcacaccggcccggttgtagattccggctgtttcaatattccacggctgtaagtatccgccgacgccaggcctgcctccgcccacaaaatcactgtccacagacaaggtcacgcccacatggtacggcgctcccagcgattcggcggcttccaccatggcgcctaccacctcatagtggctgaccgccggatatcctgccggtatgtacgctttcgtcatggcctcttccctgaccacaccgctggcgatcaccacgtctccgggcttcacctcatcaccgattccgccggaaccgccgacccgcagaaacgttcccgcgtccgtatattccataaaatcgtataatatcagttccatttccggcgatccgctgccgccactgaccacggtgatcttcgctcctttatacgttccggtataagaggtaaacatcccggaattgccaatcagctctgcatggtccagtctgtccgcaattttcttcgccgggtccacatcgtaggcacacaggggatccctcaccgtaatcaggacaaaatcccccaccttttcgtggtcaatctgggtaagcgccgggcgtcctttgatcatgagcccccgttccggtacatttttatagtactcatactgctcgtgaatccgtctgatggatggtttctttctgatttcctcactcttcattaaacttccgtcctttcattgcctctaaaagtctctgcgcggcctcccgcttctccgccccgattacctcaggaacgccatactgctccagacacatggcggccgaaatgcttcccatcagaccgcactcctccggagtatggccgctgcaccagccgtaaagaaccgcccccgacgagctgttgccgccgcctgtagggtccaccacatacgcgccgtctgccgtaggtacgtacacggtctcttcctgcgtgatcatcaccgctcccttagagcctctgcgtagaaaaatcatctgcaaatgattctgccgtacagagtgactcgaactgtccagccattccctgaatgttccgattatctcgtccaaacgctctgtaccgaataaattcctggcctctgttaaattgatcgaaaagatatccacacttccggctgtccgcctcacctcgtccaggcattccggacaggtggaatcgctggcgatctcccacaagacggcggctttccgtttctccatcatgggaaggacctgctcccagaaatccggggaggtattcttgaaaatatagatcccctttgccgattgaaaatacggttccagctcgtttggcgtcacctcaatcttccggtaatgatccgctccgtacagggccgtctcactccgctccccatcctcaaaatactggattatgttataaggcgttttctcatccttctcaatcagcccttccatggaaatatggttcttctgataccagtctccgaacagttccccgtaatcccttcccacacctgtcacaggcattacgctgctgcaccagagccggattccgcacagcgcatagatcccggctcccccagccttttttaccaccgtttttttatctgcaaatctaatctcgtcagtcacaaccgttgatgctatgatataatccatgtcctgcctcctgttctgcaatccggatattccgctccgccgtgcgccggaacattttctatgaaacaataaagctgtcgcaggtcatcgttcccttcgaaattgtaaatccggctccgccgccctgataggtgccatccgtcacctcgattaacgtttccccgtttaccgagaattccagtttctcccggtgggccccaaaggtaagcgtatatcccgtgtcctcctgataagaatagggaacctccgccagtatcacccgttctctgtccttctgaacgtataccacggcacggctgtaatccatgagcgctgctccatagtaccgtttatggcccctgctcctcacaaccagaccgccagcctggtgaagactgtaaaagaccgtcgatgacacggtataatcttcccattccctggtaccgatcgttaccagcccgtcttcctccacattggagacacagtaggtgtgtttgaaatcagccgcaaactgaaccgcggaactggcaaatccggccagccacagcggattggtattccagatggaagtcatcagcatgcccctctgtgcaaaatccgtgggcgctcccttccagtcgatgctgcagatcaccacatcaccgtcgaagcgtttcctgctcgcagcttcatagcccagtttaaagatggacatgcccttcgtatccggtacggtccattcaaaggttttcttcgtttcatccagcagaaccgcatccccatacatggctctcacctgattttcaatatcataatagagaatataggggcgcagagtcacctcattccggccggaacttccgggagaactgaccaccgctgcctccgtcaccaccttctgggaggagtacagggtcggagaagccaccgtggaaaagttctgtgccagcttcgagaaatcgataaaggtctgggtggaaacatttgccgtcactccgtccgccacatggcggcagttgatcagcagcccgttctcccccgatctttcattataattggacagcgtgacggcggcctggctgccgtggtcatagtcacagggtgcaaagccctgaagagagccggggtattcaaaggtgtaccgtttatccgacacaggaactgattccccgtgcagggcacccgcggccttcagcaccttcctgctctctgacaccgcatccgataccaccgatccgccatccgaggtgacgacatacatcagatcggccaccggcgtccggaagtccgcaccggcgttaatcccgtcaagccccagccggattccgttaaaagcgcccacattgcccgcattgcagtccgtatcccaggcagccgaggatgcgatggaaatggatttctggaaatcatctccgcccagcaggattgccgcgatcaccatggcgtgattgggaatcatatgacagcagcccggaaatacttcatagccgtatttcgggtctaagtaatcccgaacctttctccagtcagattctctgctgcagatatcccggacatcaccgatcatatcctttagaacctgatttttcacataggcaccagcccggtccagaagcacgttcacgtctttttccgtaaatgccatcgcctccagcgccgctaaatggcaggcggcttcaaccgcaataccgtcgtggctgacactggctgcctttcttaccaggctgaccgccagatccggatcatcgggacacgccatggcaatcgcgtcaatgaaaatctgtgctccgatctgctccgccagcgtcgttccatttgtcttgatggctccgctctccggtgcattcatgccgttcttcagattcaaaaaggcggtatgctctgtcgaccggcccaggccgccccaccagaggatggtccggttctcgataatatagttgagccacgtatctccaaacgcctttgcaggcagctctctgtcatatccattgtcctccagggcccggaaaaacgcgaatgtccctgagatatcatcatctgccacaatcagcggaactcccactttctcgtgaacgtagtacttcacctcatcaaaggtctcccggatcttatcgtaactccagccttctacggggcggcccaagtagacaccgatgatcttccccagcactcccgcatagatctgttctctgaattttaatacactcacactttttacctctcaatctttctcacttcaaagccgtctgccaggatcgccccggaatctacgacgaagcccgctccgccgcacagatagctctcatccagcccgctcaccactgtttttccgtccactgccagagaaagttccgggccatccagcgtaaaggcaagcttcctggtatcatcaatctcaaaatcaaatgcagcttctgccaccacggtacgttctgcgtcacactgcttatagatcactgcctttttgtccttcagcactgccccgtaataccttctgtgtcctttcgccctggccaccaggcccgctgaatcctgctgtgaaaacataatcacagaactcacagtatagttatcccagtccatggttcccgtcgtcgcaacaccgttgggcgctgagtgggagatcgaaaatgtggtcgtataatccgggcagaaatgatctgcagatgagacaaatgtcttcagccacgcggttgttgtcgtccacggggtcagagtcggcgtcatttccatggattttctcatgcggtaacactccggagcccccgaccagtcgagtgatttcaaggtcacagaaccgtccagacgggaacagcctgccgctccgctcagcccttccatcggatttccgggcagttcgccctgtgcaccgcttcttaaggacagccccaggcggtaaactgcgtggcctcccacgtcgggaatcagccattttaactgattatccccggcatgaaggcggaaggcgctgctggatacagtctccagctcatctttctcattgaagtactcaataaaaaaggtaaataccggattttccccttctcctgccgcaatcacagccttcacctcctgaccgctgtacagggaaggcgaacagagcacatcaaaatagctggtaccttccttccccttcggctgaaggtcaataaacgtatcgatgcaggccgtcgcatggactccgggtcctaagccgcggtaagaaaggcggcagccgtactcacccgtttcctcatagggattgtcgatcccgcacagcacctgttcttccgtatttttatcatagggaaccacgccctgaacggcccccggatattcaaatgccagacgttcctccgggaaatcaaccggttcaaactccagacggcatgccgcctttaagattttccgtgactcctgcaccgcatctgaaatgcaggaaccgccgtcgctggtaaccacatacagacggtccgccacggctttccttaaatccgtgctctttttaaagccttcgagccccagacggatgccattgaggcagccgacattgccggaattgcagtccgtatcccagccggagctgcaggcaatcatacacgatttgtggaaatcgtcaccgcccatgataaatgccgtcagaagcgtcagatggttcgtgaccatcgggcagttgccggggtacttctcatatccgtggttctctgcaatccactgcctcacttcccgccagtcggaagccttcgcacactgttccctgacagcccccacaagacggataaattccggattctcaatataagaaagccccgcgtccagaagcctgtcgatatccttctccacaaatgccattgactccataaccgccagataaaccgccgcgtcgactgcaattccgtcatgactgacgctggctgcttccctcgccatcttagccgcacgctccggattccccggatttgccatggcccatgtatcgataaaaatctccgaaccgatctgttccgccatgctccgcccgtttagctggatggaaccgcttttgggagccctgatgccatttttcagacggagatatgcggtatgctccgtgctccgtgaaaggcctccccaccagaggatggtctcattttcaatgatatagttaagccagctgtccccgatctgctccgcccggatccccggatcgaatttgttgtcctccaggctgcggaaaaacgcgaaggttcccgagatatcgtcatccggaacgatcaaaggcgcgccggttctgtgatttttatagtagttgatctcaccgaaggtatcccggatcgcctcgtaggtccacccctctaccggccgtcccagatagacgccgatgatctttccgagcactccggcatagatgtcatttttaaaacgaatgatatttttcacgttaaatccctccattttctgtcaataacaggctctgacaagtccagttctttcattgccggcctctgtaccgccgtgttttatgtgtacgtctagcctttcactgctccgctcaccatgccgtccacaaagtatctctgtgcgcagaggaagaaaacgacgatcggcgcaatcaggattaccgaagaggccataagaatggacatgttggagccgtagcttccgttcatggataagaatcccaacgtcgcggtaaaattcttttctccctgtaaaaaagtactggatacgagatattcattccacgactgaaggccgatcaaaatcccaacagtaatcaatcccggtgaaaccacgggacgcatgacatgccagatcacctgtccggtgtttgccccgtcaattctggcggcatcctccagttccttcggcacatttaagaaaaatgttctcatcaggaacaccgacagcggcatgaacatggctgccagaatcagactggtcgccggaatatttccaatcaggttaagctttgcaaatgcataatacagcgggaataagaacagctggatcggcacagtcatcgccatcataaagtaggtcaggatgatgccgctccctttgatccggtaccccgacagcacatagcccgccagagtggaacagaccagaataatgagaatcgtacagccgctcagcttgatactgttgataaacccatgggcaaatttacccgtcgtccacgcctgaataaaattctccagatgaagcactttgggaatcgacaatggattccttacgatttcagcatttgtcttaaaagcgttgatgaccaccagtgcaatcggaagcagacagataagcaaaagcagaatcaatacaacatgaatcagcacattgatccatattcttttctttttcgaagaaactcccatattctcctcctaatccatgttttctttgcggctcattcgcgtataaatcagagaagcaatcaacccaaagaaactcataaagagaccaaccgcggccgccttgcctactttcatctcactgaatgcaaaggagtaggcgtatgtaccaagtacctctgtcgaatgtgccggacctccgccggtcagcagcttgacgtaatcaaatgcaaggaaggaaccaatgactatcattacaaacatcaggtttaccgtggacttaatattcggcagataaatgtagcggaataactgccagccattacagccgtcgattctggctgcctccacctgatcggtcggcgtctgtcttaaggccgctaagtagattacggttaaataactccagtaatgccagatatcgacgcctgcacaggcaaatatcgcgcttttcatactggcaagaggcgagcctaaatcaatcccaaagttcttcagaaaggatacgacccctacaaccgggctgaaaataacgttcagccacagcatggcatttaccgcgggagccagaacgtagggaattaaaaaggccacctgatagatgcttctcgtcctggaccttgagagaagaagcatagccgccagcatgccgatgcacactggtatcgtgatgaacataatggtccagattagattattgcggattgccataaagaaaatcctgtcatgaaacagctctttaaaattctgcagtcctatgaaattaaaattctgtgaaataccgttataatccgtaaaggaatagacaatggtcatgattcccgggagcaggataacggacacgctgatcagcagcgccggagcaatcaaaagataattccagtttatctttttactcttcattggaaacctcctcttcattggagaaaaatgaccggtatgctgattcatttctgcataccggccatctcccttcatcccttttcaatcgcgtttatcagttcattgccggttttggaatcggaggtacaaggcccttagccagtgcttccgcaaaatccttgtctaccttatccagataatcgtttaccgataccgtatcgtaccagacatcctcaatattcaccatgctctgctgagtggaggccgggaagaatacattatcatagtaaccgaaatttcctttatctactgcagctgaaatattctttaccacatcaacaaaagactgtgataagtatcccatctgactggtgtcaatcgtggataaatctttcaggggtgttccccagtatcccggccatgcagctgtcatctcctgcataaattccggctggaacatcatatcaatgattttggccgcttcatccttatgttcctggctcacatttgcattgatggaaagcgtgcaggaggcacccagagtatacgtttcgtttggaacggtttctgtggaagggaatggaataaacgcaatattttccgtcttatccccggtaaagaaggaggctgcccactggaacgcgattgacggtccaacaaagaacggcgctttttcatcagacaacagctgcagtgattcgctgaaattcaaattcacataatcatcgcctgcgagatatcctttatcccaccattcttttgacttatcaatggccgcggtcacattcggattattccatttttcttctccggtcagacacttgtacatggtctcaggccctgcaacgtgagttaaaaatacggaagcatagttttcatttaccggtttccagcctttgtttcccgtgacagatgcgtatagtccttttgcaagggcatcatccataatcttttccatgtccccgatggtcttcggtacttcccagccgttatcagcaagtactttcttattataaaagactcccatcgtgctgaccccgctgattaaactgtacagtttgccgtttacggtgcctgattcatagaaaggtttcagaatccggtcactccagccatatttttccgagtattcatctaacggctccagtttgcctgcctccacaagcggcataacgaaagacgggccggaaccgtatacaatatccggtccctgatttgccgccagagcggttgacatatccgtatcaacggaaggtctgaattcaatcgacagcttatactgatcctgagaactgttatacttatctgcaagaatccgctgcatcgcttcctgcgcgtatggctccgctccccagaaccacagggtaatctcctcacgcccttttaagtcctggcctgctgtcgtctcctgggccgccgaagctgtctctcctgcagctgttgtccccgatgcatcactctccggtgtgctggtggtagatatgctgcaccccgataaaagagttcctaccatagccgctgataaagctgctgcaaaaagtctttttttcatttccttttctctcctttttcactgattttttcacgatacccttcgatttttgataaatttgtgataaatatttgtgtaatttcattatatcattttatctacttttgtcaatacgaaaaaataaattcagaattttcatatttatatggattctaattcgtgttttattcttatttatcagtcttttatttgtattttttgtgcaaataagccaaatatactcagataaatacaagttaaatcacattctttattttcatcctgattttcacatttaattctcaaatgaaaaatatcaaaaaaaataaaggcgaaaaacgatgctgtattcttcgttttccgcctttatgatgtataatatttatcttttatttatctttttattcatcttatctctttattttaatcttcccaccgaatcacgctccaccacaaacggtgtgaaataatagtttctggccggctccggttcatcagaggccggtacctcgattctgcgcagcagaacttcaaccgccttggaggccattgtatccgtattctggtccacgcttgtcaggggcacgtccatgaggccgcacagttccgtgttatcgtagccgatcacggacagatcgccgggtatggaaagccggtgttcctttgcaaagagatagacaccgtaagccatcagatcatttccggcaaccactgcggtgacgcccttctcccacagaacctccatcccggcccgccctgactctatgtcataatttccataatacacaagatccttgtcaaaagggatcttcgctgcagccagcgcttcgcggtacccttccacccgctttctggaagtatagacattcatctcaccgacgagacagccgattctggtatggccgtgttttattaagtactctgtggcaatccggccgccgtgtttattatctgccgtcacgaaatcgcagaaaaccgcatatgcggcccggtccagcagtaccatggggactccgcttttctgaagggattttaacaattttacattctctttatccatcgttctgggtggtatgacaagtatcccatccacgttcttggccatcagcccttcgattgccatataaaagcactggatatcatcattcgtataacactgaaagaccgtgtattcctggtaaaacgcatgtctcgacgtctcctccgccagcctgtgatagaaggaactcatcacatccggcaccaccatgccaagcgtcttcaccttcttgaattccgaaaagtcaatctccgattccttctgaaactgcatttctctggcgacacggagaatgtgctccttcgtgtcctccgcaattctggaagggcggttattcaaaaccagcgacaccgtggtaggcgatacccctgccgcttttgcaatgtctttcacttttactttcaatgttatccctcccaatggttagttgataaatatatttatcaataatatataatatttatcaggtggcgtcaactgttttcttcttttctcacaattctttcatgcaaagcgaaactatccggtaaatctgactcatcagtatttaccggatagcataaggcgcacagcagaagtattcattaaatcgacatttccatacctgcactgcttccctttttccagtttcggctgttgataaaaagtgcaaccaggactgcaatataaggaagcatatccgtaatttgattcggtatactaacctgctgcagcgtaaggccaatgccctccatcatgccaaaaatcagacaggtaaccagaactttgaccgggtgccccttcgagagaataatgatagccaggctgatccagccacgtccattggacatgttctctgtaaacattctcataattcccagggacaggaacgtacctcctataccgcacagaaaaccgcatattaaaatagaaataaacttcagaagttcagatttgagtcccaccgagtcaattaccttcgcatcaaatcccgaagccctgagcctgagtccgaaagacgttttataaatcaatatgtacacaaggggaacaataacaatcagggtaatataaagaggaaacgcatggccgctgacaatctgtcccagcacaggaatgtctttaacgaacggaatattccatcgtggaagcgcttcaattctcgggctgattaaagatccctttacctgaaagagctgccgcaggaaataggttgtcgccccgagtacaaacgtattaattgcaatacctgtgataaattcacccgttttcatctttaatacaaaaaaagcaaataacagggaaatcaacatacttcccagaattccgaacaaaagtcccatagcccaggattcgaacatgtacgatcccacaacggaagtaaatgcgctgaccagcagcatcccttccatagaaatgttaaatacgttagcatgccaggtaaacagtcctccaagagcagcaagcagcgccggtatcatggccggtaaggccgattttagaatttcaacgaacagattcactctgattcacccccttatgtaaactgcgtgttttcttgaatgcagccagcttatccaaaaagattccggaataggaacggaatgccacaaccgacagaactgtaattgcgataagcatctttgtgaattctgatggtactccggtatccagctgcatccccgtagatcccgactggaaaatcgagaatataattgcatagataaacacacccgtgacctggttgccagacacgatggatatcatgaggccgtcatcagcataactctgcccaaggccgcccaggaaacgatgctgctggctggctcccattatcatcatgactcctaccagtcctgccagagcgccgctgcttaacatcaccttcataaaatttttgtcggttttacacccgccaacccgggcaaaaagcccgtttttccccatgatccgcatttcataccctgttcggctttttttcatatagaacactgcaatgatgtaaacggcaatcataataaatgcagcacagtctatctttcccatcgccggtaaaatcgcacctcccggcacaaccgggctggcaggccaggatgcccctggatcctttaatggatttgtaatcaaatatctggtaaaataatctgcaataaaattaagcattaacgttataataaattcattcattccaaagcgctggcgtccgagtgctgcaagacccgcataaagtgctcccgccgccatcccgccaattatcataagcggaatcaaaagccaggaaggaagcggtacatacagcccgatcagtgttgccgccatagcccccataagaagctggccaaactgaccaagatttgaggctcccgagccaagggcaatcgaagccgatgcccccgctatcagcaaaaatactgcccggttaattgtattggaaattcccacgctcgtggataaactgtatttcaaaatgcttgcatagctttccatgggggaatatccctgagacgccagcatcagcataccgattacaatcgccgtcactactccgagaaataccgtaaacccctttttcacttccggcgatgcagtaatccttttcgcaaagcttacattcgtcttattctgttccatttcagtcactcttcacccccagcatgtattcgccgatctcttctctggtcgtttccgacgccagcttctccgcagcgatctttcccttgtgcataaccactatacggtcagataaattaaacagctcatcaaggtctgcagagaccagaagcactgcctcgccctcatcccgcttatcaacaatttttcggtgtatgtattcgatcgacccgacatccaggccgcgtaccggctggtcaactaccaggagagaactgtcaagttcaaactcccgtccgacaattaccttctgctggtttcctcccgataatgcgccaatcggcattcgggggccctggcagctcacctgatattgactgataatctggtttgacagctggcgacatttctttttgtccaaaaggcgtgtttttcctaccagccggtcactgacgtagtgatgtgtcatcataacatttgtttcaatactgtcttccagagaactaccgctgatcttccggtcctggggtacataggctatgagacgtcttcttccatggacatccattttcgaaatatctttcccctccagcagtactctgcctttcgattccatcagtcccattaccgcctgaaccatctcatactggccattcccctccacacctgcaacaccgacaatctctcccttatgaaccgtcatggaaacgtggtctaaatccatcttccctggtatccccggattttcaaccgccagatcttcaatctgcagtacagctgttcccggttttgcagctttcttatctatggtaagcatgacttcccttcctaccatggcactggccaaatcagcctttgtaagtccctcattctttctggtccatatcagtcttccagctcgcataactgtaatgcggtcagaaatacgcagtacctcatccagcttatgactgataaacagaatcgtacagccctccgacttgatccggtccagaagtccaaaaagttcatccacctcctgaggagccagcactgcggttggctcatcaagaatcagtgtttctacatcacggtaaagcaattttataatttcaattttctgttgtgccgcgatcgagatatttttaactttttcatccagaggaatatcaaacttaaaatcagtcataatcttctccagcttttttctcgctgcagacagattgagcagtccattcttcgtaggttcattccccagcacaacattttccaaaactgtatattcgccaatcagcatgaattcctgatgcaccatgccaattccttttgcaacggcttctttaggagaaccaatggcggttttgcttccatttattgcgatttccccttcattcaatttttccatcccgaacaaaaccttcatcagagttgactttcctgcgccattttctccgataatcgaatgaatctcccccagagtaatatccacgcttacatcctttaaagccacattattcggcggatacactttaacaatattcctcatctcaatataagaatcagccacagtgcccatacccctttcacaaatctattctgtattaattactctgtatagcgttctacggtcacctttccatctacgatatcatcctgtaccgcattgatctccgtgatcatttcaggagtcagaatctctttggagtattcgtcaattgcaagataaacgccggaagggcctgcacctttcgaatagaccgtacccttttcaaatgttccgtcctctatcttcgaaaaggtatcataaaccgctccatccagatccttgattacagaggcaacaacatgtcccggatataaaccgttctgattagaatctacaccaatcacatacttctgttcttcatttgccgcttcaagagccccatttccggaggttcctgccgcctggaatacaatatccgccccctgtgcatacagctgtttcgttgctgtcttgccttttacaggatcaaagaaatcccctacataagaaacaagaactttgatctccggatctacaaattcaactccctgtttaaatccagacaaaaagcctttgattaccgttatttcctgtcctcctacgaatccaaccgttttctccggatttgcataaggcagatcgctggttgtcactttcgcagcaagcacaccagccaggaacgcaccttcttcgctgataaaggtatagctgctgactgtcttattggaattttcgatgacaaagtccagatttaccatcgtaacgtcaggatactgatctgcatattgtgcaaacaattcctcaaatccatatgcgtctgcaaacaccacatcaggctgccactggaaacaggcctccatggactctgcatattttgccgcatcattattattctctatcaccgtaatttcagcgccaaaatcatctttaatccggttcatgccccgtaccacagaatctgtaaaaccattatctccctgcgcacctgccgtcacataagccactctcatcttctttgtttcttttgcagcctcagtctggccttccgcctggctttccgtcttagccggcgttgtgtctttgcctgtctctgtactcgttgtcttcccaccgcaagcagtaagcgtcatagccgccgccataagtaatgctgttaccttcattaattttttcatgttttttcctccaatcattattttgtctcaatacatttactgttttccaaggatttccttaagcatcgctgcaaaaagctctttatccgctcccaacgcaacctttgcattagggacatccctcttattcctctttccgacatcgcagatgcactgtccatcggaagcacccccatttatatccacatcaacatgaacagagaccacatttttcaaaactgccggattaattaccgcgcatacagcgagcgcgtcatgaaccggcactgtattgatatcatccatcggctgccagttcttataagcgctccaccgccgttcaataatgtcggcagagacaacagaagcttttgttcccatgcgtcttaactcttttgcatcctcaatagaaaccgcggccgcatgtgttgcgtccaaaggcacaatagtgatatcgcagccgctgtcaattacaatctttgccgcctccggatcaatccagaaattaaattctgaggtaggagtaatattcacctccctgcagcctccgcccatcaggacgatccgcttaatcttagcagcgatggctggttctatcctgagtgccatcgctatatttgtaagcggccctactggtatcagggtaatatccccagcagatttcatcagggtatccaccagccatgacaccgcattccccggcgccgcactgatcgtcgccggcggcagctccacataatctccgtgaacgttatcttccggatcctccggccccgtatatgggatttccttcctgcgtcccggcgtcaatgacaccaccatcggaagtgaacagcctttatgtaccggtacatcgcacgcccccatatactctactacccgcagagtattttccgtggtaaattcaataccgcggttaccgtttaccgaacaaatgcccagaacctccagttccggtgactgcagggcagtcataatggcaatcgcatcatccgtcccagtatcaacatcgagtatcactttctccatgattaaatcctcctctttttaaaccgccagcacatcccccagataatccttcagttcttctcttgcaggcagtgattcctgtgctccttttctcgtcacagcaatagccgaagctgcattagcaaatcccaacgcggcaccttccttcattccttccgcaagcgcggccgcaaacgctccgttaaagcaatctcctgctgcagtcgtatcaaccgccttaacctttttggcagggtacagacactcctcaccttttttaacgagaagcgctcctttctcacccagtgtaacaatgacgcaccccgctcctttttccaaaagtatcatggctccttttttcatactgcttacgctgcagtctgtcacgccgcttaatttcatcagctctgtttcattgggtgtaagataatcaacgttccggcacaattcctctggcagttcatcaggcgccggggccggattgagaatcaccgtcttccccgcttccttagccatcatcgctgcacaaagtacggaatcatacggaatctccatctgaagcacaacataatcgcaccactcaaacaattctctctgtctcttcaaatattccgcatcacattctttattagcgccgggaatcacaacaatattattatcaccatgggaatccacacagataaccgcagttcctgtaggctgatcgtcactttttttcaaataagatgtgtcaacccctgccttttttagattttctatctgtttttcaccaaattcatccttcccaacgcatcccagcatccttacttctcctcccagcaggccggcagcacacgcctggttcgctcctttgcctccagctctgtaagacaagtcatttccaaggaccgtttcaccgactgtcggaattttttcaaggtttacagacatatccatattcaggcttcccactaccaatatgcctttactcatctcttcctcctttttaagtcattttgctaaggaaaatgttttcctaaatctttttcttagttttatattatcatacttttttatcttgtcaatactttttatgcattttattttacaaaaatatttttgtaaatagttttcttgtatattttgcatatcacatttttactttaacattgacaaagcttatcttctataccataatagagataaatcattgccagaaaaaggcaaatattgtaaatgactgagagggagcttcatgacgatcaaggaaattgcccagttggccggcgtatctatatcaaccgtatccaaaattgttaataataaagacgagaacatcaatgtcgagacaagaaacagagtattaaaaattgtcaaagattataattatacgccctatggcactgcaaaaaacacttctgaggccaaaacgtttattcttggcgtactgttaaaatcaacgccaaaaacaaacctgtttttaaacggaatcatcctcgccgcgcaaaaaaacggttacagcattcttttatatgacagcgcagagagtacttctgttgaattaaaaaatatcacatctttatgcaagaacaacgttgatggcgtcatctgggagccggtcagtcacctgagcctggaatacgagcgttattttaatgagcagggcatcgaaacctgccgcatcaatggacccgatgatccagcctcctactccattgatttcgcgcagatgggatatgaagcagctcagatcctgatccgccacggccattcaaaactgggatgtctcaccaaacagggcagcgcccgttccgccatggtctttgacggttttaaaaaatgtctgtttgatcatggcatcccgttttacgacacgatgaatcttcctgtggaaaaagatgactggtataatgccatgctgtcccacactccaaccggaattgtcagtactcactacgcctcctctctgattctgatgaagcagctggcaaaaatccagtttctggttccctacgatttatcgctcataagcctccgggatgatgtaagagaaaatctgacctttcctgaaatctccagcatcaagataccctactatgaatttggttcctttgtctgcgaacgcctcattgagaaatgtgaaaagaaaggaccgtccgctgccgtattttccaccgcctatccattggaaaacaccagcagtatcgatgttccattttcttcccatgcaaagaaaatcatcgtcgtaggcagcatcaatatcgatgttactctgaatgtagatgaactgccccagccaggaagaacagtcagcacaagcaagcactccgtaataccgggagggaagggggccaatcaggctgttggggctgcaaagctcggcaatgaagtatccctcataggaaaggttggtaatgattacgactccaccatcgtctacgcatgcatggaggaaaatcatgtggatgtacagggtatccgccgtgatccccattcagaaacgggcaaggcctacattcatgtacagaatgacggcgaaagtatgatcaccatcctgaccggagcaaaccagcacctgatgccatccgatatcactccctatggcaaactttttgaaaacgccggttactgtcttcttcagacagaagttcctgaagaagccataaaaacggctgctctcctggcccgcagccatggtgtctgcaacattttaaaaccggctgccatgaaccgcatcagtgattcccttatggaactcattgatattttcgttccaaacaggaaagaagccgaactcctctgtcctggagttccaggtattgagggaaaagctgaggctttcttaaaaaaaggagcgaagaccgttatcattaccctggggcattccggctcctacatcaaggcccctgaatttacaggttatcttccggctgcggattttacgccggttgacacaaccggtgcggcagacgctttcattgcagctcttgccgtctatctgtcttccggacatacgattgcaaaagcggccaagatcgctacctacgcagctggtttctgtgtgtcacggcagggtgttattccggcgcttattgaccgtaattcgctggaaacctatatcaaacggatagaaccggatattctttagcctatacctcccggcaaacccaaaaaggaatgaacaaagctgtcttggcaccctgttcattccttttcaaacatgttcaaataatacgttttataatttactcttccactgcctcatatgtctccgcaatccgactctcatcccccacgatatcaagcggctccatcggcctgcgtacattcttatactccgccatagtgagatcctgggcgcagtttcccggtgtcagagccatgatatattctttcagcacctcgtagaattcaggcgtcaaatacccctgtttcaccacggtaatccggtaatcatatgcgcttagtccgtacgaattcaacacggcctccgaggtgatcggtccgcgttcggccaggatcagcacggttaccgcatctgttttcacgactgccgccgtcgcttttcctccctgacggaatacctccaccagctcggcgtctggaagcaccgttctcacgcttcccgccggatcgatcgtgccgcccaggcttatatcaaaccggtcccccttctcctttgcggcgcagaacgccacagcggggccgtcgataaaatgggcaacaagaactcctttaatcccctgtttcaaaattaaatccagcatataagcgttatcaccggctgctccagccgtcacattatctgcagaatcggacagaaacgccggataatgattgcaccggtccagagttataagcgcctccagcggttccatggcagttccctggaatttaaattcctttctcctgttccagatcttcctgcccagttttacagccgctttgattcccggctttttgtcccccacaccagatatcacgatggaggagcctccctgtgcacagtccacccagggcattccggcaaaataggaggcacaccagacccccggaactttctccagttccgctaccatggcgattacttcttttccaaaaccggattccgtcatcatattttcccccggcatcataaatggaagccggataagctccgtccatggttcctttttctcctcgatcgctttcatcagcagttctgccgcccgtatactggtttcctcaatgtcgatgtggggcgcagtcctgtatccatagataatgttggacaatctcgcaagcgtatacgtattatttgcgtgaagatccagcgccagcgcaatgggaactctgggccccacccgttcccgcagcatgctgatcagaaacgtgtctccgcttccgatgaattccacctccagggctccatgggaaggaaaaaagataccgctcaccgatccatccagaggaagcttttccagaatctctcctgccattctccggaaatcctccagttttagtatcccccccggccaggcactggcacagagtcctggaatcacctcataacctgcggcttccagttctctgactccaggcgtctccaaaagcagctcctcccctttcagatatgtaaaaaaatctttttgttcagacatcagcggagaaaaggaattactttcctgatagatacctgctacgaatattttctttttcatcttactatatttcctttgcactttgtttcatttcgtttataataaataatactataacttcttactcagctgaattttacaggagaaaaatcatgggaaatgataaagcatacaacaaacctgtctacaatgaactgatacgggtttccaacttatactattccaactgcagcttatcagacttactggattatctggcaggtatctccggctttacatttgtcctgactgacaccggttttcatccggtcgcagccaggctggtcttcggcagccagaagaataccttcgccgcatcagatcatgcttttggagagattccccccgaagagatctcactgtcttctcccgcctccgaatcggaatccggtaccgccgtattttgcatcagagaagagactgtagtctgtaaaatacttccacttcccaactacagctattatctctgtatcgacggcaaaatcagtctgactgacagccgttttctggccattgtggagaatgcgcttccatttctcgccctgacactggataaggagaaagcatttacagcagcaggattttccaatgatttttttgcgccttttcttcaggtccttcacagcaccagttccaagactccggacgaaatcagaaatatctgcaacatctacaactttaatcctgacttaaagcgggtctgtatgacactccagctccagaacgccggtgaagataaggaagagctccgggaactcattgccagactccgcaatttactgaatgcagacaaatattttctgatctacagccacaactttgtcagcgtctttctgctctatcctttggctgatcaggatctcgacattataacgaagagctatgtactctccaccagtctctttaaggaactggaatcccgtttttccttgaggattggaatcagcagcgcccattttggtgtggaaaccatcgcggtatccttcgaggagagctttaaatccattaaggtgcagaaacagctgaatctgccaggcagtgcctcctcctatttcgagcaaagcatttaccatattttaaatataccggagcttaaggatttccggaagctgagccgcgacatcatatctcccctgatcgaatacgatgccgcaaatgatacgaattttttcgaaacgcttcagcagtatttccacaactcctttaatatccagaagaccgcaaaggccctgtatatccacaggaatactctcagctaccggcttcagcacattaaggagctgctgaaatttgattttgactttgagcataacactgatgccctttttaccctgtacctgtgtatctgtgtctatcagctcggatatcacaaggatttcacctcctgaattccggactgcccgcttcacggatccggacacaggtgtttatcccttaacgcccgagctcatgcttccttctacgaagtatttctgaaggaagaagaacagaattaccatgggcagtattgctatggcggaagccgccatcaacagtgcccaatccacaccgtaggtattggtaaactggctgagtcccagtgaaatcgtccatttcgaggatttcgtcaaatagatcagcggacccatgaaatccgtccaggaccagacgaacgagaagagcgcaacggtaacgaccgccggcttttcaagaggcagggcaattctggcataaacccatagttcactggcaccgtcaattctggcggcttccatgaactcatcaggaagatttctgtaaaactggcgcatcaggaagatgaagtacgcagtccccaggaaatccggcagaaccagcggaatataggtattgatccatccgagtctggagaacaggctgtacagaggaatcatggtaaccgtaaacggcagcatcatggtagcaaccaccagcatgaataccttgtcccgtccgggccattttaacttgccaaaggcataaccgatcatcgaggccgaaaggacattccccagtaccgccagcgatgtggttttcatcgtatttaagatatatttcagataagggatcgcctcaaaggcctccctgtagttgctgtactttgccggcttcggtatccattccggcgggtatgaaaagatctgatccgaactctttaaggaagtgctgatcagccatataaacggcacgaagaaaaacaggccggccagacagagaggaatatacttcaaaacggactttatgcgtcttttcattcttattcacctccgtaatagacccattttttagatcctttgaacaggaaaaaagttatgataaccatgaccaaaagcatgatagtcgccagtgcgctggaatacccaaactttaaatatttaaagccttcattgtaaatatccacagcataaaacagaagcgaattctttacaccgccaagcgttccatttcccttcggcgctgaggccgccacaatgtaagactgtgtaaacgtattaaaccccataatgattccgtttaccacctggaaaaatgtcacatttgaaagcattggccatgtaatatagcggaactttgaaagcggcccgcctccgtctaaatcaatcgcctcataataatctctgggtatatcaccgattcccgccagataaacgataatggtattgccaatcccccagagtgtcatcaaaatgattgccggcttcgaccattccgcggaagaaagccacagaggctgcggaagatggaagaatttcagcaccgcgttgaccagaccatactgaggattaagcatccacatccaaacgagggaacttgccactggcggaaccagcgtcggaagatagaaaacagtacggaaaatccctcttcctttgatgttcatattgagcagaactgccgaaaataccgacaaagcaatctgcagcgtgactccaatcacaacgaaatagagagaattatagaccgccttataaaataaatcatcatggaatattttcttataattctgcagtcccacaaacttcggcgctttcatcagattgtattccgtaaagctgtaatagacggtcgacaggatagggtaaatatgaaacaggatcaatccagccacccatggcagcagaaacagcatggccagccggatctgaggtgcctgcgaattatattttttctttttcttcattgtttttccacctctgatagaaagcagggccgccatctacggacagccgccccgcacttcttagttagttttcttattcagacttttcgatccagttttaatactatctggcatttttccactcatcagccagaggctgcagctgttcgtacatactctccaccgcttcctctaccgtcttgtcaccggtatagatatcctgctcttccagtccctgaatatctgagtattcagcgctgaacggaactgccgggaacgccttcgcctttccttccagtacactctggataaacggttccagctgcggagcctgttttaccagttcttctgatttcagagcggagtacgcggtcggaaggttgccaatcagcgaacagaatttaacataggcgtcaccggaagtcagataacgaattaccttaaaagcagcgtctgaattcttgctggtggacggaatggagagaaggcttccctgaagtcgtccgcatcctgcaatctccggctttgtttcggttacaggaacctgtacagctccccactcgaagtcatccggtgcatacaaattgataaagttctcaaaccattctccctcgatggaaaatacgattttcccctgaaaaagcgcattgtcattggatgcataggccccgaagccgctcttaaactttgttacttcaggaatgccgtaatctgtataaaactgtgccttatagctcagagcattcttaaattcttcactggtacacataacctgatcgttttcaaaatcatagaattccgctccgaacaggtatgggatctcaactctgtcgatccatggatagtccggaacgtatccgagccgtgtatactctccgtttgcatccttaacggttacctttttacacatctccgccatctcttccagggtcttgggcggctccagtcccaattcatcgagtacacccttgttatagaaaagcatataggagtccattgtgtatggcagaccgtactgttctccgccatacgttccgagggcgtacaccgacggataaatatcatcgacatccacattttccgacataatataactgtccagcgtgcttaacagaccggcctgtgcccacttgctgcacgtagtatctgatgtatgtacgatatccgggccgtctccgctgggaatggcagtcagcatcttttcttcagtctgggaggcaagaacctcaacctggatttcgtcctggctggcattgaaatcatcgattaccgtctgaaatgcctctgcctcacttccgctccacatatgccacatgctgactaccgttgcagaaccggaatctttctttttctgtccgctgtctgcagccgtagtctcgcctgaaaccgcagtctggctgttatccgccttttcccccgacgaaccgcagccggccagagacacagccaccatggccgccattgtaagagttgccaaacatgttttccttctcataatcattcctccttgattttttaaaaatagcggaccgttaccaatacaacggtccgcctctttgccgacgtttcactgagatcaagtatatcggatttttctgattatggcttcgttaccatgcacatggttttttttatatttaatgcattttgcacaattcacgctctttatgttatttattctttaattaacagtcaaaatattgaagtaatcttcttgattttcaattttcactatactataatgactcaaacctaaaacagagattaaaaggaggctttcctaatggtaatgaaacaacttctcgaagttttcgatattcttgacgacagcgcagcaagcggaattcgtatgaaaaactatcttctctctatcagtccgtcggcaaatgtagaggtctttcctctcaccggacctaatggcagcacggatgtaatacgcattctgattcccggaaaaagcgggaaaactgccggtaaagcagcacctacccttggtgttataggcaggcttggaggcctgggagcccggccggtcatgacaggttttgtctccgacggggatggcgcctgcacagttctgaccgtggcggcaaagctgcttgatatgcagaaaaaaggggatgttctggaaggagatgtcatcattgccacacacatctgtccaaatgctcctacagaaccgcatgagccggttccctttatgggatctccggtggaaatgcatcagaacaatgaaactgaagtcctccctgctatggatgccattctctcggtagacacaacgaaagggaaccgggtgattaaccacaggggcttttcaatctcaaatacagtgaaagccggctatattttaagcgtgtccgaggatcttttagatatcatgcagactaccacaggacagcttccccgcgtatttcctttatccacgcaggatatcaccccttacggcaatgatttataccacatcaacagtatactccaaccggcaacagccacggaggctcccgtagtcggtgtggccattacaacagaaaccatggtggcaggctgcgcaacgggcgccagccatcctgccgatttagaggaggcagcccgttttgttatcgagacagccaaatactacggaagcgggaagtgctgtttttaccgagaagaccagtatcgccgtctcacagagttatacggaaccatgaagcatttacagacgcccggcaatacgtgcggcataaggtgatcagttcagaaaggaatggcttatgacagaatacagaaaagcccatagcggtgaattgccgcaaatcatcgaattcatcaacatggttttcagcctttccggcacgccccatgattttgcctctctgcttcccaaactgtacggagataacagggaaacggaatccctgcactatctggcacttgaagacgggatcatcaaggcagttgtcggctcatttccagtaactctttgttgctccggacgatctctcacatgtgcggcaatcggcagtgtagcagtccatccagacagccgcaaaaaaggctatatgaagcagctgatgaaggatgccatcaccgatatgaaggagtgtcacattgaactcagctgtctcaccggtctgaggcagcgttaccgctatttcggttatgagccatgcgggggcgtcatgacctatcggttcagccgggataatttccgtcactgcagcagcctttatccgcattacagtctccgcctgcgggaagtaacggcagtctctgatcctgtatggaagcatatcatacaacttcatggaacctcatcattccgcaccgaacgggcttctgccgactttgcagatatcgcaagcagctggttccatcacacgtttgcattttttcacaatgacctctttgcaggttatatggtggcgaaaaaaaatacgatatgtgaattgatgaccatatcagattccatgatcttctcctgcctggaaacctgtttttcggaactatcagaggaagagctttgcctggaggtctaccctcatgagaccagccgcatggaatttttatccgttttatatgaacgctggcagatgagacaggatgataactaccagattctggactatgaggccgtactttccttttttatgaatttaaaggcagcttcggaaccgctttcggacggaactgtccttctttccattcaggatttcggaaactatcggatagccgtgaaagatggggttccctctgtctcacgcacaaaggaagtctcctcctggcagctgtccagcacagaagcagcgcgtctcttcttttcacctgaccgccacgatatgagaaactgtctgagtctggaatcccggatcaactggttcccgcttcccttatccatgtgctgcctggataaatgttagaacaggaaaaagacagctattcgctgtctttttcctcataaacttccctgttctcttcatacctcagtgtgttgggtcccagaaaatggccggttccccagtggttattaaaggtatcaacttcctttgcaacctctttttcaagttcatgactctctttctccatcttatcacctcagggatagtatggacagccaggcgtcattttatatcagaatactgcgcatcatgataaattatattttaatctgtcatctgctgttcaaatacaatccgatacatccccgaaccggtattggcctccatgaatccttccatagcccgaaattccagtccatcggcttcctccacacgaactgcacggtcgaggcgtatggatgcactggtgttggccgggatttctgcaagcagtgaaatcctgctgccctctgcctcccagcggacgcggaccggaccatataccgtctcatgaacggcatccgtatagctcagtcctccgcccatgcgcggccagatcaccaggtgccggaatccggctccctcttctgcttcatccgtatcaattcccgccatgacgcggtacatccattcaccgatggcgccgtaagcataatggttaaaagaattcatccccgggctccacatggttccatccggtttgatgccgtcccagtgttcccagatcgtggtggctcccatttttacctgatacagccaggaagggtaatcttccttcaggagcaggtcatacgcctctttcagacagccattctgactcaatgcatggcagaaatacggggttccgataaaaccggtcacaagatggccgttttctttctccagaagccgtttcaggccatcggtaaccgtctccttcttcccctccggcaccagtccgaagaaaagggccacgatgtgggccgtctgtgtctgagccgtcatcgttccgtcttcatggaaaaaggtgtcctggaatttcttcacgatatggccatataactcttcgtattccgccgcttcctctttctttaatatggccgcaattttagcaaataagccggtggaataggcaaaataggcggtggaggtcaaatcggtgggggttgctccgaaaaagcttccctcctcggcgtcaagcgcaacccagtcgcccagctggagcctgtaattccagatgtagtcctccgaatgctccttcataaatccaatccaccgcttcatactgtcatactgacgctccagtatcgccgtatcgccgtacatcagatacatggtccagggaatgatcaccgccgcgtctgcccaggccgaggcggaatgcggtccctgctttaacagccagtttccctccgcatgttcctcctcgatattggggattacgtggggaactccgccttccggagtctggtctgcctttaaatcccacagccatttcttataaaaggtatacgtatccatcagataacacgctgtccggcagaaaatctgggcgtcacccgtccagccaagacgctcgtcccgctgcggacagtcggtgggaacatccaggaaattgccttttaagccccacaggtaattgtggtgaagctggtttaacagcgggttggaacaggtgatttctcccgccggtgccatttccgaatgaagggtttccgctgtaaacgcttcggcggtcggagtgcccggataagagattacaagggcgtaacggaatcccatgtaggtaaagtacggatgatatgtaatctccccatctttcccgaacacatacttcatggtcgtttttgccttccggaggttgtccagatagacatttccttcagcgtccagaatttcaaagcaccgcagctcgatcacatcgcccttcctgccgcatccggtcacacagattctgccggccatattctggccgaaatcaatgaccgtctctcctttcggagtgacaaatacttcttttgccggaatcctgtcgatgaccgttactcttgctcctccctgcgcatgaaggacggaagagtcgaacggaacgatctccgtcctgtgccaggtctccgggtcttcgccgcgccctgtttcacacgcccggttctctcccgccgcttcaccgccgcaccatcccgggatctccagagcggagtcatacgtttctccgtggtatatctccgaaaatacaacaggtgcatccgcacccttccagtcctctccggtacagatcatctcttcccggccatcatcgtatcttaacaccatctgcatggcaaatgccgtctggtccccatagttattgcgggatctcgtaagccccatgacgcctttataccagccggccccgaccatcgcgcccgccgtattgatgccttctttcaggcagccggttacatcgtatgtctgataaagcaagtgcctgcggtaggaggtccatccgggtgtcatctcatccgttcccaccttgcttccatttaagtaaaattgatatagccccagcgcggtagtaaaagcatacgcctcagtcaggccttttccaacggaaaaatcccctcttacgagagtgcccctggactcctccctgcaggccggtgcggattccgcagatacaaacggcgccttccactcccggttgtcaagcagcgctgtcacaaattcgccgcagcaccagccgctttcctcttcctccgtccatacgcggacccggacgtaatacctgactgctgatttgagaattgcggcagagtccccttttgtccctgccgggcggacgtgggcagattcactgctttcgacccttccactgtcatagacaggcgtttgaaaatccctgttttctgcaatctgaaggcggtatgcgctctgaaccacgttccgcttatccgacttcagtttccagctaaactgaggcatttcttctacgcccaccgggtccttctcataatccattaagacttttacgatctccaacatgattgatctccttctccggaggccagcaccatttttacagccgccgtccatcctttcagcttttcttcccgttcttccggccccattgcaggtatgtactccctactttttaagtttccaaacagggattcgtcatagataccggctcccagcccggccgcataggcggctcccagcccggacagttcttccacctccggcactctgattctgctgttaagtatatcactctgaaactgcatgaggaagctgttttttgtaggacctccgtctacccgcagttctacctcatggattccggaggcctccttcatcagttccacaatatccgcgatctgataggcaatgctgcagagtcccgcttttaccagctccgcccggccggtggtccggctcatacttataaaggccgccgacacatcgctgcgccagtacggtgctcccagccctgaaaatgccggaaccagataggtatgatccgccggattggctcttttcgccagttcttccgactctcccgcactcgcaagcagccccagctggtctttcaaccaggtaatcacggctcccgtataattgatgttcccttccagtacgtactggacccggccgcctgtcttccaggccagcgaggtcacaattcccaggtctgaaaaaatgggcgcttccccgatattcatcataatcgaagaaccggttccgtatgtagtcttcatcagccccttcgaaaggcagccctggccgaacagcgcgccgtgggaatcccccatcacgccatggatcggcacctctaccggcaaaatcccctcgaaatccgtcataccgaaaaatccatccgaatcggttacgtcgggcaggcaggcgctcggaatcccaaatatcccgcagagggtttcatcccaggctaactcacggatatgaaacagctgggttctggaggcattggaataatccgttcggaactcccgccctttcgtcagccggtataccagataactgtccatcgttccacagcagagttctcctctggcggccagacttgcagcttcttttacatgctccagaatccaggccagctttgcggcagaaaagtacggggacagtctaaggcccgttcttcttctcacctcttcgcccgcgccgggatttaaccgtgtgatccgtttacagatctcctctcctctggcgcactgccagacaatcgcgttgtacacaggctttccggtgctccggttccacgccatggccgtttctctctgattactgattcccacacaggcgactgcgctggtgtccacaccgctttttttcatcagttcttttaccaccagaagtgtattctgatagatttcttccggattgtgctccacccagccccgttcatcgaccagctgggcatggtttttgtccgcacggcataacagaattccgtttccgtcaaacagcattgccttcgtcccctgggtgctctggtcgattcctatgatatagttctgcttcatgccaacagctccatcgcctttgccgcaattccttctgcgttcaggccgtaatagtcgaatacttcctttgaggtacctgtaatcaccggtgcatccggtaaggcgagtatgcccatttttctcgggcagttcctgccaagcacctggctgaccatggaaccaagaccgccgaacggcgcatgctcctccaccgtaatcacagcccgcactccttctgccgccgcaatgacggccttctcatccagcggctttaaacagtacatatcaagaacagaggctgaaattccgtgcttcttcaaaagctctgccgcctgtttcgctggacgcaccatctcgccacaggctatcatggcgatatctgttccctcgcagacagtcgtcgcgcggtccatctcgaacggtacccggccttcttcgtagatatcttccaccggatttctgccgacacggatataagcgggtttctcatcctgaaccagcgcttccatcagttttctcgtctgatggcggtcgcttggcacgtagaccctcatgttcggaatcgcgcacatggccgcaaaatcctgggccgaatgatggctcattcccagggcgccatagctgattcctccgctgattcctatcagcttcacatttgtgttggagtaggccacatccaccttggcctgttcatagcttctcgtacttaagaagcaggccggagatgccgcgtaaggcttctttcccgccttcgccataccggcggatatgctgactaagttctgttccgcgatcccggtttccacaaactgctccggatacgtttccgcaaacggcgtcatggaggcgctgcctctggagtcactgcacaggaccacgatatcccggtcgctcccggcccgttccatcaaaacatcacagatcacctgtctgtttggtattttattcatcacgtaaaacctccttgttatgagcactctgcgagtgttcaccggcttcccgttggctcagttctctgacagccgcctgatactgtgcctcatccggcaccttatgatgccattccgcacggttctccataaatgatacgccacagcccttcgttgtattggcaatcacaacggtcggacagcctttcgttttctttgcctgttcaaacgcctccagcagggcgtcaatatcattgcccggcacgctgagtgcattccagccaaatgccgcaaagcgggcggccagatcgtcgtggtgcatcacgtcctccgtggagccggatatctgcagtctgtttctgtctacaaccgcacagagattatccagtttgtactgggacgcagccattacgccctcccagacagacccttccgccagttctccgtcccccataaccgtatagacacggctggggcgtgcatccattctgcacgcttttgctatgcccacacagaccggaagcccgtgtcctaaggaaccggaattcatctcgattccgggcagcttgttgttgggatggccgatatatccggaaccgaatttggaaaaattctgaatgacatccccgatatccagaaatccttttgcagccagaaccgagtaataggcttctacagaatggcccttgctcattacaaagtaatcgcggtccggatcgtcctgattttcggggctgatattcatttccttcatgtataggctggtcagaatttccatcacgctgaaatctccgccgatatgaccggtctttgcccggtataccatgtccagcacatttttacgaagcgcatacgccagcgcttttaactcttcattcattgcctgttctcctcgctatgagcaccggccaacgcctttcgggccgcctgcgtgcgtaatccattctccatgtctcgccaaacgttccgctctattttccggatgggctgtatatggcggcttttacctcttcctcaatggggtcatacaaatccggggcaacccctatgtatttacacgcttcatagagcaccggcaccacatccttatgaatccccacgcagtggtggatgtacggcccgcagaccagcttgttttccagccgttttaaatcttccacctcgacccacacatacgtgcccttggtatacggcccttccacgcctttcgcatggcccagaagcagagaatactccccattgtctccgtcaaaccggcacagcgtcatatccccgtgctttgcttccgcttccactgctcccggatagtcgaaggccagaggataaccgatggctggtttttcttttgccacggaaaccggccacgggccgcagtgctgaagcagctcgccgttttcattgtccggatggcgcaccgtccagtccgcaaagaaggttctcgcctcatccataccggccgcttcagccattacagccgtgacggctccgtgaatgtccgtctcacagactaccggaattccttcctcgtttaataaagaattggccgcacacggcatgatcccgatttctccctgaagggcattccaacactggatggcaatcgcattgcagccgtactttccggccagacgcttcatggcaacctttaaggcagccacattttccagctgttcctcattgatcttcacgcacatactgcttttacagtactccatcacggcctgtacctccgcgccttccgccttcgcccgcttcatctcagacgtcagctccggaatcggaaccggagacagctgaatgttaaacttctccagcagctcgccttcgttgcacatggtagaccagaagtcaaacggtctgggcccgatctgaagaattctcgtatgacggaatacctttaccacgttgcagaccgccaggaaattacgaatgccgttctcgaattctttatcttccagacggcagtttgttaaataggtaaacggaacctgaaatctgcgaagaacctttccggtggcaaataaaccgcactggctgtctcttaagcggattccgttctcatccggccgctcgtctctcggcccccataaaagcaccggcacgtttaaacgctttgcaagccttgcacagacgtattccgttccaaaattacagtgaggcagaaacagcccgtctaccccggcttcctcaaaacgctttacaacggcctccagatcattgtcgtcatataaaagtccctcttcattgatcccgtccagacttacaaattctactcccagctcttccaggcgtttcttcgttaatcctgcaaatttcagtgcatccggtgcgctgaaaatacttcttcgtgtaggtgcaaaacccagtttgatcgataccatatgcttcctcctcttaaactgcaattaaattgtattaaattatatctttattattaacttaattatattaaatttcatttgaaatgtcaattgaattcaacttaatttttttaaatattgtatgaactatctattgacgaattcaatgaattcctgtatgattaaatcatatatatagaagattttcgatcatgaaccggaatgaaaaggatcaggagggccaagtatgtcaatatcagcaaaagagctggctcagaagttaaatatatcagccgctacagtttccatggtattaaaccgcaaacctggaatcagtgaaaagaccaggaatctcgtcctggaggctgccagggaatacggatacgatttttcaaagaaatgggatgcaggcgaagaaaagggcagtatcctatatgttatttataaaaagcacggaactgtcgtcgcggacacgccgttcttttccctgttgaccgaaggcatcgaacaggcctgcaaggggaaaggctacgaactccagattacctatttttatgagcacaaggatatcagttctcagatacaggagctttccgagaaaaactgtcaggggattatcctgctgggtacagagatgggtgtggaatacttccagccgtttaccaggctgaaggttcccatggttgttctggatacgtattttgaagagcttgcctgtgactcggttctgattaataatgtgcagggcgcatatctggcggccaactatctgatcgaaaaaggactgaaagacgtcggttatttgcgctcctcctaccccatcggcaatttcgaagagcgggcagatggatattacaaggcgctgcgccatcacaacctgcccacaggccatccctacgtccacagactcaccccttccatggagggcgcgtacaccgatatggcggaacttctccgcgaaaaaacgccggtcgccccggcctactttgctgacaatgacttaatcgccgccggcgccatgcgggcattcaaggaattcggataccggataccggaggatatctccatcatcggctttgatgacactcccatctgcgatttcctcgagccgcccctcaccaccatggaggttcctaaaaagcgcctcggtgaactggcagtcttacggcttttacagaagattggcggagagacgaaggtgatgattaagacagaggtttccgtgaagctccacgagaggaagagcgttcgggaataggcgcagaacaggacagagagttgaataccgaaataaatactgattaaatcagccgtccccggaagttccggagggcggcttttgggatctccgcaagtttatattgacattccctcccccagcacttaaagtataaggaaaccaacagcaaattcagcagcagtggcgtgcgcagtttgatacagccataccggaggaaccatgcagatcaacgaacaattaaaacttcccattaacggagtattacagtacgtatccatacgggcagaagaggccggactgcctcttctgctttatcttcacggaggtcccggggatgccgcgctaccactggtcttaaaatataaccgtgagctggaaagccatttcacggtggctgtatgggaacagcgcggagccggaaaatcctattacgattttggggacagcatcatcacaatcgacacgtttctgcaggatcttcactccctgatcatgcttctcaccggccgctttcatcaaaaaaagctttttctgctgggccattcctggggaagtgtgctggggctcacctacgccgcagaccacccggagatgctgcacgcctatatcggctgcggccaggtcgtaaacatgaaaaaatcctgccgcctttcctatgattttgcggcagcccacgccggccccagggcattggaacggctgaagcacacagactgcacctataccggagaaaactggctggacgatctgcttttcgtgacggggcaggttgtaaaacacggcggctcgctttacggaagaagcaattacaatgatctgattatccccttcctgttttcccgctattactcgataccggatttaatccgcaggcagaaaggaagtctccagtccattaagcgtttatggccggagctcatggggatcaattttgagggaaaaaccgcatacagggtaccggttatattgatagaaggaagacatgacatgcatgtctcatcggaattggcaaaagaatactttgacaccatcgagacggacaaacaattcttctggtttgaagagtcgtgccactttccgcagtggagtgaaaacagacggtttcataaacttatgacagaattaaaaaacaggtaagccgcagcagtaaccggaagcggagtctgaacggctgccttaaatttaataaaatccactaccatgcattgatagtggattttattattttccaaacagatcatccggaggtctttcgtctaataaggtttacttctctaaataagccctttcggatgcttctcatgaaacaacgccagcttcgcaaagaaatcatccaaaatcaaccggctgtcaatggaatggtaaatacggatcggcctgttcagcttcgtatgaacgtaagccatatcctccgtcaccagcggagcctctaaccagtcaaactcgaaccggtgttcatataacagaagccccacggccggactgtccccgaccacccaggtctcgccggtacggaatgcgctgtttctcggcccttcctcctgtgcgtgctcatcgagctgctgcagtaaatactcaccgatctctccataaggggccaccttatactccagttccgccagtgacagcggcatcatctcgtagacattcttcggaacctgccagatctccattttactctggaagaccacattggccgcatggatatcatttcccagattgaactcaggacccccggccggatatcttccgccgccgatccagatcgccgtcattcgggcagcaatccgcggctccatgagaagggcgcttgcaagatccgtaagcggccccaggaaaatagcaaacagcggccggtcatcctccttcatggcctctctcacaatcagctctgcaccctcgctgacgaccggagtcgtcttatccggtattgcataaggcgcaccgtggtaaatcatgccttccttcgggaaatgcatcttgtcaaagataacctccagctcccggtaactgcgttccatggaatctgcgtgtctcgttccataatgggccgccaccattcccacattctcaaatttgggacttaacagagcctggacaatggcaaactggtcatccgcctcgtttttggcatccgtatctacgatcagccgtacaatcttctcttccggcacatgaaacttataatctgtgtatctcatccgaatcaccttccttattctgttattcgtcttcggtaatttccattcagcggttttcagccgttcagctccggcagccctgttatcccttcacggccccattcgtcagaccggacacaaagtacttctggaaataaccgaacaccagcatcagcggcagcgtgaccatacagataccggccgtatactgcccccattcaacgcccatctcagtcttgaaatttaaaagtcccacaggaagcgtcttaattaacgcgttggaagccgtcgtaatattggcccacatcagttcgccccagtttccgataaaggtaaatacgataatggtagcgatcgccggcttcacaagcggaagcatgatatggaaaaacgcctcaaactccgtacagccgtcgatacggccgctctcgatcaattcctccggaatcgtctcaaaatactgcttgatgatatacatggaaaatggaatctgccacgcaatatacggtaaaatcaggctggctcttcctccggtcaaatgcatcttgctcatcatggaatagagtgaaatgtaaatggcaattcccggaatgaaattgaacaccataaatgcatccatgatcatattcgccttcggaatatataatttagccagggcatacccgcccagcagcgaaacgatggtggtaaccgcaacagacacgacggttacaaacacactgtttccaaaatacgttcccagctttcccacactccacgccttcgcgtagttcatgatctccacattctgcggaagaccgaataagttcacgaagaactctttattagacttaaatgaagtaaagaacatgaataaaatcgggtaggcaaccacgattgtataagcgcccagcactgcgtaggccagcaccttcatacctttattcatactgaacattctatcgctcatcgttacctccttttatcagcttcttgaccagaatcatgccgatcagcacgatcagcacgaagatcatactcatcgcggaaccgtagccgtaattgttaaatgagaaagagttctgaagaatccataacggcataaccgtggtcgccttggccggaccgccgttggtcaaagccacaaccgtatcgtaaatcttcaatccgctcataaccgcaaagattgttgacaactgaacaaacgccataattaacggcagaataatcttcttgaatatctggaaatcggttgccccatccagtctggcagactcaatcagcgagttgtcgattccctgcataccggcgaaacagagtaccatggtaagccccacctgtttccacgccgaaacgaacagaatacagtttagcgcggttcccttgttggtcagccacgcgtgctgtaaattttccaagccgacagcccccagaatattatttaaaataccgatttccggttcatatacgaacgcgaagatcagcgctgtgataaccgccggaatcatactcggggagaatagaatcgtccggaaaaaaccgccccattttttccccacataaagcagcagccatgccatcaggacaccgatgatgacgctgaaaaaggccgatgtcacaccgagataaacgctgtttctgatggccataagaaacgttttatcgcggaatgcggagatataattcttgaaaccaagaaagcttctcggcccgaaaccgctccactcctggaatgacaggataaagctgtcaaaaaaaggaatgacggcaaatataagatagatgacgatggcgggcatcaggaacgcaaatcccgcaaccatatactttttctcgatactgctcatttttctctttgatttctgcatattttttacctctatgtaaggaaaagggggagcgccgccagcactcccctctcagcgcatgtttcctgcttcttccttattcgcctttcacggttccctgccttaaatcttccagctgctgcagtgtgtcttccacactggtgccgctgcagaccatgccgatcatatcattctgaaggaaggaattgatctcagaagaaagtccctgcatctgcttgtaacctactacgttgtcgcctacagttgtggcaagaaggtcttttaagatctggctgtcaaccttatcctgcatggaaatggtagcaggcagtcttccgctcttaatgatctcttcaattcctgcatcacttgtataatacttcatgaatcttactgcttcctccggatgctttgcattggccggaataaacagtgcgtttgttactgtgttcagggcgtattttccgccttctgctacgtacgggaacggaaggattccaacttcaaattcactgttcttcgtatattcgcctgcgttggagcctgcgtcaaacatcatggcaacttttccctgataccatgcggcctgtgtctgatccttcgtggaggttaacgcgccctcgcccggataccagtatcctgcatcgtatacgctcttccagttctcaagacatttctttaagccttcacactgtgtaaaatcgcctttgccggaaacaaactcttccagggttccgtcgttggccatatactgataggcgaactgaagaagctgatggttctggccgttccagttgccgatgccgtacacgccgttgtccttgaataccttgcatgcttccaccatctcgtcccaggtagtcggaagctctacgttatactgggtaaataaatctttattatagaagattgtctcaataaccggctggtagctgactgcgtaatactttccatccaccatacccgcatctatgtaagccggaacgaagatatccttccactcgttgttgttctctgttaaatatggagttaagtcatacgccatgttgtcctctgtaaaggcattgatctggctgccccagaagaagcttacgtctaccggatcgccggaggcaatacctgtcttgatgacctgctccgcgttatcaaagtctaccggaacgatctctaccttaatgtccggattctctgcctggaatcctgccacgatattctgattatactcggaatcagagccatagaaacgaatggtggtcacctctccgctctttgccgcttccgctgccgctgtggtatctgctgcggtggaatctgccgccgcagtcgctgcgctttcctttgtctctgtacctgaattcgaactgccgcaccccgtcatcatcatccccgccgccagggcaactgtaagaactgttgttaatttccttttcacgattctcctccttgttaaacactattgaatttttatttaattagtaattaaattatatctaaaatatacaccagtaattaagttttgtcaatatgattttactaaattttgtaatatttcttttgcattttcgtctattccttatataagatctgacacgagcctgaaggcttcaggatttgggcttaatattattaaatttttatttaattatttcaaaagaaaaggtggtataagcccatatatcgcttataccacctttcacgaattttacgtgaatttgtatttcacttcgcagccgtaggataccttactgcagatgtttaccacccggtccatgactgtgctgaactctgccgcctccgcatcaatctttaactctcttaagtcctcagagatattcaccattttcacccctgccacttttccgatctcgctgacaatccgctgtgccttcgagggatctgacagggaatacacaaggtaatgcctgctcatgcttgtttcctcactttcacctgcttgtttttgatattcgtttgatagtaacaagtattggcagagaaaggaaattttaaacacggcatcccgctgttacttcagatacttattgatctcctgcgacagcccctcataatccagggggttggccatatgtccgttcattccggcggcctttgcattctgaatgtcctctacaaaggcgtcagccgtcatggcaatgatcggcacggctttcgcatccggccggtccatcgagcggattgcgcgcgcggcctcgtagccgttcatcaccggcatctgtatatccattaagatcagagaataataattgggcggactctccttaaaccgttttacagcctcttcgccgttgaccgcagtctccatcccggctcccatattgcccagaagctccagtgcaatctccctgtttaactcattgtcctccgccagcaggaacgtctttccgctgaaatcaaaggacatctgctgatgctccgattgctttttgccgtttagatgttccaggagacactcctttaacgcggagcgaaacagcggcttttctacgaatccgcagattcctgcgcgcatcgcctcttccttcctgtcgttccagtcatacgcggataaaataaggcgcggccggctgccgtctccagcctcccgaatctttcttaccgtctccagccaatccggctccgataaatccaaatccaaaatcacggcactgaactcacggccttccctgtgccgggaaagaacaagcctggccgcttcttcaccgcttcctgcaccttccgcctctgctcccagcgaagaaagtgcctggcagccatactgaaggactgccggatcatgatcggccagcagaacacggactccctggaatgccgtctcttcttcctcctggacaaccgccgcgggaagtgtcacctggaacgtggttccctttcccgggcagctgctgacggtaatggttccctccatcatatccaccagcctttttgtgatgcacatcccgagaccgcttccctcaatctggtctgtcctgctgtcctgctcgcgggtgaacgcttcaaatatatgttcaaggaactccggactcattcccgcgccggtatcagaaacggtaaatataagcgcagttctgtccttctgctccacttcaaagacgatccgccccgacaccggcgtaaatttgcaggcgttggacagcagattcaacaggatctggcgaagacggagtgcatcactgtaaaactgctcatcctccaggttcaccagatgaacgtcgaagatctgagccttctcgcggattccggccagcgtaatcataatcacttctcttaaaactgccgggagcgaaacaggcaccatattaatatggaaattcccgttttctattctggacatatccagaacgtcattgatcaggccaagaagatggtggctggaaaggcgtatcttctgaaggcagtccttcacgcgttccggctcatatacgtgagaaccggctatctctgtcatacccgctatcacgttcatcggagtgcggatgtcgtggctcatacgggaaaggaaatccgatttggcctcattggcctgtttcgcttcctcaagggcggtgttcagcataaccgtgcgttcttccagcctgctctgcagctcccgaagttccgttatatcggtaatatcgataaagacagtcagatagaccggatcatccgcgacgaaatcaatacacgcacagtgaatctgaaaccagcggtcccggccatacttatccttcacgcagatacttccctcaaaaggttcccgcctgagaaagctggggtgattggcctccagcaccgctctgctctccggctggagaatggagtagcagtccagggccgaaagacggctgagatccacatcgaagatatccgtgatgcggtcacttgcctcaatcatttcaagccgttccggaagaacccggtatttgacaataaaacccgggatattatcgtaggcgatggtcttttcctgctgaatctgtatcatatccgtgacatcgaccatggtggtgtaggccagctgctttccgtcctgacgggcatccgtaaagaagcctaccattttaacccagcaggtagagccatccggtatcttaaggggaagaaagacctcatagctctttttcccattctcatacatctggttaatcttgcggtgaatcgcgttccagctgtcctgattgttctgaaaatattcatcgcagtggttgtgaaacaatgcttcatactcctgcttcgaatacccaatcagttcgtaataaaaatgattggcccaaagcacggtaaaatgtttatccaccagatgcctgctgacgctgaccttcatcgttttcatcagcatctcctgctcatccttcatatgtaccagttccgtcacatcggtcataacggtataggatgtgcggatgccgttgatatattcgtctgtgaaatagctgaacaccttcacccagtatccggttccatccttatatttcatgggtataatcagttcatactggtcttctcctctttccagaacggactgaaccttattcgcaagcatttcccagccctcgggattatttctgtaatattcatcggcatgattgtgaaacagtgcctcgtactctgccttcggatagccgatcagtttatagtaatgctcgttggcccagacgcacgtaaaatgttcgtcaatcagatgcttgctgacgctgacattcagcgcccccattagcatctcctgctcctgcgtcactttctcgacgacctgctgcgtatactcctgctcctggcgcgccagcaccatctcagtcacatccgtcatcgtagtgtaggcgacgggatatccgtcaatacactcatctgtaaataccgactgcagcttgacccagaatttttctccatccggataaatcatgggcagaaagattgtgtacctcttctcctttttctccagcgcagagttaatcttttccgtgagcagcttccagccttccgggttattataaaaatatttatcacagtgattttgaaacaatgcttcgtattcgggcttggtataatggattaattcatagtaataatcattcgcccagatacaggtatagtgttcatcgatcagatgcttgctgacactggctcccaacacactcatcagcatgctgtattcatcattcaactggtcatagcttaaattgacttccatccgttttatcccccataatctgtcagatacaaagcttgttcatatacgactctttcaattataattcagttttaaagaaaacacaatacttcacagtgagaagctttcaggcagcttccgtatcctccggcaggggcttcggcagcacaaaaagtccggcggctttgagccttcactcaaagccgccggactttccccggtgttttctgttacgcataggaatggtggcggggttccatattctgcccgatctctcacaccttccgatcattgatatccgttaatcgaaacttaccggccagttcctttaataactgtgcctgggaagccagctcctcgcttgcggcggcacattcttccgccgtggatgagtttgtctgaaccacatcggagatcaggttgatattctcagtgacctgccggttcgcgtcagactgctttaatgacgcctctgtgatttggtgcagcagctctgacaccatttcaatcccctggaccactgccgtcagcgcctcactcgtctcattggctatctttctgccgttctctaccgcctggagagaactttgaatcagggctgcggtatttctggaagcagcggacgactggcttgccagactcctcacctcattggccacgacggaaaaacccttgccccggtccccggcacgggcagcctccaccgccgcattcagcgacaggatgttggtctggaatgaaaagtcctcaatcgtcttaacgatttttctgatctcatcggatttatcactgatctctgccattgcatgcagcatctcctgcatacagcggctgctttctgccgcattgtctctgacagtctgagttttttcactggcctcctgtgcatccctggaattccggtacgcctgatccgatatttcgttcatcattccggtcagttcttctacggaagcagcctgttctgtggctccctgggccaaattctgcgaactggaggatacctgttctgaaccggccgccacgctgtctgctgactggctgatctgaagcagaagcgcacttaatccgtgattgatcttgcgcatggaacacagaagccgctcaaattccccgatatagtactcgtctttgccgctgcggacactgaaattcccttctgacatctcattgagcatctgggtttcgctctgaaggacatttgccagagtatccaccatgctgcgaatgctgaaagcaagatttcccagttcatctttggattcgtattcgacacggacagtagaaaactctccccttgccatggcaagagccgcctgctccagctccctgaccggccgtgtgatcccgcgtgttatatagatcccgaagacgatactgaccgccatacttgcacttcccagcagtatcaggctaaccacggcccgcgcctgtttctctttcaatccggagaccaggctcgctcccatccggtttccgctctctattaactgattcagctgttcctgtgcctcatgaatcacaaggatgttgttgtgttccatatagtccgccgcctcggcgtttttattctctgccgcaagggaaagaaccgtctctctcatcggctccagtttctccagcgcagcctccagccggtctatgatctgctgatcgcccttaaaatgcgacttaacaaccggtacctgttcctgtatggcaaccgcgcattccctggcattggcaatcgcttcgcttgtaatctcaggatccgtattggaaatggatctgtaaacagccttctgcatccgttcaaagttcgagttgatgatactggcgctctcatttaccgtaaatggtccggtatagaacgcctcgatctgtttccccagactgacaaaatcagtaatactcacaaaacagcttaccacaaacaggatcatgatggctgcatatgagataaatagcttctttgatactttaaaatccttcatcgcgcccccgcctccgcttcctgaattatcattcctcattctcttctgttctctccagataccggctcagcagcatctccagctctttgacatcgatcggcttggaaaaatgggcgttcatccccgcacggagcgcttcctgcctgtcatcctcaaatgcattggcagtcatggcaacgatgggaatcctcccggcatcccgacgttccagcttccgtatggctttcgtcgcctcatacccgctcatgacaggcatttgcacatccatcagaatcaggctgtagtatccctcttccgaagcggctaccttccgaaccgcctccgcaccgtcacatgcatcttccacagatgctcccatctcttcaatgagagtatgggcaatctcccggttcagcagattgtcttccgccagcaggacgcgtctgcccctaaaatcgtggctgaccgcagtctccttatcatcggccggactctttttctcctccagttcccggaggagatagcagatcttcgagcggtagaacggtttcgccaggaaagccgtcactcccgccgctctggcctcttcctcaatctcggaccagtcgtatgccgtcagaatgatgatcggcacttcatctcccgctgtctttcgaatgcgcctcgtgatctccactccatccatatccggcatcttccagtcgatgatcatcagctcaaacgggtcctcacgttccatggcctgagccgcaagactgaccgccgtgactccctctgtcgtaaattccgcacgcatcccgatatcctcaagaagctccgtgacacttttgcaggtctgcacgtcgtcatccgtaatcagacagtgaatgcccagccattttgaagaaacctcctccggcggaacattctgtaaacggagcggcagcgtcacggtgaatgcagagccttctcccagttcactctccacctggatatcgccgcccatcatatccacaatattcttcgttatcgccatacccaggccggttccggttactctgctgtgggtggaatcctgcacccgctcaaacggcagaaaaagcttatccagaaattccggactcatgccaaggccggtatccgagcactcaaatataaaattctgatactctcttcgcccgctgtccctctgatacagcttcacgctgatgtgaccgccttccggcgtatattttacggcgttgctcagaacattaaaacagatctgacggacccggaggggatctccagctaccagttcatcttttaaatccatcagactaaggttcatgtccaggtgacccgcgtcagcctgagggcgtatcagttccgccacctctgccaccagctccgcaaagttaaacggttcgtcccgcagggatatctttccgctctcaatcttagacatatcgagaatatcattgatcaggctgagcagatggctgctcgacagattaatctttctcaggcactcccgcacccgctcctgatcgtccatatgtgaggctgcgatcgcagtcattcccataatggcgttcatcggcgttctgatatcatggctcatattagacaggaaccggctctttgccacactggctgcctttgcactctctagagcgctctgaagcgcctggcggtgctgttcctcctcatgcttctgttcatcaatccggcgtgataaaagaatcgccaactggtcgccggaataaggattttccacgtagataatctgggtggaggtccagtgatactggccatccgtcaataaaatcctggcctccaaaaacacttcctgccggctgctgcccagtgtttttttcagattttccggtgacagacgattccggaaatcctcctggaagtccggatgtaccgcctccatgaaatcctggtacagtctgctgaaggattcctgtccgcccatctcagccagcaggccgggctgaagatagataaagtttaaagtatcgctggttaaattcagactgataatgacagggaacacgttggagatcgcactgatcagcatcctgcgctcctgaagcttctcccgttccgcctcttcctccgccagcttttccatggtaatgtcatgaaacgtggcgatcaggatcggcgttccgtcttcgttcagcgttttctccaccaggccgcctgaccagaaaaagctcccgtcttccctcacgacacggttctcaaaggagtgcttcctgtcatctccggctgccgcccggaagatatctgcagccatcggataatcgtccggatggacgaaatcgatcagctgctttccattggagttctcctcctgaacatgcagcagcctcattccttcccggttcagctgcagcagacggtaaggcgcctccactgacatcagcgcgattccttccggtatcgcattgtaaagatgcgcgatataaccggcctggctcctgagcttccggttcatctgattgacgtaccgtaagtaaacagtcaccagcacagccagtccgatcagaataaacgcaatcagaataaaggtgcggattaaaatctgattcgtctgcgcttccaccacatcctggggaataatcgaaatcagataccagtccgaattcagtcccagcggtatatagcagaataccgtgtcttccccctgataggtaaaggtagcccagcctgtccgcttatcgatcagggactgcgtaaactgcgccagtttatcagaatcattctgagagtccggaagcatgtcaaacagattctgcaccgtcttgttgctgcccggatgcggcggacggatcagcacattcccctccgtgtccaccacgtaggaaaagcccgcgtcgtgatagaatgagacggtaaagctgtccacaatctctcccacatcgtaggactttaaaagataccctgctgttccatccttaagcactgcttttctgtacaggttaaactcgttgaccccgttggcactgcagatatggggatcgataatcccctgttccccggaagcactggccagaaactccgcagctgccgagtcaccgggattcccttccggaaaaatgcggccgtcttccagatagaatgaaattctgccgtccacacggtcataactgctgatcagcacgttcagctcctcctgctggccggcgtcgtactggttcagataaccggccatggattccatttccccatactcttcctgcagctgaacccgcagtgtattcattccctgctgggtactctcccgaatggtaccgacagactgctgccagagctgctcgcgcactgcgctcacaaaaaagacactgatgaatgcaatgagcgcgctgacgagaagcgctaccatggctatttttatccttgcttttccctcctgctgctttatcatggtacaatcctttcctgagcctgctgatccatccagctcatggcagattccagttcttctcctgccagcagcttccgtgagacttccgccgtcagctcccatatgggtaatttcagcagatcgtcggttccaatcaccgtctgtcctgattcatagcaggcaatcaggggctgaatctctaaaacggaggaggggctcccccctttcagcggactgaaggaagactgctggtcggcaaacttctgtatattttcggcttttgtaaaatactccacaaacttcatggcagcttcgaaatgatcgctctgcgcattgatgctcagacgggtatcgggattaatcaccagcatactgccctcgtcgagaatcggcagcggagccacctcaaaccggaagtccggttccataccggccacacgcccggccgcccaggcgccggttagcagaaaaggggactctccccggataaaatcgtccaaatcgtcggaggtctttttggtgtttaacgtcttttccgcgtccagatatcccctgcggataaacgtcttcacaatcgaaaaaccgtctgttaagtattcgctcagtgtctccctgccgtgattaagctggccaaacacctccgtctggcgcttatcctgatatacctgccaaaagccccggccaatggccagtgtctttaatgagatatcgttattggctataaccggtgtaatcccgcagtttacaaaatattcgcagacggcttcccattcagacagtgttccgggaacctcctgtttatgttccttcagtaaatccagattgcagtaaaggccgaagatcgatacggttgtcggaacctaggtgattttcccctctcccatctggctcctcatctcatccgtaaaatcgggcagtgtggaaagtcctgacagatccgcgacctgcccgttcgcttccagcttcagaagtacatcatggttcaccataaagatatcgtcgcctctgccatgctccattcgcttttccagagcctcaaaataatcattccccttcagactttcataggacacccggacagacgggttctccctcatgaaatccgatataatctgctcgattacaattacattctcaggctcatatttgttgccgaaaaatgtgatggttacgatctcctgatcaatctggttatcttcattcactactctgtttttactgctgctgcagcctgtaatggccgatgctgcgcaggtaagaacaaggaacagtgcgagtaattttttaggcattgtaatttctcccgtcttttgcagcacctcggtgcggcgcctctgtacacatactatttggattttaccacaacagaacttttagtgcaatcgattcctccgcttccggttgctgccggcagcagaatcatgttataataaggaaacggcaaggcaggaacagataaatcatgcatcagaaagcaggcagccatgacagacagtaaaattttattagtagacgacgaaaaagatattgtagatctcatggaggaagttctgcgtcaggacggtttccgggaaatccgaagagcttacagaggcagtgaagcggtaacgctctgccgcgaatttcagccggatgccgtcattttagatgtcatgcttccggatatggacggtctggaggtctgccgccggatccgggagttttcttattgctccatcctgtttctttcctccagaaatgatgatatcgataaaattctcggtctctcctccgggggagacgattatattaccaaacccttcagcccgcgtgaggtcgctttccgtgtaaaagcccagcttcgccgccagcgctatcagaacgcgccttctccggctgtgtcctctgtcttaaccgcaggcccgctctccctggatcaggagagcggacgtgtctggaagaatggccgggagatcagccttacgggacgcgaattcctcctgctttcctatcttatggaaaatacggacaaaatcataagcaaagaacggctctacgagcaggtctggggggaaagcagctgtatctgcgacaacacgatcatggtacatatccgtcatctccgagaaaaaacagaggcagatccttcgaagccgcagcagctcatcaccgtaaaaggcctgggttataagcttaaaaagaggatcgaatagatgaaaaaatccggttaccgcaccacattccatatatattttatctttctcctgacgctgctcggcaccatactggcggctgtttcactctttttcttactgatcacggttcagaagccggacggatctcctatccgaagtgactggccgaaagcgtttacagaccgttttgcagaacagattatcttccaaaacggcgtgccttgcgttacacaggccggaactgccctgcttcaggacaacggcgcaggtctccagattctgaacccggatggccgggaagtgtacagctatgggaagcctgattctgcccgcgaatcctataccgccgcagaactgctaaaacttacccgggacggattccctaccgccggacagcgcaccatctccgtatttgccggcacggcccataacgcgggggaagactacgtctatcttctctgcttccccatgagaatctccgccgtcaccatgtacttaaacggcgaacggttttcgggcggcaggaccgtcattctgacgctcttatgcgtgctgctcccggtcattctcatcaccggcgcgctctatggcttctggactgccagacagttaaaacggctgactgcctccattcatgatatctcgcttcgctgttatcttcccgatcaccgccgcggcacattcgaggatttatacgccggcttaaatgcactggattccgagatcagagccagcgaccgcctgagggaagagacggagaaaatgcgcgaagaatggattaccaatatcacccacgatctgaagactcctctctccccgatcaaaggctatgcggagatcatacgggatggaaacgatgggcaggaggacaattacggacgctacgccgccgtcatgttaaaaaatgtctcctgcctggaagcgctcatcgaagatctgaagctgacttatcaattagaaagcggtctgctccctgtgaatcgggaatgtcaggatatggtccgcttcctgagagaactggccattgatcttttaaattcacccgaatatgagaaccgcaccatcgatttcgacagcgcaaaggacacgctcttctattcgtttgattcaaagcttttggcgagagcctttcggaatctgatcatcaatgcgttcgtacatggaggcgcacaggcggaggtctcgctccggataaccgtctccggcggttcgccgtgtatccaggtggctgacaacggatacggcatgggaccggaagagatcaaacacctttttgaccgctattaccgcggtaccagtacgggagagaagccggaaggaaccggtctgggcctggcgattgcaaaaagcatcatcgaactgcacggcggaaccatctccgctgccggctctcccggcgcaggaaccgtattttcgatagaatttcctgtttcttaaggttacttaaggttatctgaacgttcgtttaaggctgacagtttatcatgatttacatgatagctgtcagctttttttatttatcgggaacgcgtttctgcagcaagacaatttttctactgaaagcaggtgttgcaatgaagatcatactgaaatatattctaaccaatatcaaagagcggaagctgcggacggcggtcatgttcctgtctgtcctgctctcgtccatgcttctctttgtatccttttccatcggtgcctcctacgaaagtgcacaacagaaaatggcgagggggatggccggcagtgcggttctctccgtcagggcgacggaccgggctgtggggaccgatgagattcccccgctgccttccatcgacgcaggagtgggagttttaaaggggtcggctctctaccacgaagacggctattatgagaccgttgatttacttgctgcagacttaacgcagctggacaaaatcaacccgccccatctggcaaacggggaaaaaatcacggatttcaccggcagccaggtgatcctgcccgaccgtttcacctccaaatacgggattaagaaaggcgacaccattcatttacagataaacggcaccccggttccgctgagggtcgcggacatcgccaactatgataccgttttcctccgccatacaagaggggtgaccgcgctccttcctctctccaccctggccggactcctggatcagacagacggatacagcgaaatcctgataaaacccgtaaccggtgccggcactgccgcgctgaaacgcgaattatccgcagccctgcccgctcccgcctatcacgtatccgagacggtcaaccaggcgcagatcgaggccgacgcaaggcagaaatccatgccgtttttcctcatcagctttttctcactgaccatgagcgtcttcattatttacagcagttataaagtaattaccctggaccggctgccggtgatcgggacctttcgcagtattggtgcggagaaaaagaccgtgacctgcatctttcttctggaaagccttctgtacggaagcgcaggcggacttctggggataccggcaggtactgcccttctgaagctgatccttcacggcatgggacagtctctgactcagggcatcgaaattccggcagtggtctccccgctctacgccgtattctcacttgccgcggcagtcatatcagcattcctgtccgcctggcttccgatccgccgcgcaggccgcctgccggtgaaggacatcgtcctcggcacggtggaagagacccgcacttccgtcagattcctctccggtgtctgtgtgctcctgtttctcgtctccgtgcttctgccccgtctggtatcaggcccgatgcggtatccggccggcggcttctctctccttggaatgatcgcagcagccgtgctgctcgttcccacgcttaccaacctctgttctgcggcatttacaccactcttttgccggttcctgggaaatgaaggctggctggccgcccggaatatgagggacaataaaaatacagctcagagtatcacgctgctctttatcagtatctccgcagtgactgccatcacggttgtcggcaattttgtcacatcgtatgtaagcgatgtctttgcaggagctgagcttgacggctttgccgacggacacatggagccggaatttatcagtcagctgaaggaaatggagggaatagaaaaggtactgccgctttacgtattcaacagccggataacggcggacggcatcccactgaaccggctggaggcaaccaaccggctggactggtacggccccatgatggcgctccattattcggaaaaggatatggaggcttctgccatatccgccttcgcctccggacgcgcggtcattctgagcacggactgcatggagcggaccggcagtactgtgggcggccttttgtccctttctgacggtaccgttcagcaggactatctgatcgccggcagttttaaatcaagggccaccgacgtggaagccgtcattccggccgcctgtgcagtatccgatttcggagcctcctcctacggctttgctgcctataccgccgccgatcccgacgccatcatggtacagctccgcagcctgtttggcgaaacctccaactggagccgcacggtagaggaatttaacacggatgccttaaccacggtcggaacctttttaaagcccatgcacagcatgacctggtttatcctgctgctggccgcggtcggcgtcgtcaacaaccttttgatcggccatatccagaagcgccgcagtaccgccatgtatcaatccatcggactctccaatcgccagatggtaaaaatcacggtgattgaaagcgtttcagccggtctgatcagtgcggtcctagccgtttttatctcttatatggaaatccagaccatattcctcgtggcaggccccaaaatacagaccgtgccggaattggatgcctccgtgtttctgacctccggacttctgggaatcgctgtcacgctgctggggtctgtcgtccctgtcgtgaaaagccggaacatgaagctggtggaagaaatcaaagttgattagactatagaaatggagaagaaaagatgaaatcaatgggaaaaacagccgccgtcgaaggcaggcatattgttaaaaattttcggaccggcgatgccgtaaccgaggtattaaaggacctgtccttacaggtgatgcagggggaattcgtatcgattatggggccgtccggctccggaaaaagcacgctgctctatattctcggcggccttgacacccccaccagcggccgtgtcctgttaaacggaaccgatatctccggcttcggagataaagaaatgagcatgctccggcgccggagcatcggattcgtctttcagttttataatctgatccccaacttaaatgccgaagaaaacatcatgctcccgctgcttctggacggccagaaaatggagcacttaaaagaccgcctggatcagatcctggaggtggtgggcctgactgacaggcgcaggcacacgccccgggaattatccggcggtcagcagcagcgggtcgcaatcgcccgcgcactcatcgggaatcccgggattctctttgccgacgaacccacgggaaacttggacagcagagcgggggcggatatcatgagcctgctgcaaaagatcaaccggaccaccgggcagaccatcctcatggtaacccactcaccggaagcggccaaaagcagcagccggatcattaccgtgcaggatggttccatcctgcagcctccgttttgccttacatcaacccgaacagattccacagcggaaacatgactgcaataaatccggcaaacatgatcacggtctttaagccttcctgtttgataaaatccttcatcggcatcatgccgtactcgtacatgatcagatttccgttggattcatatggtaagaacagcatctcacacgcgtatacgagaatcatgcaggccacgaccggattgacccccagcgacacggcgatctgagcaaacggaatggacagaccgcccagcatggccagcggtgtcataaagaagttggcaatcattccaaaaagcataaaacagatgcatactgtcagaacactccttccggaaagaagaggtaccgcaatattggtcaggaaatcaccaaatccaacggctgcccccacaacgccaatcccgagacaggccgccaccaggaaaatcatggaaaaattaattctcccgatcacctcggtattgcctatctcaattcccggaaggaacatcaggtatggaattgtcataaatccgtacgccgccggcagtccggtaaagtttgatgaaaacagatagacaaacaataagactatcatgacaaccgcttttttctctttgctgctcatcgttccgagctgttcatacttttcatcgaaaatcttccggttcagcttcgctcccagctcctttgtcttatataccttcatcaggataaaaagagtcagtacacaccaaagaataaaacagccgttgtagataaaggtcgtaaacatccccatgctgtatccgggcacaaattcctgtaaggacgtctctatcatggaatagtagcttggataatagagaaataccgtgctccccgtacagccgattgttccggcaaagcacaccagggaagactcacgcgacggttttaatcccatcgctttgcacacgccgaatatcagcgcgcctgcaatcacccagccataacagaaggtcaccaggttcagtacaataccgatcatgaaacagccgtataccacaccgccgtaggttccgccgcattttctgatcacaaaataggcgatgcgttttaacaggccgcattcatccagcaccgtgctgaaaatcagcccgcccagaaccatccagaccgtcgtattggaccacgaaccaaaggctgctgatgccgggacaatcccgctgaccatatataaggacggcaaaagaattgccgaaaccagcagcggaaacagctcaaacgcgataatcagtatcataaacagcgtaatcataaaaaaaagcttcagacttaccgtaaaattctccgaaaccggaataaaagcaatgatcagcggaatcaggatactgatggtccagccaatctgttttttcttatctaaagttgtaaacattctctcgtctccccattttacaatcccggatgtatttcgaaattttgttcctgccccgctgtgctggtgcagaatcccccggtatggattgtcttttttttatcaatctcaggtaaaaaacagatcccaaatgcatggatcaccgccgcaggctgcgggccgaagaccgcagactgcagcggatcaccatctgaacatctgggatgttcattccggaaaacctgttttatcatgctttttataatgctttcttataaagttccataatatccttcacgtttgtctgtctcgggttagccggaatattgccgctcttcatggcgtcctccgccatggccggaatcagctcttctttgacgcccacttgggaaagcgattttggaattcccaaatcctcattcagccttctaatctcctcaacaagcatctccggtttaaaaccgtttaattcctcactgccctgacggacgtaattatagatcacttcgtagcggccgtcgtcggcaagcgcattatactcaagcaccacaggaagaaggatggagttggcaacgccgtggggaacattaaaatacgcgctgaccggatggctcatggcatgtacgttgccaagtcttgcccatgcgaaggcaattcccgcgaaattgctgcctgccatcatggcgcaggcggcctcttcattctttctgtttgccacaaactggcggagattgccgccgattaactccattgccttttccgccatcgcatccgagaacggggaggcgtttgtggagaggtacgcttcgatcgcgtggatcagcgcatcgactccgcaggccgctgcgatggaggccggcgccgtcatgatcagttccgggtccagaaccgcgtatttcgggaggatctcatagctgaatacggacagcttataatttctggcttcatccgtgataacagcggaggctgtaacctcgcttccggtcccggcggttgtaggaatggcaatcatcggaacgatcggtcccggaaccttatgatttccttcatagtcggtgatgcttccgccgtaatttacgagcacgcccaccgccttcgccacgtccatggagcttccgccgccgagagccacaatactggttgcgccgcagcctttgtagagcccggtggcttcattgacgatatcggtcgtcgggttcgggatgacatcaaggtaggccgtgcagctgattcctgcggcttcaataatgtcctgaatcttctttaccacgccaatcttctccaggccccggtcggagatcaggaacacgtgctccgactggttctctttcaggatttcgggaagcttttttaagcttcccactccaaattcaatattctgcggtattttaaaacgaaactctttcatttctgttctccttttttataaaactgccatcagactggtaatgaacatattagcaccgataaacaataaaacacaatagacaatacgtaagaactgctcacggttaattctctttaagaagcccatgccaaggaagaaaccgatggcagcacacggaagtccaatcgccagcgcactccacatacggggggtaaatgcgccattgcgccactgcgtgtaaatattccacgtatttaaaaccacccataccatgttcatcgtgttgcggaatttttccttgtccttcaccgcctcgatcgtatagaccgtaatcagcggaccgccgatggtaaacgcaccgtggacaattccgcccaggatcagacagccgtagcggaaaatcttctttcctgtggtgtcaggcgcatcctcgtcatccacttttttcagaaccagcggcctgatgatatgtttgtagatattcatcagcgcaatgatcgttaccatggcgccaatgcagattttcgcggtcgtcgggctgattgtgtaaaacaggtaattaccgatcagaatgccgggagcacacagagcaactattttcagtaagtccttccaggaaacttcacgccacgccttcactcccaaatagtataaaaacggaatcgtgaggagcgtgccatagggcacgccttctgctgttcccagaagtccgtttgtaaccgaggcagcgataaccgtacagccaaatcccgtacagccctgaacaaaaaagccgaaaatctgcattaatccgacaagtataaaatcaaactcaaaagtcataatatccccctatgtgttttcattagaatttagaaatggagctctgtacgctgaattaaatccttctggagcggcttgcccagctcgacaaagtacgcgctgtatccggcgacgcgcacgagcatgtctctgtaatcttccggcttcttctgtgctgcccgcatcgttgcggagctcataatattgaactggacatgcatcgcctgcttggcgatatactcatctataaagctgattaaattatctcttccctcgataccggccacagattcctccgggaaccttaagttcatcagcgtgccgttggacgccaggctgtgatccacctttgttaaggagtttaccacggcggtggggccgctgaaatcgtgggaacctccgtcggtgtgtaccgggcccatgttgtcggagatcgcctcgcctgccctgcgtccgtccacggaagcattggtatttaagcccatggctacattggcattgacagagtatacgcccgggctgaactcgccgcctctggggttctttctgcccctgatgtgtctgcagtagcattcaaacatatacttaaacatctcatccgcataatcgtcgtcattgccgtagtgatggaccttactgctgtttacaagggcatacagcttctcgtggcctttccagttatccttaaccgcctgaagcagctccgctccgctgcatcgcttctcgtcgaacaccagctgcttaatggctgccaggctgtctgcacaggtagccatgccgctggcctggggaccggttccgttgtacttggcgccgccttctgttaaatccttccctgactccatacagtcctcataaaatgcggaaacgtagggaaccggctttaatgcccggtgggtattgtcgatgatatttaagctgctgcacatctggtcggtccagtaggcaaactgcttatccacgctctctaaaacctcatcaaagctctgataggtggccagacttccggtatccggaccgagatgatctcccagggcgccgcatgtttcccatctcatacagtgagggccgcagtctaagcagcgtccgccgtttaataccatctccatcatcttcgctgtatttacgtaagcggcgtcgtgccagccgtattctttaccgggcagatcgatctcaacgcagccaacgacgcagtaatctctcgcttcctccagagtcattcctttccgcatcatccccctgatggccggggcgtcattgaaaagcttcggatggccgtagcccgcgcggatacattctacggtctttacctttaactcgtacggcgtgttttcatgcatacgcacgcagacccacgggttcatcatacgcgtatgagcggaggcctccagaagcatcatcgtcaaatcattggttgcgtcgctgccgtcacggttcacgccgccgacggtaaggctctcgccgccgaagccgcggccgttgcggaccgccatactgcctttatccttaagcttagtcgggttattcaccttgacatagactacctcgagaagctcgagagcaaattccttcgtgatggtgccattcttcatgtccgcctcatagaatggatacagccactggtccatgcggccgtaggagatggagtggccgttgctttccacctggatcagtgtggttgcaatgttgaatagctgcagggcctgccagaaggtcttcggtgctccgcctgcgatctgacggcagttttctgcgatcgcttccagctctttctttctcacggaaccggtttccttctccgcgtattcctccgccagctttgcgtagcgctccagatattttttcgcggcttcatgcataataatcattgcctgatagaagtccctcttgtcgccgtattccggatctctcttatccagcctgccaaggcactccttcgcctgttcgatcaggccgttgtagcccaccttcatcagcttcgcgtaatcaatcgccagatggccggttcctgcaaaatggtagaggtttgtctggaagatcttcttgccggcttcggaacccttgatctgttcgtcttccagccttacgttgatcatgtcgtctacggtttttccctgccagtatttgcagagttcgataatctcttttctctcctcgtcatttcttatgtagaactggtcgtgttcacgctcctcaaacggagaatgaagaatctcatcgataatccagtttacggagaattccggatagatcggcgacgccttcaccggtgcggcaatctcacccagaattaagtcctcgtcatcgatatacagcgttgcattgagcaggatgttctcgaaagcgtaggcgcactggagcttgcgcggacagacttcatgctctttatagctttccgtcactaatctaagccgctccacatcgacctcatacggtctgtctaaaaaagtctgccgtaaatggttgacccttggaaatggggaccagtcttcatggtgtacctgatatcccaggctgtagacatggtcaaacggttctgttccacacgcggttgtgtgattcatattcatggaaattcctcctgattaaaatgatgatataattttaattactgtttctctttcgtccccaccatacagtggattccccggctgttaaagtactctgcaatctcttctacatgcttctggaaggacttccggttgatctttacgtcttccatctgatacggcagccccagcgaagcgtatttctcctcaccgaggcgcataaagctcaaaagctgcagggttctgacccggccccccagctcattccggatgaaatcggccgtggcttccatgttctttttgtcgtcattgacgtgggggataaccggaatccggagtatcagctcccgttcctcttctgtcagcctctttaagttggccagaattctgtcgttggtgactcctgtatactctttatgaatttcgggatccatgtgcttgatatctgaaatcatgatgtccgtgaccggcagtatcttttcgatctctttccagtctgcatggaatgtggattcacagcaggtctggattccttcgtccctgcatgcctgaaaaagctctgcgacaaaatcgctctgaattaacggctccccgcctgataccgtgacgcctccgccggaccgctcatagtatcctttatcccgccggatctccttcatgcattcttctacagacatgctctttccccactgcttgacggcatccgaagggcaggcgtcatagcaggccaggcagttggtacatttactcctgtcgatggcggtaagctttccgcgcgtgaaatgtaatattcccttctcgggacagacctcttcacaggccccgcatttcccccgcgaaatgcattttgtcttgtatatccccggctgtatgtaagcagtccagctctcggggttgctgcaccaccggcaccggagcggacagccttttaaaaacagttctgtgcgcatcccaggtccgtcatggattgtaaagcgctgaatattaaatatgattccctgctgcggcaatcaatcccctcctcccaatgttcactttctcttgtatgttaaaattatatcaaaccttttttatcgataaaagtggccatctgtagtatttcatatagggaatgttccctatttcgacaaacaggaaggcagtcagaacccggagaccgggaaaaaacaaatcaggcggaaccccggacaggacaatgtcccgtctgtgattccgcctgaaactcttttactgctctctgttctccagccacttatacagttgaaaccggcttttcaccccgcacttggtgtagatgttctgtacgtgcttcttcaccgtatggtagctgatcaccagctcatcggcaatggccttataggtcaggccattgtacatcagctccgccactctctgttccgcctgcgtcagcggcagcatcgtaccggtgccgtccaaaagctttccatcctctttcctggagatggttatccagtgataccggtctatgattccgttggaatagctctgatcgtaggtgtagattgtaaaaatataatttttgatcacccgcgtctggacgcggtcagccgtgttgttattctcctcgcctcccaaaagaaacggaagccagctgcacggtgttgtggtgctgatctgatcagccacagacggccccaaaatctcttttaagtaattctgcgccgtcttattatagctcatgatgtgcataaaatcatctgtcacaaaatatgctttttcaccggaggatataatctcactctgaatatttgatacgatcttggcctgttcgtactttttgaaattcttgtaggaattggccacatagacatagatctcgtttaacgcctcgatctccttgtccgtaaagtccccgctttcctcactcttaaaaaatgccacctggatgtatgcattaatgccgaatgccatggtcacactgtaatgcgcatggaaattttcctccagaaagcggacgtaggcggagtgggcgtaatcgacagggcttatgatgtcagtagacttatacagcctggggagcacattaaaataggtcagatgatcacggaccgcatcctgataaacgacatgtctgatcacatcattggcaacgaacttcctgtatggatgctcttcacagtccagcagaatgccattccggttgatccatgagagaaatctcccatgtgtatcaaaataggaaatcagcacatgcttcaagccaaaatttcgatccagagaatccagcagaacgttgctgaaaaattcacgtgctgaaatctgatgttccgccatttccgagaaaaaattcatctggccggcattttcatatttcatggtacttttcccccgttttttcgtttcggatatcttttactatacccgaaaaggcttgattttacaagcgttttgtcaatacagcgtcttacagggattcccctccagatcatagggcgtgatctgatatacgtagaaattcagccagttaccatacagcgtattcgccgcatttctccacgaaagaaccggaaccgcgaagggatcgttgtcctcatagtaattgcagggcagttccgggttcagtcccttttttaaatccctgtgatactcgttgtttaacgtcatgcggtcatattccggatggccctgtacaaacacctggcttccgtcacgcttcatcactaaaaatactcccgcctcatccgactcagccagaaccaccagctccggatttttttctatgtcttttctgcgcacctccgtataacgggaatggggagccataatgtaatcgtccatgctgcgcaccagcggcaccttacggtctaaaaccctgtggcggtaaataccggaaagcttcttctcccgcttatatttcggaatcccgtaatggtaatagagtccggcctgggctccccagcagatatgtaatgtactcgtcacatgggtcttgccccactccataatcgtctggagctcatcccagtaattcacttcctcatactccagattctctacaggcgccccggtaatgatcatgccgtcgaacttcttattcttaatctcatcaaaatagacgtaaaatttgtttaaatggctggccgacgtatttttcgacgtatgggtggccagcatcaaaaaagtgcagtccacctgaagaggcgtgttggagagcgcccgcagaagctgcgtctccgtgtcctccttcaccggcatcagatttaatataaggatctccagagggcggatgtcctggctcagtgcccggtcctccgccatgatgaagatattctctttttccagtatggcctttgcaggcagatctttttgtactttaatcggcatcgcttattcccccagcatcttgataaactcttcctctgatataatcggcacgcctaaatcctttgccttcttattcttggaagaattagacgtcacgtcattgttgatcaggtacgttgtcttcgaagtcacagagcctgtggccttgcccccccgcgcttcgatggcctccttaagttcgtttcggttggcgaaatgctctacactgccggtgattacaaaggtcatcccttcaaagaccgcttcctccgccgattcttcctcctgttcaaaagtcagctcagaaagaaggtggtccacagtctcctgattcttctcatctgcaaaataatggatccacgcatcagccagaacggcgccgatcccatcgacttctaccagctcctccgctgtggcatggcgcatccggtcaaagtcgaacttaaatttccggcacagcatcttcgcattggcgagaccgattcctgagattccgaggccgtaaaccatgcgtgcaagcgtcgtgtgagaggctgcttccgtcgcccggatcaggttatcatacgatttttgcccgaagccctccatctgggtaatcgtctcctcataccggtcaagatggaaaatgtcagcgaactccttaataaatcccgcgccgataaatttctccagcgttgcctccgacaggccgtcgatattcagcgcatcgcggctgacaaacagggaaaagctcttgatccgcttggcctggcagtcgggattggtgcagtaaaggctgcggacatcgcctgcctggcggatctccgtcctgccgccgcagaccggacatttctccggaatctgtatcttcccgcttctggtcaggttatcggcaatctgcggaataatcatattggctttataaacggtgatggtatcgccctccccaagggccagcgattccatgatgctcaaattatgcacgctggcacggcttaccgtggttccctccagctccaccggatcaaatacggcgaccggattgattaagccggtccgtgacggactccactcaatgtattggagcttcgtctctctgatctcgtccgcccatttaaaagcaatcgcgtttctcggaaatttggccgtccgtcccagggattctccataggcgatatcgtccaggagaagaaccagaccatcggaaggaatatcgtatccggatacagcctcggcaaacgcttctaccgcttccggcagcgtgtctgccgtaacggttctgtattccaccacatcgaagccctgtctcttcagccactcaaactgttccttcctggaattgttaaaatccacgccctcagccgttaccagtgcaaatgcctcgaaattcacgttccgctccgccgtgatctggctgttcagctgacggaccgagccgctgcataaatttctgggattcttgtatctggcatccacgtcgtcgattgcttcattgatccgattgaattctgaataacggattacagcctccccccgcaggaccagttccccctgaaaggagatggtaaccggtacattggcaaatactctggcattgctggtaatcacttctccgatctctccgttgccgcgggtgacagcctttttaagtgttccgccgctgtaagtgagtacgacggtcaggccgtccagcttccaggagagaattcccgtctgatcgcccagccattcctgcagatcggcggtactcttcgtcttgtccagcgaaagcatggggctctcatggcgttccttcggaagctcggagagaacctcatatcccacgctctgagtcggactcttggacagcacgactccggtctccttttccagctccgccagttcgtcatataatttatcgtattcatagttgctcatgatctcacggctttcctgataatacgttttcgccgcggccgtaagagtggcagccagttctttcattctgctgattttctcgtccacttacaatctccttttcactgcgttctttcctattccatatcataccggaaacagcagttttccatgcatcatttccgttttccggagtcttttttttgtttttcctcccgatcctttaaggacaggccggaagtatgttccagccggcgcatcagctccgcgtattccttctttgacaccggccgtgattcgccggcttttagatcgcccagctcgatattcatgattctgacgcgcttcagcttccgcaccttacagccaagctgttcgcacatcctgcgaatctggcggttcagtccctgggtcaggacaatgcggaacgatttttctcccgtcttctctgcaaaacacggctttgtcgttacatcaagctctggaaggaatactccctttctcattttctgaataaattccggcttcaccggccggtcaatccatacgagatactctttctcatggccgctgctgccgcgcatcatccggttgaccaagtcgccctggttggtcatcaggatcagcccttcggactccttatcgaggcgtcctgccggataaatccgcacagggcagtccaccatgtccacaatattgggagcacggtccttgtccgaggtggtgcagacaattccgcacggtttatgcacagctaaaagcacacgctccggtttcttctccgcacccctggaacctgctgcgattgtccgtccattacagacaactgtttctcccttttttatcttctggcccggaacggcggttcttccgccgaccgtcaccttaccttcttctatcagccggtctgcttcccttctggaacagattccagccccgcttaagaatttattcaggcggattccgtcttctcccatatcatatctccttctgctcattaagtaaaaattatatcattgttccatggcagaagtcaatttaatccgggaaacgatttgtggaagaaaaagcaggcagtttcagatcaagggccaccgacgccatcatggtaacccactcacttaataaaaaccacaggcagcgtctttacagataagcgctgtctgtggttctctatcaaactgtctctttattttttttcattcggatcacgttccatgacgcttttcccagcatactggaaagctttcctgtttcctttatcgagcgttctgcccgtatcggccggattttttccccttcaggaccattgcactgctttaaatcgccttccagaacgagatgctccaaaagctcatacccctcaaagtttctcaggtcaatatccaaaattacattttcctcaatattcctgtttactgcaaagacagtcagcaggccagcttcttcctcatacacagatacgcattccacatccgtgatcagcccatgggccgacgtctcatgcaggggcgaattgacgatcggctgcaaaaccacaccttttccatataaagccgcatgataaaacggatagaatattgtctgcctccaggcggtgccgttctcctctgccataacaggcgctataacgttgatcaactgagccatgcaggcaatttttacgcggtcggcatgtttgagcagggtaatcagcatcagccctaccatcagtgcatcttccatattatagatatcctccaacagatgaggtgcctgctgccatggatggttttggaccgtatccttctcctgagccttggaatgaaaccatacattccactcgtcaaaactgatattaatattctttctgccgcgttttttggcctttatgtagtcacagacggccgttaccgtcctgataaactgctccatatcgtcagactgggccagataatccatagaatcatcctggcggttgccataatactggtgcatggacacataatctacaaaatcataggtgtgttccagcgtagcagcttcccattcaggaaacgtaggcatggacatctgtgagcttccgcaggataccagctcgatctccggatcgatcagacgcatggcctttgccgtctccgccgccagccttccatactcatccatcgtcttgtgaccgatctgccatggaccgtccatttcattgccaagacaccacagcttaatcttatgcggctcctttaccccgtggctgatacgtaaatcactgtattttgtaccagatgtatgattgcagtattccaacagattacaggcgtcgctgattcctctcgtccccaaattgactgccatcatgacctcagaatttaccagcttcgcccattctgtaaattcgttcagccctaccgcattcgattccacgcttcgccaggccagttcaagtcttcgtggtctctgcgccgttggccctactccatcttcccaccggtatccggaaacaaagttgcctcccggataccggatcacggaaacaccgagctccttcacaagttttatcacatcctgccggtatccgcggctgtctgcttccgggtggccgggctgatagagaccgccgtacacagccctacccaggtgttcgataaaagagccgaataaccttctgtcgatcgcatccgtcactgccgcacggtcaattacaagtctcgctgttctttctgccatggataggctccttcctgtttaattcccattttctgcgtcataccgcgctttttcttccgtcatggcgtcggcccatgcatcaaggaactcctgggcggtacagattcctgccatacactcctgcagcttcggctgtgctatattattttcaatatttacataatttgtaaggtatgtcggtacttcaaaaaaaacggtattttcatcgttcataattgaaatcgccttctggtagtaatccttttccatcacccagtccgccttctgtgcagactgctcggtcggaattcctccgcggctctctacccagtactccgttccttcagagctcaaaaactggatgaaatcccacgcctcgtccggatgctctgtggaagctgagatgccgaagcccattacgcctacctccggatggcactgttctccgttgacgctcttcaaaaacggcatcatctggaattttgtctcatctcctccaaatgtctctgaaatcatatgtgcggaaccaagattgtgaaaaatagatgccgtggagcctgaggtgaaagaggcggcgatctctgtccagcctttatttaaatcatcctctgacgtatatttcttataaaggtcaaaatatttttcaacaaattccacatgaagcggatcgttcatggttgattttccattttcatcaaaagcatggggaatccccgagtaggcgtacgccatgcacatcacattgaacgctccgccggatccgccgcggatcgtagttccgtaaagattattatctggatcggccacctttttcacactttcaaagaattcatcccaggtttccggaatctctacaccctttttcgcgtaaatatccgggcggatccagaagtttctgaaatccatgaaagccggaaaatagtagaggtgttcttttttcggatccagatttgcatccgcccggatcgcctcctcatttacttttccataaagctcagatttttcataatagccatccagtggaagtacgtttcctctggcaataaattccggcatggcacactcaaagatatccggcgcagaatctgtggcaaacgccatatccagctttgccttggcgtccgcagaatttcccggaattcccagaaactcaatttcaatgttaggattcttctccatataggctgcggccgctgcttcatatgcttcatttaactctggcgtactcatctccatccaccatgttagtttgaccgtatcccctttggtctccccgctcttttcactgctctcctgcgccttttcagcgctctcccccacggttgtttccccttgcgttttcacctctgtggttgtctcattccctggctttgcagaacatcctgccaaagacaaaccggcaatcaccgttaaaacaagtgcaagcttccttctcattgtatcctccttacttcggcactctttttgtacctgtattttgatagtatcattatatctttaccttctgcaaaactccattaaccagatttgcagaaatgtttgttatttttgcattcgaaatgttttgatttcaaacggattaaaaacaactgtgaaacagtttccgacagccgaaagttctgttccgccccgctccagcatatcgcactccttcagcgtacagggggcttccgtgatgatctcaataccagccttcacgcggtttccaaaaccttcataagctctgatgatccagccgtctccatcctccgccctttttaccgtctcaataaatattcccggcgtattgcagatggccagctggcgggggaacgctccgcattgctgtccctccaccttagagaaaagtgccggaacagggcttaataagtcatacgcctcctgaaatactcccgcctcccgataatctcccggatgaggataaagggagtacgtaaagtggtggaaccctctgtcctgtctgttcgggaacaccgcagaacgaagaagcgacaggcgcattaccccatcatgaatatcatacccatacttacagtcacttaagagtgatactccatagtttccttccgacagatcagcaaatcgctgggcacacgtttcgaatttttccgcgtcccatgaagtgttcgtatgggtcggccgctcaactgtaccaaactgtatttcataaaccgccttctgtgaaacgatatttaccggaaatgccgctttcagcagcaaatgttcttcctgccagtcaatatcggtcacaaaatccagccgcctggaattgctgtagacgtagagagtctgccttaccgttgaggagagataccgatagacaaaccgcaggccgatcctgacaggtccctgctctacaagttcagcctccgtacagtggttcagctcatacctcttttccctgtaatacggactcagctcccacgcatcatactggtacggtctgtcctcatacacttccagcacgtttgcggctccgcctaacagttcccggtctgcttccctgtcatagagggaggccattgttccattttcattgaggcggattttataatacggtgactcaattatattgtctctgtatgtaatagtaaatccaccgtgttcgcatgtttccctgatccggtaacgaaatgcacctgcgcccggaaccgctttcagttcggcacagtactgcccgtcaggcgtcttctgagcgggaatacccatcccatcttcaccggttaaaaccagtacctccgcgtcgctgtcacatgcgaataaaatccgggaatttctcgcaaagccaaacgtgttaaaagcaataaggctccggccgctccattttcctgcgatccgctccatcgcctgaaccgccgtagactccatttccggcagaatctcctcgtactcctttcggcagtcgtcgtagacggcgtcaattgcagatcccggcagaatatcgtggaactggttggtcagaattatccgaatccattgctttaacttcctgtacggataaatttccggcccctccgcctgtgccagtaagctgtaaagaaactcacatcgctgaagcagggtctctgcaatgcggttgagacgcttgatttcaccaacagaggtataggtaccgcgatgaaattcgagataaagctccccataccacacggggagcgccggattcccctcagtatccgcctccagcttctcaaaaaattctccagccgtggaaaactgcacttcaggtgcgcccggcaggccatagctcatacgctttccacactccaccatctctcttgtcgttccgcctccaccgtctccaaaaccacagggcattaaaaattccgtgttcaggctcttctgtgcatagcgtttccagccgcccataacgtaatccggcgacagttcggcattgtacgtcgttatatgcgggcttcgggcaaacccaaatgaattatattccacatggtcaaaccgtctggacggtgaaaaatgggtcagtagctcgctgccgtctattcccttccacaaaaatgtatcatatggaatttgatcctgttcattccagctgatcttcgtcgtcatgaaatagtcgatcccgcatttccggcaaatctggggcagggctgccgaatatccaaacacatccggcagccagagtattctgctttccgttccaaactgctctttaaaatactgctttccttccaggaactgacggatcaggctctctccgctggtcagattacagtccgcctccacccacatgccgccttccgcctcccatcgtccgagggtcgtatactttttaattttctcaaactcctccggctgcgcctcccggaagtattcgtaaagctgcggctggctcgacataaatatgaattccggatattcctccaacagctttaacgctgtctgaaagcttctcacagtcttatttcttgtatgcgatttctgccacatccaggccacgtcaatgtgcgtgtggcctacgcatctggccttcttcccatttgaaccgcaccgtttcagaaaaaattcctctttcaagtatttcgccgcttcttttatgctgttgtcataggactcgctcccaatctctcttaaatccagaagattgacagcctcatgcagagcgtgaagcaggataattccttcgtcgctctcctttccgcagcagaccgcagtatccagcatcgatttcatatcgtaataaagctgttccgtattgcagtctttttcataaaaacgaatggatagtatccccgggaggttttccctgttatcccagctcacctccttaagaaccatgcccgaccaggcgtcaatatctatacacactgtctctttgccgcgtgcatgttctgtgatcaggcattcttcatggtaaatatcaaatccctgcatcggaatctgattgcagtaaagcagaaattggggattctgtgcataccagtctctcttattctgcgtaatctcaatccagagtccgcagccctctgtttcctccggaatctcaaaaaggcactgaaaccagccatactggtcaaaacctccccaggagcccccattcctaaactcctgaaaaacaggcaattgattaaaattcagcttttcgggcgcatacctcaatttttccggaactgtcacattctttttgacagccgccttaagcaccgataagatctggctgacccgttctatctcataactttccgtctgattcattttctttcctcatcaacctttcaccgctcccgccgccataccactgattaagtgcttttgaataaaagcaaagaggataatcggaggaatcagcgcaataatgctgctggccgccaatgccgccatatccaccgacgcctcggttaccagagatttaagggctaccggaatcgtaaacttcgattgctgtgtaataaaggaaaatgctacctgaaactcattccaacagcccacaaaagcaaacgcgctggtcgccacaatccccggaagaatcagtttcggtatcattctcgtaataatataaaatcttcccgcgccgtccaccatggccgcttcctcgatctcaaccggtatgtcagacacaaagcctctcatcagcagagaattaaacggcgtctgcgacacaacgtaaaacaaaataacagacgctctcgtattgatcagcccaaatttgttaaaggttaaaaacagcggcacaatgtagatgatcaccggcataatctgagtgagcagcagaagagagagaaatgcaccctttgccttaaacttaaatctcgccaacgcataaccgtttaatatggcaagtatcacaataaatacaacggaaagaaccccgatataaaggctgtttccaaaatagagagaaaatttatttcttccccaaacagttacaaaattcttcagggtagccgggcttgggaaatactgtaccggcagtttaaaaaccgatccaggctctttcagagaagtgatcaaactccataaaataggcgcaattgtaaaaagcgccgtcacgcacaggggaatataaattccaagaattcgttttaccgttcgtttctgtttgttcgtcatacatcttccctcccatagcgggtaattttcaaatacaggaatgcaaataccagaagtcccgctcccatcatcacagccatggcggaaccgtacccgtactggccgccaacaactgccctctgcatcaaatataccggaagcgttgtggtaagccgcagcggacctccattcgtcatagtaaagattaagtcgatggaattaaattcccagatacatcggagcaacgtagaaaacacaaggctttcttttaaatacggcagtgtaatatagagaaacttccgaaaacctccacagccatccacgttacaggattcatagatttcctccggaatcgactgaaggcctgccaaaatcatgatggcaaagaacgggattcctctccacagttctgtcaccaccaccgcccagaaggttgtatgggggttggaaagccatgccacccccttttccagaataccagccttgataagcaggtcattgatcacgcccacattctggttgtacataatggtccacagcatagtggcgagtactccggataccgcccatggcatgaatgtaaccgaacggaacaacccgcgaaaccagactttctggttcagcagaagggcaatccccatcccgatcaccagttgtcctgccaccgtgcatgccacccatttcagactgattcccgccgccttgcgaaatacttcatcctccatcagaatctttctgaaattctcaaatccgacaaacgtgccgactccgctcagactgttggtcgagtaatcctgcgcgctcagcttaaacacatccagaattggtatcataataaatataataatcaacaggactgtcggtaaaataagcagatatggataataatgatccagtcttttttttcctcgcatctgtattgccctctcttttctcctttttaatcatcctaataaaaaaaagagttaaagtacattaatcagattgatataaacgtttggaattttgattatttgcagcctgtggaaaaataagaaaagcggctccctgaatcggaaccgccaaatactttatttctccatatattctctggggctcacccccatatacttcttaaatattacgctgaaatactgcggattattgtatcccaccttctcgcatatctcatagatccggtcatcggtcgtcttcatcagggaagccgccttttcgattctcacgctggtaagccatgccatgaaattcgtattcttatttttcttgataatcctgcacaaatgggccggagaaagatgaatatggtttgccagatcgttaaggcttaaaccgggaacagaatactgttccataatataatcctcgatctcctccattatggcatttttcttaaccagacggcagtttccatctaagcagtgtaccacagcgccgctgtcccccagcttcataagttccagcagccggtaagactcattatatgcatcgtcagtctgactcaaccgatggtattcctgactaacggcaatttttactttcatatttaaaaattttctcagattctcaaccacgctttccagcaattttgagaactcctcccggtatccggccttccgaaacgcaaatacagcgaaaacctgaccgtcatacgtaccaaaatacacggaaacatctttttccggcaattcagcttccgccaattccctaaaaatgttaattgcagaaaatgcatagatttcattggtattaggaccttcgcttttcaagtaactgtcctgacagtccatgtgaaggagtaccagataaaacattggatcacagatatcaaacctgttctttttttcaaactcaccaagcgcctgttcctctgcgattcccataatcagctgggttaaaaagcgggactgcagcagtgattttgacttttggatcagtgtctctcctttcctggcctcatggtattccagttcacaccgtttgaccgcttcaataatcttttccctcgactcatattttaagatataatcctgcacatgcagctccagagcacgcttcgcatatttaaaatcatcataccccgtaagaaacatgattttaatttctttatgattttccgccagccatgccgccaactccagcccgtccataaccggcatattgatatcggccagaacaatgtccggtttctccctctcaatcacctcgactgcctcccgtccattcccggcgggggtaacaagttcgatgccatgctgcctccacggaagattcagcgctaagtcctccctgataatcctttcatcatcaacaatcaaaagtttcgtcattccattcccctccattcccccctgtatagggaagcgtaatcagcgtacttgtataaatcgattccacgctttccagttcgataccgtattccttcccataatacagctcaatacgctgattgcagttccacaggccaaaatgctcgacttccttatcccctggcgcatccattttaatatattgattcaattcagccagtttattctcactgatccctccaccattgtcccatacggttaaaatcactttatcctcaaaacggcagccggaaatatccaggatccccttcttactctgacggcgcagcccgtgatcgatggcattctctacaattggctgtagtgttaacttgggaatctcacagttcaggatctcgtcatccacattcatacaccactcaaaactattatcatacctcatctggagaatggtcagatagtgacggatcaagtccagctcaccggatatttttaccctctccattcccttgcttaagctcagcacgtagaagcgcaccacagactcatacattttgctcaccctgtcataatccttcgcatttattaatgcctggatagaaataagggtattgtagagaaaatgcggattaatttgtgactgtaacaacagcagttctgccttacgcttcttttccgatatatcctcaattgtactgatctgacagttaatcgttgccacaaatgtattcaatccgtctaccagttcaccaatctccttttcatccttcgtctcaaatattatggttttatctcccgcctcatactgctccagctggcatgctatccgtttgatatcatctgacatatatctggaaaatacaataatgggaacggaagataccaaaagcatgatcactacgcagactgcaatcatcacaccgataaactcattgccggccatcagactcttaagcggcactgcggaaaaaatcacccagccattcaattgcagtctttcgtaagagatcagtattttttccccattaagatcctgtgaaatataggaaccctccagctctgcatgaagcagcttctctctgtcttcctctctcaatacctcttttttttcagcaccatcatacagaaccgagtcctccgccaaaattcccgatacgctgccgcggctcgtggtaatatctctcaaaataccagccactgattccggaagcatattaattaccagaagcatccctgcatcagaattttcgttaccagccacacaatacagagaaattacatttcgcttccggctcgtaggaagcagatcctcttcgtgtaaactgcgccatgcatagcgaaacagttctccacgctgctcaatccgtacttttttcagcatttccccaaaactctcagtaatcacatacggcgaagcgtagctggaatacgagagtgagtagtcatgttttgtcttaaaaacaacggaatccatcacatcagggtaatccacacaaattctggtaatctgctgcttaagttcctgattattgatcagaaactccttatccatagtctctccgtcataaacaaatgtaaaatacttcaggctttcggaattcgtcagagagattgccgcagaatatgctatcttaaaccgttcctccagtcgcacgctggcctgatggacggcatcctccagaagcttttccgaattgatcttcagctgtgcggaggataaaaagtaacatacagttcctgtaataataatgaacagagaaacaagcggtaacagaaccaccattagtttatttctcacgctcagcttataaaaaatatttttcacggctttccctcttttattctctgttacagattaaaatattccggatatttctcaagcatctgccgaaaatgctttcggtaggtagccaggtggccttcataaaacttcggaaaatcaaagtcaacgatttctcctgacagcaggctgctatatatcgtcttatgctcttccacaaaaatctggatatttgcctttgtatcaatcgcatcgagataacggaccctgtcatagtgggaacagacactccttactgcccgccagactcttgcctttttcgcaaattcataaatcatgcgatgaaattcatcatcaatcttgaaaaatgtatccaagtacgtttcctgcaaagcggctgtctcctgcgcctccagattctctttcaaccgcacaatctgttctttggtaagatttcccgctgtctgtgatatgattacaggttctacctgaagccttaaaaacagcccctcgttcaacgtctccaagtcaatccccgacactctcgacccactctgggggaacacgtcaactaacgattcctccttcagcatcaaaattgcctcatgtaccggagttcggctgacatgcatcagctccgaaagttcattctcattgagagactggcccggaacaagtcgaaacgtcatgatattatctctcaacagccgatatgcatactctctgttattctccatctgttttttttcaaataccttcatagatatctccttatctaatatatcactttcatctcttaatcctatcattcataaagtttctgtaatattttttcttaaaaaatacattttttataaaaatagtagcacatatgcacactttcgtcaataaatcatagcatcaaataaatatatatgaaatttgtgaaacatgtacaattttaaattgatatattagttatgttttattattgatattttcacatatatatcttatatttagtacacgtaactaatatattaattttcaaaacacaggagatcacagtatgaaagcaattaaaataccccagccgtttcagcttagcattgaaaatattccgacacccacgataaaaactcccaatgatgtactcataaaaatcacttcctgcggcatctgcggctctgacatgggaatctggaatggaacaaattcactcgccacctacccacgcctgatcggacacgagttcggcggtattgtaacagaaaccggttcctccgtacatacggtaaaaaaaggagacctggtttccgtagatccggtcttaagctgtggtcactgctatgcctgccggattggacgccataacgtatgttcttctctcgaagtactgggcgttcatcgagacggaggcttctgcgaatatgtatgcgttccagagagcaatgtccataagttccacaccgcttttgaccagtctttgctgagtatggtggaaccgtttacgatcggtgtggagatcaatcgaagaggtgggattacagccggagacaaagttttaatcatgggttccggccccatagggattgcggcgatgcaggtagccaaacgaaacggagcctcagttatgataaccgatctggttgcctcccgcctggaaaaagccagaaaaatgggggcagaccgaaccattttaattcccctccaggatctggaatgtgaaattatggaatttaccgattcagagggaatccctgtcattgtagacaccgtctgcacacctttgtcgcttgagcaagcggtacagctcgcctgccctgccgggcgaattgtcgtgatcggcctgaaaaatcagccttctgccatttcaatggcggatatcacaaaaaaagagcttacgatagtcggctcccgattaaactgcaactgttttgacgaagtcatagaaggttttgaagacggcagcctgcatccggaaacctttgtcacacatacgttccattatagccagacagaggaggcatttcagctgatcagacagcatccggaagaagttctgaaggctgtcattcgctttgaatagcagaaaaaaggaccaaatccaccaaagcattgcttgtcagattcggtccttcttctaaaaggagattattctcttattctgaaacagtcgtcagcacacctttcgttccatcggaaaccggattgaaatagtaccacttgtcgtcaatcagctgccagccagttaccatccgtcctctggttccgtcggaaaccggattcaagtagaaccattttccatcggcaagatgccagccggttaccatatttccgttttcatcaaagaagtaccagtcatcctgatctccccagccagtgtagatccactcgctcttcggaatggtgccgtcagcctttttaaactgccagccagtctccgtattgctccagcttccttccgtatagtaagtctctctcttcccggaagctgctttgatgccggaagagcttccggatcccgagctgccgcctgaggaacctccggaaccggtgttcccgccggaaggcttgtctgatccggcctttttcaccgtcaccttgaaatcagtctcaaagacttcctctgctccgtcttttccttctgctatataagagaggacgacctttttcgttccggcctttgaaaaatcatagaagatggtataatcaccctcgcttaaaatttcctcggccttctctccgttttcttttaccagcatgcgctttacaatcatgccgccggtatccagttcttcgcctgtctcatactccgtcttaaacggacgggctgtcactctgattccagtcgtatacccgccctggcttgtgtcagccattacgcttaccacaatgtaatcggtaaacttcttttcttcgccctttttgtcagtgccgtaataagcgaccgtcaccttgcggtttccttctcctgagaaatcatacaccgtctcatattcctcctcagacagcacccgttttctcggtgaagcgttgcttgcgctggcttttaagtactccgtcacctccattccagacgcatcgaaggtttcgccaatggaatactccctcttatccggcttcttcgtgactgcgattctggaggtatagtactctgcctcttcgatttcttccaggacttttacggtgatggagtccgtaaagatcacttcttctccatcttctccggccgccgtataggatactgccacctctctgtctcccagctcagagaaatcatactccagttcataggcgtcttccggaagtacggtctttctcactgcattgctgccgctggcgatccggtattcggtcacctccatgccttccggattaaaatcatcgtactgctcgtactctgtctggtatggcttccgggtaatcttaatgcgatccgtatagtactctgtctctgccgtcagtttctcataagcgtctgccagtgcctggaaaaccgactctaaatccgccttggaaggcactgccgatttcatcagcttctccgcttttttaagcgctgccgcgaattcttcccagccttcttcgtcgtaatcttccgcatcaacctgcttcatcgattccaggacagcctcatattcgcttacatctgcagaggcatcgtaaatccgtacattatcgatctttccgcccgtggccactgcaattacggccattcctgcttcttcataggagcttgctgcctttttatggatcagttttccattgacataggcatacgccgatccatctttatacagcacggccacgtgatacgtttctcccggctcgaaggtataggaagcgctgtcgtcccggccattttcacggatattgacagccgagttctttaagtcaaatttcacataagaacggtcaccctccgtaccgatctgggcataggatctgacagagttctcttctgttcccggaatcatgacatccatcataatcagggcatccgtaaggcctgccgcctccccggcagcgatccctgcctgggccagctttatattggtcgtcgccgctgcctgcaaatacttgtttccttttgcatcttccttcacaagaaaggaatcgttcagcatcatgtactgcttcgttccatcctcattctcgaggacctcattcttatctgcagcggcgtctgtctcatacgtgtcaaaggtatcctcatagaccggcgctgccgatccgataatctcttccatcagttccgtccccgtcagatccgggctgtttaaaaccgcaggtccgtactcatccatgatagctccgtattcgtcagccgtaaccggcaggacgcttccgtggcgcatggtcccggggaaggaatattctgaagagtccagacgcgtaaacgctccgcttccgatatcgtctgtgagcagcgggaagtaaccgcctcctccaaaattatccagaagcaggcaccacttctgttctccgtttaaccggaatgcggtggcgccttccacgccgcttatctggttgatgccggactcaatctctgtccactggccaagcagggaatcactggtctccagcatggtgtacttgccgccggatggcagtccctcccgatgaggcttcgctgcctcattcttggtaaaacggtaatacgtatttcccactttgattaccgtggcatcgatgacgctcagcgtctcaccgctcttgctgtgaagttcaatccagacctccggttctgtaaaggtatagaaatccctcgtctttgcataatagacccggtgggtataatcgttgttttccacattctggctggccggaatcttggaggaccagaatacgatgtattctcctgtggtttcatcgtaaaatgcttccggagcccaggtacagcctgctccttctgccgctacttttaccattctctggtccgaccagtttaccagatcggcagactcccagatcatgatggactggctgccgctggtctgagccgctgtccagtcgttattgccgttgattttcaaatcggtggcgatcagatagaatttatcgccttctgcagaccgcatgataaagggatcgcgaaggcctttttctcccagtctggaagtcagtaccggtttcgatgcatttaaatcttcccagttcatcccgtctctgctggaagccatataaatctgttcgccgtttgacagtccctcgcctttgaaataagcgaagacgtaggattccatctgcttctcctccggcttagccagtacagatgcagtaaataccttctctctgctgacatcacctgcggtgactgtggccgttaacgtaacatcggtatctgttacaggcctgctgacaacgccgatcggcgttccctcagccagtccggtgacagcaatgacggactcatcggaggattcccaggtaatgacggtaccattcgctccggtttccggaagcgttaaattacctcttacctcgttgatattgtaaacgtctaatgcctcataatcgagatcgaccgcttcggaaggagaaaccttcttcacttcctgcactgcaatccagctcagcacaacgtcaagagctgcatttttctttacatggaattccacgattccgtctgccggaagttcaaattccctgctgctctccagcacatgtcctgcggtgtcatttccaagggttatggttcccaggtcttccgtctggatgctgccttccgcatctgtgtaccggaggctcactgccatggaacggccgctgttccactgcgcccaccattcctgataaccgctggcaaaccggtaggtacctgccggtaaagccagtttatatacaatttcctggtccttctgcgcataaaaaccattctcatatttgtctccggagctggtatttcgcggcgagattccctcttccacgtatccccatgtcccgtcaaatttctggtctgccgcttcattctttaagtccatgctccggctgattccctgccatgcggcagagatcttcccgtctgcaaaaccgctgtcaataaaatatacaagattttccggaaccacctcgacagaagcagtcacaagaacgtcgcttccctctaaaacaccggtcaccttcttcgttgtccacacctcgtggaagccctcttccggcatctcccagattacctttttcgctgtaatctgtccgtccgccatctctgcctccacggtttccggaagctccggcgtcttaccggctgcgaccgccaggtaaagattatcatcgaacacgttcgcaatactgctcttttcaatggcaatgtaagagactaccggcgcctgggcgctgccggctgtaaaggtaagggtaacctttgtctgatccgccggaacggtaatgcttcccgttacattctgtgtgattccgccgttgctgccgctccaggatgcgcttcccaattctgccggggccgcgatgccttcataagaagcggttacattcgtggttctgccggcactccaccactccgtgtgtcccgtcgtaatgatatacgtgcctttgtccagtgtaaattcataggaaaacgaatttcctgtcttattctctttgccgtaccagccggtgctgtgaagtcccaggccggctctccaggtaagcgaatcgcagccggaaccgtgtccccacgtattgcttccttccgccttctggtcgggtatttcgttcataagggttacgtgcttcttaacatcttcatatagcccggataccttcgggcttcctgacgcctccatgacgccgcagtctaccaggtatgtcagttcccgtgagtaaacgaatccgtcgatcgtcaccatacggcctccggttcccgtcatctttccgctgatggttacaggtccgacactgtttaaatccccggaaacgagcgtccactctactgcggtttcctttgtctccccattgacggtaatgctgagtttctgaggaagctcactcagagcggttcccttctttatgcttttgggaagttctgtattgacggtaatcggtgccatataatccagcatctccagcttccagtccgcataaggacgcagaatcatattgccctcgccgtcaaattcaaccggaagccacacatactgcggatcgatcagttcgttctggccggggttcttattgttccaacgatcccccatatagataaactttccattggcggcatcgatgggaatgatgttggtggactgggttccaaaggtcagcgcactcgtatagctgcagactgaggtgtccgtcacacagggatcaccgatgatcttccagtctcccagaatcccgttttctgacacggcaaagctggcctgattggcgccccatccggtgcatccggaggtcattaaatagtattttccgtcatatttaaacatggccggcgcttcccgcttctgtcctgcaaatgtctcacttcttaaaaaatccacgccctgcactgctgtctccgggctggccgacagataggtgtagtcttcgtttaattttgaaataaacagcgtggcattctcctcactggagtagatgatatatcccgtaccgtcgtcatccacgaaaaggttcatatcgcgggccatgcctttgctctggtcgtactttccggccacatagtttaagcggtaacggtcgataaatttgaagggacccactgggctgtcgctgaccgcaacgcccgcgctggccgccgcatagttggaattactggtctctgtggggccgtccgcgtggaaccacatgacgtagttgtcattcttttcattgtagattaccttgggccgttcgatcacggaagtggtatcattgatggccagcagaaccctggctctctgctcctccgtgtaatcaccgtataaggcatgaaaatagtcttcctcgaagtcgtattcgtccgtcaggttgcggagcgctatgccttcatcggcccagttatagaggtctgtggaggaatacacacggactccgccgtccacggtgcggtagccgtccgtcttgtcttctccgtaccagtaccatttcgttaccccgttatgcgtaaacttctgtacctggccgccgtgtgcctggatgggcgttccgttttgatcgagccacacctcaccgtcggtaccggaaaagctggtataactgacggcgtcctgcttcggctgaagaccgttatacttagcagccagtttttttaagtttgaggcaatcttttcctgagataccggctcttccgactccgcggctctcctggcatattcgtaagcctcgtcatatttttccagagactgaaccgaatagagttcccgctccagactggtcagcgtatactgcttcattgcgtttttcaagtattcctgatcgtagggagcctttatgattatgtagcttaacatcgcatcctgactggaggaagttctgttcgtgttatggacccggacatccagcactccgtcgcttacggtcacggagaaggtctcttccgccagactgcctttggtaaagctccagctgctctttaccgtctgaccttccagggtaatatctgccggtctcgtatcccagggatttttacagcccagggtcacctgatacgtccgttcgccttccggcatttcaaattgatacgtaattccgcttgcatcaggatcatactcgattttatcgctcatatagcgaagccccgcctccagagaggagggattcgtatccagttttccgtatatgattgatgaatcgttctctatgtatccccaggtatatccggtggcatcccggccatttttctggtcggtaactgtctggagcagtcccattttatatccgtccggtactgccgccggatcggaagctccgcattttaccagatacagagtgtaatcggctgccatcagctcttcatatccgggcatggtattggaagatcgttctgctccctccggtactgcatagaccggcatggctcccggaagagtcattgccatggacagcgcgatggctgtcaggcgtttcagtggttttcggttcatcattaacccccgttatttattttttttcatactgtgatacgggcacggctgtccggtattcagaagccatgcccgtattctgtcattcctcagatgctgttctcagatcagatacgggcgccgtcggcacctgtgacatatccatctggtgtagttgtatttacggccatggtaccatccgcattcaggtaatagctgcggccattccatgtcacccagccgctcacggccatcgctcctccaggctgcaggaaataccagtgatccttgtagcagatccagttgttatctgtcatggaaccatctggctgtaagtaataccactggttaccggacagtatccatccggttctcatataaccgtcttcaccgaaataataccaggttccattgatctgcgcccactcagcttttacgtatccgccggccgtctttgcaaaccaccagccggtctgatcctgcatccaggtccctgttaccgtcgatgttgtattaacccttggcctgcttccactgctgcttccgctgctgccgctgctgcccggtttatctccgtcatccggctcgtcccctgtttctgacttaaccgtaacatccagaatcgccttgcggccgccgtatgtaataacaacatgcttgattcctgctgaagaagagtcaaaaccagacagttcatactctgttacgactgcctccgtaccgttttcatagacggccgtcacgaccatgccgtctgcctcgaaggactcaccgatctgataaacggttttgtacggtttcgctgtaatcctgatgcctgtaacggtcagcgttcccggatttgccaatgcaaaggtacttaaggatgatacgccaaagctcatcatgttatcggcagtttccggtattatggtttcaatctccccggattctgttacgtgatagatcaccaggtttttctgacttatcccctccggtattctggctgtcaaaaacagcggtaccaccggctgaatttcctcatccgataccatcagacggatatccatcgctttcactgcttttacctccggcagaccagccggtatttccgcttcttccatcatcaggataatcacctggttctcctgttccacatcagcgctcagaactgcgccggtgacggctgcaccttccgtaagattacgatcgccgctgactcttacggtgatattgggatacgcctccataaagtagtcttccagttctccaatctgccgtaccattgttttggataattcgccttcatactctgcaaagctttctgctgctgaatgacgaagggcagaggcggcatcctgtttttcctttatggtgcgatatgctgcggtatcattgtcgaatatctcggaggcatcgcggatcacggaatcaagcctgtcttccatcaccagcgcctcgttttctgttacctttacttctattactgcagtaaagtctttttcctctccattctttccggttcccgtctgggttaccttaattttcttatttcccggttcggagaagtcgtatttaccaatctcataatccagagttttttccgcataagaggcgttgctggtgctggccttcatgacggtctctacttccattccctccggatcaaactgtccgcccacaggatatacggttttctttggctgcttcgcgatgctgatgcctttctggtaaaactcgtcctcttcatccaatacggttaccttaatcgtatccctcagcactttttcttccccgttatcatcgaaataagaataacagatttcgacacttcttcttcccggatcagagagatcactgactacatcgaactctccgtcttccagcttttctgccctggcagggacagcattgctggctgtagccttcagcagaagacgtacttccatgccgtctgcatcaaagttttcacccggaagatatacggttttctccggttcccttaccaccttaatactgtctgctctcaaatcctccggatcgtaaacggttactctgaaaattgcggaatattcttttccgttttcgtcctcataagtaattgttaccttggagagcccggcttcattcatatccggtccatccatggtatattcctcttctttcaattcacgaaccagttcacttccatgatatccgtttatgaccatgcccacagattcgaattcctcgcctaactcatagacggttttgtttggcatggtgtccacctttatcttattgatggcctgctttgtgacgggcgcttcgcctctttcaatggcaatataggaaactgccgctccctttgcctctgctgctgtaaacgtcagggtgacttccgtatcattctcaggtacggataaatgtccctgtacatacagttccttccactgggttccccctgtagagccgctgctgcccagttctgtctttacaacggttccatccgttccaatataggaagctgtcacctttgtggtacggctgttgcctgaccaccactcggtatgtccggttgtgatattgtattcccctgcatccagggtcactttgtaagtaaaggaatctccgatgctgttctttccgaaataaccggttgcgtgaagaccatggttctcttcatatccctttatgccgtcatagtccgagccgcttccccatgaattgccgtctcctgcctgatccggaacgtcgttcttcaaatatttcaccgcatcatgcactgcgttaaagatttctgaagtcctgccggtgttatccacggttccacgcttcacaccgattccgcagtcgataaagtacacctgcgtactgctgtaaaccaccggagaccagctgatggttcctgcgtccagattttcaaggacgccttccagcttcactgtgcttcccggaaggctccagtctccttcttttaagttccaggttactgccgtatccctgatctctccatttacttttaatgtgagtgtctcaggaagctgatcctccgctgccacaaccggaagcacaggtatgtcctccaccgagtcgccgccaaccgtaaccttgactgtcgctgtcacgttatcttctttcgccgtgatggttacggtcttttctcccggtacagaagaatcaaatccggatacggaatactggctgtcactcagttttcttgtggtgccgttatcgtaatagcctgttacctccattcctgttgtatccagcttttcaccgatggagtacatggtcttatccggcattttactgacttcaatactcgttaaattcgcagattcttccacggccagccagctgatgatcggcttttcattggctgcgtgtaccagcttataggttacatcaccgcttaccggaagcgtaaatttattggttaccgccatatccgttccacgggataaaatggtgtcaaacgtaattttctgttcctttccgttttcatctttatagatcagttccggtctcatatcccttgaacggcttccataccagtcatggaatccgtttgtgatcttatacgtaccggcatccagtgtcaggtgatagacaatctctgaaccgtttgtcctccaaccggccgtataggagttatcatactcgccttctgctccatccggacttggctttaagggatttttggaatccgtgatctcaaatccccactgatctgctgcggaaccatacttctgatctgcggtatcgttaagcagcgcttttccgccagcctcaaaatacttttctactgcttcatagactgaggaacggatctctaacgccccgcctccgttgggattcacaggcacgtcagccgcgcagtctatgtaataccggagttcctgcggaactgtcataactctggctttcaccggatacttatcttccccggcctctccggttacttctactgttttataaacggtgtcaaactgctcttccgacaggttccatacaacatccgcctcagatgcttttccgtcaagacggataatggaaactctgtccggcatcctgggaactgtaccttttgtcgttatataaagcttctcaagtcccgtaacctcggtaatggcgcctgccagcccaagcttctccatcgcattgcggagtgctaagtaagcctgattcacagcctcggcgctgccgccggcaagtgcttcctccgccgctgcaatcgctttccggaaattctcccagtcttcaggcatatacgtttcatcatcattggtcagcttctttgccgcatcgatcagcgtcagcagctttgccgtgtttaccgcagcgccctcggccgctgtgccaagcacgtcgattccatctacatagtaggtgccgccttctactgtaatttttacagtgtgctctccttccggcaggttctggagtgcatatgtggtctggcggttgcccgctgccggcgtctgatatgccgcctccctgatctctccatctacctcaacctttatcgtggcggcaccggaattgccaaatacctggatgcctgttccatggaaggtgagactgaaggaattttctcttgattcaccggaatcatccggctcgccgattacttttaatttctgaaggctgataaaggagctggttgccgtcaccttcagggtgtgaagctggtcaggatccagatccaggttaaatacattatggcctgtaccgccatttccggaattataattgacggttcccactttttccccgtctacatagacgtcaccggttccattacttccgtttgcttccccgaagatttcaattcctgtgccatagaaatcaaattcatagtgcgcctcatccgccgcgcttccccaggcattgctgtcgtttgatccccaggccagcgggttgccgcccttgtagtaacggatctggccgctgttatgtgcatatacgtccttctctatggagccgccgtaagttcttgtacggttgtaatggccatagccctcgttcagcacatgattccagtttccgttccatgtaatcagttcactggtgtcatccagcttctgttctgccgccgctgcttttccctcaatcggcagcacctccagattatcgaactgcgtgttataaaaaccactggtcagtgtgacacggccgctcatggaggtatgattgtcatccaccagttctgctgccttttttccgtctacataggctgtcagcacattttcatccgcagataactgcatattatgccagactgtgctgtcgaaattctccagtgtgccctttacactcttgccggtacggcagctgagctggtacgaaccgttctgaaagacctggaaggtataggtagctatatcattggcgttcgttccctcgtgtacgacctctctgacgccaattcccgcataattttcaaagcattccgggcttgtcagatcaagtttaaagtcgatccccgcggtataattcgtccaccggtggtctcccagtaccgttctcggccggccggttgtctggctgttctcatcggttccattcccccagacgttccagtcgtagggccggttgtcatagttgatcatctgggtcagcacatggtttccaaagcttccctcccgtacttcaaaggcgccgtactggtctgtcgtatatcttggagttcctcctctccgctccagataggttcttcctttttcatccgtatcataatccgcatactcgaaatcatcggtataaggaagcgccagcacatcgcggtccacattgggatcattctgtcccgggctgtactcctgtccccggtccagaagactggtcaccgtcttaatggaatacggctttacagttaaggtaaagctgtagacaccgtagctttccttattcggagtaaaggaatccaccatctgcatccagttgctgtcgtattcctgcccctcgtcaggacccctggtctcccatacatttaacggactggaagccttctttaagttcttaaccgtcaccttatactttctcgtctgggatgtgttgtttgcaaagatcatggagtaatcatcggtatccggatcctttaaggtcagataattgttggtacccgtatcagccagaacgccgccgtcgctgtaggagccgtctccatagcaggcatccggaaggtaattccagccgaggtctgcaaattccataaaatggcctaccatctgcagaccgccgtctgcatcgtaataacccgaccacggatcaaaggcgccaatcagctgtttcgggctgtaggcgcttccttcataaaaggcgccgatcgccggctgaaattcaaaccgggtcattcgggccggattgtctcctgcatccgaatagctgtagctgttgataaagcgggtggccaaatctgccattccaacctttccgcctacgccgccccggtccggatctacgttaatccggtattttgcattaatcatcggggcgattgcttcgctgtaccagatttcctttccatattcctgattcaccttcgttaaatcagagttgccgtacagcgtatagtgatccgaaacgacatctaccagatccatgagttccgaatcactcagcaagcgtcccgcaatatccttgctgtttgaatgcgtatccgctgccacgatctgtatctggctgtagtcgtaacgcgcatcctctttttctgcgtcctcattcagacggttcgcacagtatttaatccatgccgtattgtcaccgtaatccctgcggcgctcattctgcccagggcttacgtaattgatttcgtagccatattcgtcgtaaaccgcatcgatggtcttcttataccactgatatcttgcttcgtactttggattttccgaagtttcgtatccaatcccctcctgggtccatttcggctctccccaacgcagaatttctacggtaatgtccggattaatcgtcttggcatccgctgcaaaatgccatccggctccgcgcagcacgttagcctcttcctcgggggaacgcatcgtcgccggttccgtgccggaagaagaattgacatctccgcccatttccactttaatgtgatttaagccggcgcccttttccggattgaacagaagctccatcatctcccagtacttgtccggatgctcctctttataatccatgagcagtctcgacgtgttgttgcaggtaactgccccaaatcccctaaaggtatttaccgggtcaatcacatccccatccacggtaatttcatggacgtttgagtctgccgcagcgtaagccggcggattgaacatcattccgctgttcataaccatacccgcgctgagcagaaaacaaagggattgttttgccatttgtttcatcttcattttccttgcctccctgattttaatgactggttacaaggcagaagctgatgacatcttttataaacaggaatccttttcacaaaaccttttctctgatataataagtcataagcttattgccttccgcatacaggaaactttctgtgccaccagatttttgccaattgtgtcgggacaataagcttttttcctgtattttttattcatatcctccctccctttctaagatttggttttattttagcaattattttgggacatttgaatgtaattaattatttcatttcttttcttattgtgaaaaattacatgtttttataaacggttacaactttttgaaaaatacatgtaaaatattacgatttaacctgtaatatttttgatttttattcccccagctcgttacaggcaaaaaaacagtgtgaccaccgttacgtgtcacactgcttttttctttaatcaccacatggaaaccatgggctgacacagacggaataccgcctccatgaaaaaataatccccatagatcatatggatatgatgctccttcccgtgataggctgccgtacagttttcaagtatgcagtcctcttccctgctccagttgcatcggtatacatacaatgtttttaacagcctgagagcctgccgcaaatacggttttccttctttttcatccagctgttccgcaagttcaatcagcccactggctgcaatagcagccgctgcacaatcttcccacgccggaacctccggctgttcaaaatccgcggggatgaggccgctttccggtatcctgctgataaaataatctgctgtttttctggctgcctgcaaatatctggcttccccggtatggcgcgcgctgacggcaaatccgtagattgcccagccctggcctctcgtccaggaagaatcctcccgaagcccctgtcctccatgtactctcaccttctgccctgtcaccgggtcgaattccacgatgtggctgcaggagccatccggtctgaagaaggttcgcagtactgtgtccgcatgaaacatggccacactgcggtacctgggatcgttcagttcctctgatgcccagtagaggagcggaatattcatcatacagtcaataatagccagtcccgccgcatttccgccaaaaaagctttcattccaggcacggatatacccgccgtttatattaacccttccggccagcagattggccgcatgcagcccacgccttcgtgaaagagggtctccggtcagacggtaatccgctaccgcggtaggcagccacataaacccggtgtcgtggtgaagcccttcgtacagttcaaaacaccggtccagcttcacctccgtttcacgggcaatggtcacgtaacgttcatctcccgtcgcctgaaccatcagccactgaataccaccccagaatccattggtccaccagttgattccatttcccatatcccaatcagcagagttatccgagcggtcgtcgtgtcgtccatttacggtggtatacggaattttaccggcggaagcgcggcttacccattccattttttcaataagcttctgcctggcttcctccagccagacacagtcctgttctaatccagccagcatcctgcttcgctccttcctcatttgtcctgacttttcagccccagttcttcaatcagcgccagccccagaaatccggcagtgtactgacatgccatacggaaaaacggccggtaggataccccggacatgggacctgccaccggaactccgcctcgtccgtcccggtctgcaccacgatactgattgccgatcagccagccaagagcctttctggccgtctccagatatgcggcgtccccggtcattttatagagccggtagaacataacggcccacaccgcagttcccttctctgcgattccgtttaccgggtccgcctcactgaagcggtaccaccagctgccatcctcattctgatagttcataaggacagaggccatgcggcggcatttttcaaagtattcctcccccagtcccatgcgtgcggcggacgagattcccatcatggcccatcctgctcccctcgtcaaatcaaacggcggttccacagtccggctgtgccggaaataattccgggcccatgtgccgtccggcatctcgaaataccggatcagctggtcaatgtatctgcggccgatctccgcaatacggggatccccggtatccagatacaactccgcaattccctccataccgaagcctgcctcatccatggtgttcgtcttccagctcttcgtcactgcaaagtaatcctgctggatcatcacatcccgatccagaaggcgtcctgtcgcctccgtcatgatacggcagaattccagatagcgtttatcccccgtagcccggtacaggggcatcatcccccagccggcctggaataagccgtccggcggggaatatttcagttcatagcccaccctgctgttgactgtatcatggtccagccggcacaggagcagcccgtaattgggcttttcaggatccagttcctggttattcacgcataagtctcccattgcgacagcggtttccaacagctggtctgaaccgtaccgttcggatatctccggtatatccctggcctttaacagcgtctgcatagcaggaccgaaggtccacagccaatttcgctggcggaacgtcctggcatcgtaatcgtaaaatagaaaggttcctcccggtaccgcactatacggatttcggttccgggatttcataataaaatccaggtcttcctccaacgcggccagcagagtctctctggacagccgtccagtggtttcatgctcctttccggtccgggtacccgttccgtgctccgtctgaccattggaatcaaactcaaacgccttctcccacagcagtgtttcactgtcctccataattccccatacagctatgcgccccttccactgatcggtcagaagcctgatgtcttctttcaccatctctgtttcggaaggatatacttttctcatataaaattccagcgctcccgcctgtggattatcgtaatgaaacatattctcccaccactcaagaaaacagccgggaactacgacctttgaggataagggaaaacgcttctccccgtgatacatgggattcatcgcccatgtcccgtaaaaaacgtcttcaaacagaagaacgccttccattgtctcatcgtattcgaaatccaccacgggaaacaaatagttaaaattaaacatcccctcatactttgtcccgtacagccggctctctctccccggatcctcaggagaggcatcactctctttcacgatcggttcattgcggtcgctgtaaattctcagttcatagctgccggctttctgtttcgttggaacctctatctgaatgactctgttttcaggcatgatatctctctcctttttaacttcgccagtatataaaatgcgttggcatactgtgttgcaatcgttaaatacgacatgcaggttattccggaccggattcccgcagccttaattccaccgtatccggtccccggccctttgtgaatattggcttcacaccagctcacggccctgtctgctgattcgattagctccttctgtgtctgatccagggtgcagatgtcgtagaacagataggccagaatggcagtcgctttctcacagactcccgtaccgtctttatcctcctgcgccggaaccccctcatacccaagaatatagctgaaggatccatcctcattctgttcttccgcggtcagacgcgccagcgcagccgcttcttttaaatagcgttcttccccggttcccctgtatgccgccagcagtccctcgatcgtccagcccagccctctggcgaagaggacctggtccactccggtatccgggtggtaattctgaccgtaaaatccattatccaggcgatactgtctgataaaccgatccatgaaaaaacggctgtcctcttcgtacccgcaggtgcggtttagtcggtcatactccgtaaagccctccggaataaatgccgtatcgatgatagaataatctccccacgttccatctgtgagatcgtaatccagaggcaggtaatctctgtccggcagatagatggattttttaacccagtcgagagccagcctggaggcctccagataccgcctttcgcctgtcagttcataaagtggaagcagcgcccatttaacggcaaaggacgcgtcgttcgggcccagatagcagtcataggaatgttccggatgccccggatattcccacctggccgtcagtgctccgtaaacctcgctgccttcttccaggatctgagtgcggagaaattcttctccggcttctctggcaaactgcaaaaacagtgcttctttttccgggtaacagccgcttttgataagctccgccatacaggccaccaccacggcattgtcccacagccagttgaccagccgcggacattcgtcatcatagtcgtaaagcgtccagcaggcgcctttaaacggcgactgttccggttcctgtatctgaagattaaggaggaactgggcagtatccaggatgggatctgtcccgtccgcaatccaggcggtttcccgccttttatatgtatcctctgtgtctgaatcctctttatagaccagttcaatctcttttagctttacctgtcccttatatgcaaaagcattttcccctgcctcacatacgccggccggatatagcaccgcggcgtctggcccctccacttcttccggctctgttcccagatactgatttaacaccaccacgctcctgccgctggttacctccatggtgaggcggaccgcagaaagtctgtcgtaatcctccctggaaatctgaaaccttttatactgaaaacgctctttggaaagcgcatagctcccgggaagaagcgtttctttcaattctgcggactcaaatgccgctgtcttttttctttccatcccattcatccccttattttaaattggtatcgtagtattcctgcatctcagcaatcacatcggcaaattgcggaacatatgtattttctacatagttcacaaactcctcccgggtactgtttccaatgatatatttggcacatgcctcatccagcttggatcccagttccggattatccttcataagagcggaataggacgtcagcacctggattgtcggaatatacgccatttgcacgttgtttctgtatgtcgtttccatgttaatataggcatcctgattttccggggaatcgccgacagcgaccagacgcatcccatccaatgcagtgataaatgtaaaatacttggagacgtacttcaggctgttctcatactggtcatccttataattaatcttagccagcgtgccgtcctctgtcgtcgtatagctgtcataggtaattccctggacaccgagattcatcagggtccttccctcttttgagtaacaccagtcgatgaactgaagaacgcgttctacctgagtacagctgctggaaacggcatatccgccccaggtggacgcaggcgtctcataataactctgtgaattttcatccgccttcagcggataaataaatccaagcctggactccggaaacgcactctttgtcccggtatatacatccgtactgaaaagagagaccggtttgatatacagggaatcaatccccgtctgcccgaatttaaatttgtctgtctccgcatagccctggttcgtgtaccattccggatccataacgcccttctcatacatccgccggaagaaatcgatcatgtcgtaatagccgggctgatcctgtattatcgtgacctttccgttttcatccggactaaacgccttgtgtatgttaaaagcactgtaaaatacggaaagattgttgtaattatagttatcattcacattggtcatggaaaatccatatgtattatcctgaccatccccgtccggatcatcgaaggtaaacgccgtcgccacctcctcaaactcctcgattgtctcaggcagctctaatcccagcctgtccagccagtcctggcgaatcaccgctccgttaaaattctccgcgtgaggccgcggaaacgcatacagttttccggaagcgggaaccacacccgccttcagctgttcctccgtcgtattggccgtgacattgggaagtgacggcagatactcgtcgagagggattaaaagcccgtcgtccgcccatttgtaaaaagaggaatccgtggtttcctgaaggaagacgatatccggcagttctcctgatgccatgataacatttaaacgatccagataattgttaatcggaggcacctcaatctccagtttcacattggccgctttttcaatagcttcaataaccggattgttatcaacctggaactgcgcgtctacactggttacgatacgaatcgtggctggagcctcgccatttccatctgtctctgtctccttttttccgcatgcagcagtggataccgccaaaaccgccgccatggataaacacatcactctcttcatactcttcgttccattcatgtttctatcacccatcatcttcttctccttctcaatttttattcttttactgcccccatcgtgagccctgatacaaagtagcgctgcaaaaacggatacatacagataatcggtactatacttaacatcacggtcgccatctgcaggctgaacgggaataccgtccgctcattggcagccatcatctctgacatatttccttccaggatcatctcccgcaaaaccagctgcagtggccataccgaccgtttcgtcgtgtagataatcgccttgaaaaactcgttccagttaaccaccgcatacatcaggaacatggtggcaaccgccggttttgacagaggaagcacgatgtgaaacagcgtctggaagtcattggccccatcgattgtagcagcctccgtcaggctttccgaaatactgcttaaaaaattcttcatcagtatgatggaatatgctccgtttacggaggacagaatcagcgcccagagcgaattaatcagatgaagcttctgcataacgaagtactctggtataattcctcctgagaaaaacatggtaaagatatacagcagcattacggctttcgttccctttaaattcttctttgtcagcgggtaagccgtcattaccagcaccagcacctgaagcacggatcctgccactacgataaatatggaattaataaatcccgtagtcagcagcgggaatcttaatgcctccgcatatgcctccagcgtaacatttctcgggatcaggctgaccgggttctttaaataatccgcatacggtgtaatggaatatgtaaaagtataccagaacggcaggatgcagagaactgcaaacgccagtacaaacagacagatcacgaaatcatacagcgaaaatcccttcagtttttttcttctcagcatgtgtcctcccccctcaatagattcccttctgccccatcatattggccagtttgttagaacctacgaccagaatgaaaccaactatcgctttgaataaaccgaccgcggtagcataggcgaattctcccatcaccatgcctacccggtaggtatacgtttcaaatacatcggagacctgcatgttgaccgaattctgaaacaggaacatctgttcaaatccattttccattgccttacctacggttaagatcagcagcacaacgatagtcgcggcaatgccgggcagtgtaatatgaaggattctctgaatatgcgatgctccgtctaccatggctgcctcataaagagactggtcaatggccgtcaaagccgccagatatacgatggtattccatcccgtatccttccatatggtggtaatcacgatcagagggcggaaccattcgcttttccctaaaaacatgatcggctctatccccaggcttttgagcagttcatttaccagacctccgttggtagacaacagatttgtggtaattgacaccagcaccacccaggatataaagtatggaagatacaccgccgtctgcgtaatctttttaaatctcttatagcggatttcattcagcatgaccgcaagtatgatcggtatgggaaaacagaatacaatctttaatacatttaatacgatagaattttttaaaacgttgtaaaaatccggtgaagcaaacagccttttaaaatgtgcaaaatcattccatgggctgcctaaaattccgtcccggaaactgaagtctttaaacgccatcaggattccatacatgggtgcatatttgaacaccagcagcagtacgattcccggaagcatcagcagatacaggtacttgtttctccagatatagctgcatgtgctcctgactctgttctccggccggggacctgtcattaccttcattgccccttcctccttagatataacgattgtaataaaaaacgaaatgccttgtccatggctggcaatttcatcttaagccccttccggtcaaatgtatataataataaatgcaattgacaaaactattctctcacccggcacacttccccttactcctccgatgccccacgatgaataaaaatgtgattcacaaatctattacccaccgttttttttcgcaaattcgatgttttttccattttccctccattgcagagcgcctgtgattgtttacttttatttcctcaaatgatataattcagacacagaagcgccggaaaaagctacgtttttattcatcagaaacagggggagtttccatgaagcatcaatctttttcgtcacgaaaatctgcacagaaacagtttgtccttttactgacactgaccctgtgcctcattcttattctcaatctgctgctttacaaccaccgggcgcagcagctgtatacagagcagctgaagaaggataactatcatactgcacttcagatatcacgggagtttgatgcttccatggatctcatgcgtaccgcctgctggaacatggtgcacaataaccgggaattcatccgcatcgtagaaacctatgacaattcctttgagcacaaaacggctctcatgtcctatctttcctccatgctgcccatcaatgaatactttgattccatctatctttatctgcccggttaccagacggttctgtctacagccatgggcgccatgccgtttgaacgttttttcgatccctcccccatcacccatatgctttcccaggacaaaaggacaagtctgcgcaccctgtacagccgttccaatagccatgtactcggcgggcagaacatttcctccatcgtcatgaaggttccctcttctgacggctatggccagagctgcctcgtggttaatatcaatttctccagagtcgtatcagaggaactggtccgcaaatactgtgtatccggcagtgaacatctgtccatatttgacagccagggttcacgcatctggggggaggggacacggccatcttccggcgaaggcaccgtcattttcgataagacggttgtgacaacactcgtcagtgaaatcacagggctcatctacctgtttgaaactccggctccctccgttctcttcgccggccttgacatctattacatcctgtttgtagccaccctgtttctggccgcgctcatcattatcctgtacgcctttctccgcctgtttcgtccgctccggaggatcctttcctctatcatttcagcagaaccggctcatacagaggagtttgaggccctcgataactatatcggacgcatgaagatagaaaatcagacgatgaaggcccatttaaaggaggcacttcccatctatcggaattaccttttgacagaactcatcactcttccggactggtctctggacgagatgatggaaaaactgcgctgccagaatatcagtctaaagcttgaaaactatattgtaatgactctgaaacctgcattcagccaacatacggaggatgaaaaatggcaggtcaaattaaagactctgtccatcttaagccagttgttctcagactctgccaccggcttctgtgccgaaacagaaaaggacgcaatcaccattgcactccatttacccggagacgcggatgaagagtcgaaaataggtgatgctgcggcattcgccgaaaacctttgccgcggtattctccagcagacgaatgttcagaccaatatcggcatcggccgttttgtcccaaccattcagcagctgtataaaagttatgccgattcggtcactgcgctgaatttcgtcgccacattcgactctcccgtcatcaacatctaccagattcagaaaaatgtgggaagcgccttcgaatatccctatgaaaaggaacggcgtttcactcatttggtaagtcttgggctgtacgaagaaagtcttgaggcgcttcatgccattttttccgagctgaagcagtaccaccatttaaaaaaacaggagatcacctttgtcttttttcagcttctttccagcctctataacgtaatatatgaaaataagctggacatcggagatttcccgatctcgaagatgcccgcaccgtatatggatggaatctatgatctggataagattgaagcagaacttaaagatatgacaggcagaatcatcagctctgcagaacgcctgtcctctgcctcagatgaccaggaaatcattacctacttaaatgaacatttcacagaaaatattcagatggtggatttaactgaacatttccactataaccgtttttatatcagccagattatcaaggaaaggactggttataatttcaatgattatataaaccggaagaagatagaactatcccggaagcttctggaagaaaccagcctttccatcaaggaaattgcggaacagacagggttcagctactcttattacttctcaaaaatatttaaaaagtatgaagacatgacaccgggagaataccgggaatcaaggaagaacagcggttaagcaaaaacagagaccgcagaccatatgatttgacacatggctgcggtctctgcctctgttttcctagaaaaatgctctcgccgcggtcgtaaataagaaacacacgacaattcccgtaaccgttggtaccaggaaggaagcaatcgtccatttcacactctgtgtctcttttttgattgtcagacacgtcgtggagcagggccagtgcatcagggagaacagcatggtgctgaccgccgtgctccaggtccagccatggctcaccagcaagtcccggagtaccgatagatcgctgatatccagcaggcttccctcagccagataagccataatgatgatcggcaccacgatctcattagccggaaagccgagaataaatgccagcagtatgacgccgtccattccaatcacccgggcaaagggatctaagaatccggagcagtgtgccagaagcgttgcatcccccacagagatgttcgccatcagccagataataagtcctgccggtgccgccaccgcgatggcacggcccagtacgaataaggttctgtcgaaaatggagcggacgataacctttccaatctgcggcttccggtatggcggcaattccagcgtgaaggaggagggcacgccctttaacacggttgcggataaaatctttgaaatcagaagcgtcatgagcacgccgagcacgatgactcccgccaggattgcagcggacagaacggaggaaaatgccccggcggcacttcccacgaaaaacatggtgatgatggcaatcatggtcgggaaacggccattgcatgggacaaagttgttcgtaatcatggcgatcagacgttccctcggtgagtcgatgatgcggcagccaatgatcccggcggcattgcagccaaagcccatgcacatggtcaatgcctgttttccgcaggcggcacagcgtttgaaacaccggtccaggttaaacgcaactctaggaagataaccgaagtcctccagcagcgtaaacagcgggaaaaagattgccattggcggcagcataactgaaataacccaggccagcacgcggtaaacgccgtggacgagaagatcatttaagacaacaggcatgccggcggtaagaaacagatcgctgatccggtcctccagccagaacaggccgctgcttaacagttccgacggatagttggctcctgtgatcgtcagccagaaaactcccagaagaatcagaaacataatggggaatcctgtggccttgcttgtaaacagacggtccaggaggcgatccttcttgtcatacgtctgattttcaaatacaaccgcgccccggcagagaaattctgcttttcgtataaagacggacgccatatcatcgctcacctgtttctgcgagatgccgcgttcctgccattcctcccggatttccatcagaagtgaggagacttcctccgattctgccaccggtgtgagatatttgcggacggcctccatcagattttcattggaatccaggagacgggcacagagccagcggatattgactccttcaccggctgtcttctttaccgccggggtaagccgggcgatagccgcctcaatgtattccggataccggataagaatccgcggcgccggattttccgcaaatcgtctgtctacggatttttctgcttctacggcttcttctgcctctgcggcttcctttgtctctgcagcttcttctgcctctacctcttccgcttccaccatctctcttttcagttccagcacacggttaagcccttcgtagatctgctccagccctttcccgcttctggccgcggtaccgatgacgggaactcccagccgctcctccaggatatcgaaccggatcgtaatggatttcttctttgcttcatccataaggttgacgcagacaaccgcccgcctgttggcctctaagatctgaagcaccaggtttaagtttcgttccagacaggtggcgtcacagacgacgatgaccgcatccggattttcaaaacagataaaatcccttgccacctcttcctctgtagaatgggccatcagagagtaacagccggggatatccaccataacgtagccctgctctccgtcacttgcgtaaccctgggcgttggccacggtcttgccgggccagtttccggtcggttaatattaattaccggtaaaatataatcataagggaaagaaggagaaaagatgaaccgaacagatgaattattttttgagataattgagacctaccagcgccatgcccagatggctaaaaatgcaaaataccaggagactcgcgagatggcgaaaatggtaatcgatgtggatatatcagctatgtggtttttaactcagcgatcgccagataccaaatgccggttgatgtaacgtagtaagatacgcatataaaagtcgcccgggtatatgggggaaatatacctagacgaccgcaaagaagagctgctgggaaaatcatatcacttttttctcaataaatcaacgcttttttactctactctgctaaatttatgcagttatgtatacaaaaaatgcggcctgccaatatagctaagccgcaagttagaaaagcaaaacgcaattattatagcgcgtatatatcattttagatgtagcctactactggtcacctatacatgaattacgcacaaaaaccgcccagtgtatggggatactgagcggctttgcatgaatactcttctgatacgccagaaaaatatatgaaataatacgagcgaatttattatatcatttctgtgatctcctggcaagaggtgtgttaaaaaaatcgacggtcgtgaagcccccttagaagtaaggagtcccaaacagaccgcctatattatgccgagaaggcagggcggagccatggggcgctgccgccgttattgttcaccacaagccttcaaaaataattttattaattctaaggcatattttttcttatgaatactacaattgctcaaagcatctataagcgcttgttgctcttcttcaccattaaaggtggggaaatttttctcattatttccgaagattaaatagtctatagatgtatgaagacattctgcaatactaagtattgtatcaatcgacattccacatgtccctcgctcgatatcttgatagtacttataagaccgttcaatcttctcagccacttcttcctgggtcaatcccattattatccgttgtctcctaattctttttcccaccatcatcggatcatatcttttcaactattttccctcttttacagtaaagcataaaatactgattacaatttatatatcaaagcacagtagtagtatggcttcaattacaaattctataacataatagccatatctttaaacgaatcacgtaggatttttcatttcgccatcaaccacgcaatccctgcacggatcagcgcttaatagatcatcaaggtgtaccatatgttcgattttgggttgacattttagtatacatggcatatactaaaagtgcagatagagatatgctgtatacctgcataaccgaattaacgtttaagcgacatgtaatgtcgtcggccgcagggaccgccatttggcggttatcattccttatcatatttagatcaacagatcccatcaagcctcttaaccaatgcgtaacacgatgggcctgaccccggagcaatccggggttttatatttcgatattattgcccttatatgaagtaaggcggcccactcggaccgcccttattatattactcgacgtgctgtacctcaagattgccctggccgagattcttcgtgaccaacagcgccccatacgttgccatatccgcttttgacggattaagcatataggccatgccgccaatgaccgcataccccgtgaccatattcccggcatcgtccacataaaaccacttattcttatattttacccagcgcgctttctggagttcgccattaaccgtaaagtgccagttccctgcaccgtcttcaaaactcttcacttcatcttcctggccgcggatccgcaggcagaagtccgtccataactccggattgtccatcatcttacgagggcaccatttgcgtttggcgtcgtaatgccggatcacccgatcggcagggatccccgtctcctggatcagatgtttcaccaaatccacacagttaagccgggccttgtcgtagttgctgtcaggattaacgcatatttcaatgttgatcgtattgttattgttgactccggccaccagcggcgtaccgtactgcttccctaccgcccatgctccgtccgtgtggttgagtgtctggtagatcgccacatcgtcaacataataatgaaccgatgtagacagatttccgttgttgtgtgccctggaatgcgctgcagcacctgctccgcggttaaaattgtccgtctcatggattacgatgtactttgggtgattctgacttgcatagcaattgatctgcttgatctgtttcgtaataggtatcataaatcctccttaaagaaaagggcccagaatcccaggccctaaaaagttgtgatattgcaaccgttgcgatctagcaacagctccagcgctcaccctgccggccgggagataagcggatcacctccttaagcggctccactgtccaattccggcaatcctgctaccgaggtaagcaacgacagcaccccggccagtaccgacgcactgattaccatagggacatttacatcaccaagcacagcagctgtgccgatcgttgcgactgcggtctgcgccatggtcttgactgccctaattcctgcggccttaatccatctctttgttttctcactcatatcaaaatcctcctctacttaataaatacaaaataccagccgccacccctgttccgatggagctggtaattgatgtaaaaaatgtttttttagtattcgaccattgctttgccggttctttttccaaaatttctactttgtcttttaattctgacacattctcatttgtatatttcacctcaccaatcaactccaccatagtcttagacattgtatggatctcattgataaccggcttcagatcatctatctggtgagtattactctttgatcgctcttcgacttttgtcaaacgctcaatgaactccgtttcaatcacatatggcaccgtcctttcaaaataatttatatcgcggcctctcctcaccccaccaccagtaccgcagccagtcgtccaggacgattccagccaagcttaccggcagccacagaaggcaatactgcgggcagatctggccgagtatattaccagacagcccgctgtaatcccagatattccagcccaaccacaggttgactatgcagccggtcaggaactccagaacggttatggtggccatgccgatcaggatctgcttccacagcgccatgctccatggcaggatctcattgatcagccccaggcagataaagcaagtcccacccagaagaaacatggtccagtggctccgaccacgccagacaagctccagagccacatacaacagaccgccggtagccatcaacaccaggtacttacgcaggatcagcgccatctgcattacctcccgcaattgcagcgatctgcgtcaagtatgactgcagcacctctgactggtatgccggcgggacatctgcaccgtaaaaaatggcctggacctcttccacagtctgacagccggagatccacatattaatcgcgttacagtaggtcgtatggtaacttacgtgccacatggctgcagtaatgatagcctgcatatcttccgcgctgtaaaaacggcacggctggccgtctgcatgatactcaatttgagcagcaccagaggttacctggatctgtttgccgaagagattcagctggtcctcgatcgtcaacgcgaaatgatcgcttgtgccgtctgataacggaacattaatgccctgatagatgatctgctgacaagcttcggatatctcccggcgtttcgctgcctgcagctcctccagtgttggaatatatggctccggcggttctcccggtccctctggcgtctctggtgctgtgtagacgcttccatcgttagacagatacacagtctggccctcatcacgatacactgtgtcataacctgtcaaagtagttgcttccgtgccatcgtccgtatagatggtgatatccccccatacagatggcatggtatcaggaaatacaagctgcatgacattttccgataccggacggatcgattcgatctcaaaaagagtctcctgatttccaattctgattttttccataatttattacttcctttcttgattttttgtatataaaaaggcccaatgtgggcctgaattttccatttttatggtgttgactaaatgatatagtgatttagctgaacaaactcgatagtgcgaaattgcgtacaatggtatggaagattgggactggcactgatcattacggcgaaatggaggtaagataacgggcaagcaagcagttttgccaacataacgatgcaatcaaaatcgtcgctggaattagtataataatggatgtcaatctgcgtaaggtatacccaaaacaacaagggaaattaataactccttagctcaataccagcagtgacacggtaaaccagaatgatcaaagcaaaattattcggatggcaagttgatttgacaattaataccttgttaatcaatatagctgcaattgtattagtttgcaacataaaacttgccatccgcgtacgaatagcaattcttagttacggtattaccatcaatgtcgtcagcacattggcctttttactgggtataccttacgcaattacgctcgtatgcaaattccagaagcaattcttgcggcacgttagcttaaaactcaagatatctttaaattttgccaaatgatcttgccagtgaattggcgtatcgttatatttgtgtctcgcaagattgccacagctaaatcactatatcattcagtgctcatatcaccttcattttgcccgtttcccgcgcttgcatggccatcagggtaaacttaatagagcgaccccaaaagcccgcttaaatcagcatataatatacagtttttaagcgtattttctatgcgatgcctggacgctttcggtcttaacggtacaatagatcattgtcgtgtctagcttctcgtgtcccaggaactccttgacctgctcgatcggcattccacgggataaaagatccgttgcgatcgtccgacggaatcgatgtgggtgcactccctcaactccggctctccgccccaactggcggagcatatactgtaccccggctaccgtcaggcggccatgcggccggtccagcgtcgcgaacaacggccggccctgtaactcctccatggtcattccttcattttcacagcgcgtcctaagatatcggcgcagatagaacttagctccatctgtcaaatatgtctttctctccttgctacccttaccatatacaataagttcttgtttccccatctcaatatctcccacgttaagcgataccagttccgaaaccctgacgccggtactatatagaaattctaccagcgctcgatcccgcagctcgctgcagctggtccgcagcgcttccatctctgctgccgagaacggctttttgattgtcttctcgatctttaatagacctacctttttaactggattgctgctcaccagatcctctgtgatcataaagtcccagaagctggacaggtaatggagccgtgtctgcatcgttgacatcttaatccctcggcgctccctcatcacaccgtaataataccgcagatccatgccggtgatatcctccaagcgcttccccaggaaatccagcatattgcagatctcccgggtgtactgctttaacgtattggtctgccgattcaccgcctttttcgaagccacaaacattcggatcttagcctcgtcgccgtcttccccgctggccgtcagctccgtgcactgctcctggacttccatgccgtggaaattgacgtacagtacattgcttaagtgctccagctgatcctggctgagatgcggtgccatctcattgactacattttcgagtatcttctctaccatataaataagccctccttcactgatcattgtaaagggtagggccttatatcgtccaccgatcatgttcgttactaagtaaaatagtgatttagctgaatcaaacattgataacgtagcgctataattgctcactggaatatctgattgggaatgtaaaaatacaatacgttggagtttagtaaattttaacgggcaagcaagcatcgttttctgaattttatacatcgcaatgaaaacctttatcattgcaaggcagtacccatgtccggaatcatatgcagacgaattactaacagcggtaataccgtaactaaattagctcttttgctcgacagcatgacaatttgaccgtaccagaattggcaaagtatatggatgcagtatattgcaacaatcggtacgtaattgataattaatcgaataccattgcattaacatagataccctttagccggtaccgctttattaattcttagccgtactggtattgtccgccagaagcatctgcttttttgaggatataatactcattacgcagtgatgacaaattagcttgctaaaccgtatttaatgccaggacaagatatatcataataatcagatccagtaccagtgaattgaggtcatgttatatttggcatgtgttgatatcagccttgccacagctaaatcactatttaactgagtgtaaaggtccatcaaagccttgccctgggctgctgaaagtggtaatttggcattattggtcacgcagttgtttacgatctggccgatcagacacgcgcccttaaacgctgctttcacgttacttactattgtggacaacttccctttacttttgatgttattgattgctgtagcagcatctgggaccgtcgtactcccagagtaatcttcaaaagtcggtgtatccaggtctttcaatgcagcatctgctttatcccagttattgttctgatcctgaactgagtagaaatcgctctcatctggtttcttgaaattataatttgtcgtattagttgccattcggtaactctcctttcgataattcattgtgtgtcagctgtgccagctcggcatgctgataggcttgcagttcctgaattctatttttaaggtgtccgccacggatccgctcatgcgtatacgccgccagttctgcatgtgtaaaagttccaactgcgccataggtgttaaaaatgtactcgtacagcaccttcaaatgagctggtactgcctcttctatcgtctgtttgatatctgacatattcccgggtataccagatgtacccgtgaaacagacagtgattgtatacgaaggaaaattctccacgatatcaacagctgcgcttgtgaagctttccgcaatgttctgaatcagcgaagcagttgttgtcccagctccggatatcttcgccttaatgcgttcctgacgataccggtcggatttagcggcgtcagggaccaggcccagtaatcgttcgtatcgggcaagcgtatccgaagctgatcccacaaaacagttatcgatggtcttatacatttctgtgtcaaggctatctgactgttctgacagaatactttgcagcgtcttcatcgtctcattgttttcataatagaccggaagcagtttaattaattccatagatcctcacctccgaaaaatctacagttcctataaccggaatggctttatcagtaataattacatttgccatggaaccattcaacgttaggttatcataatcctgtacgccttccgtggccaggagcaggctcccgatccgggcataactcacacgataatccgtaaataccagtccttttaggtacgtgtttagagatacccggaatgcctgcagcacatcatctttggctttgctgccgtccagggtaacatcagccacgacgttgacagccatggaagacgggctgtcgatcgtgacattcgctccgatggggcggaccatttccatataagccgatactgcgctttccagagatgtgtctatatttttatcgttgtccacaattaggactgtcacggtaccaggaccactggccagtggaaataccctggcatctccgacacctggcacatctaaagcccataacttatagtggtatgcatttcctgacgtggctggcagctgcactttttgcaggaatctctcccgcagggccccgtccgtctcctcgtcagctcctgctgatatgatgtcagtcagttccgcggtcactcccgttatatttgatatcggctgcacggatcccgaatactggtttccaatgtcacccgaagtttcgcactgagcctcgtactccgtaccagacgccagttcccttgtgacagtatagaccagggagttcagcccccagcggctgccgatcggaactgctcctgttgttatcatttttcgcactgcagcgctggcaggtttcctcgttacaccgaatgcagctactgccctgtcaagatactcgccgactgcggtatccggaaagaccagatccagatagttttccaattggaaattctgctgtgccaaaaagtaagcacacggcgccagagcgtcatatatgatgcttccctccctcttatccacgttactcggtactctgcccagcatggcctgtaacagctcctcatatgtcatacgggtacctccatttctatttcgatatctccataaatactgaagacattaaaagagcactggcacgtgtccccagtaaaagaaaagctgaatccatcaacctcctgtatcctgtcgtcacgcaacagtgcttcccgtatcattctcttcatttctgcccgtacatagggctgctcctctccgatcagctctttccatgcaataccataactgaaactgtatatggggtactcatactgatcggtatcaagtaccttataaatagcctgttttaatgcttcctgatcgtctacatacccttctatcttacagggcgatactttataagtctttccttcaaaagtccgttcctggagtactatgccggttgtaagtttcatgttaacctcctgtctgatatggcttcccgatgatttccagaatatagtattcccggccgccgtcgttgcgaagaagcctgactttatcaccggcagctatcttcgataccatattcccggttatcatgctcatggggatcggaaggttcccgaccataacggaattccctttgtactccccgattactaccgcagccaccttccggttgttcagataattgtttactatcgtttttatgacattaaacagttcgttcgctccattcctgtcattcaccggccatcacctcaactttcatcgtgtgaaccggcagaaaatcgtgggtaacctttttcacgatcagcctatggcccagtccaatctcatctatgcttccatagatgctgtttccggcacgcacccggagatctcccaggcattccaacttcagactctccttttcatggttgtacagcttcaggagattattggcgcgctcctgggcttttgcagcattgtcgatcccggaagccgacgtctcaaaatactggagcagcccgtaccggtttatggattcctgatcggctgcggcacctacatccattttcttgctttcctcatctttccagcctaccttgatccggttataaaaatcatcatcaatagacttctcccagctgtaaccggtgcacaagctccggtctcccagtacaagaggaagctgtaggttccgcatattccagaggcatatggatccatactcatcacggacgcagtacatttcctgcgttgcgatcagcgtatcggagatggcctgcgtcacttcatcgagccaggtcttgtctgaatcggcgattgtcggcaatacataacccagatcctccatggtgcccggcttcaaagacaagaaggtacacatattctgaaccaggttcttcagcgtcccgttttccagcacaatgatctccttcgctttcgcataccgcagctggtcataggctttaaccttaataattccagattcgtcgccggataccttaaaaacagttccaaaaaagatgccatcggcctgatcgttatcagtcaggcgaacgacatctccgttttgtaatattagaccatcattgatatacgagatgtccatgctgctggatccatcattcagcgcatcggaccacgatatctctgtacacatgcccgatatatcgtaaatatatcctcctgtttcgactaatacttccatatacacctcctatgatgggatagtgaatacctggcccggatagatcaggtttggattcttaatatctggattggctgacatgatcttcggatattgggatccattgccataatacttcttagctatcccccacagcgtatctcctgactgtactgtgtgtgttttatttgcagttaccgcaggattctcagcaaggggcgtttcctcctgctttaccgtaacatcaggagcctggacagctacatacctttttccggcccctttatactccatgagtgtcaatgatatatacttatccccttcttctcctgctttttccactacctctacactctttaccagtaccttgacgctgatatcatctgaaatatcattcgatgcaatgaaccggatcggcttcttattcttctgagccttccggaacatcttctcgtaataatctgcatcggcttctgtaccggattccatgtagctgacattgtgtcccgggaactcagcctcaaagctgaactcctccaaagcacagtaggaagggatagaaacctgcccttcctccaacacctgatacgtttcgatattaagttctcttgatctcttaatctcctccggattgaccggaagcttatatttcttgctgccatatttgaaatataccgagtatgacattaagtcggcaccccctctggagcagttgcaatcatttctttgagctgttcagatacatgactcatgatgttgtcggtatctacctctttggtaatcggaccgctgaattctaccttaatatttggcgcaagtgtattttgggagatgcgggcaatataatcgcgctctgcaagcctgcgcatccattcgatatcctcttcattctcgaccttcaccgcgccaccttttccggtccctttcacagttgctggattaccggcagtagcaaactggctgtagtcgataccacctgcattagggtcaatttccaaagcacttccaaaatcccatttgtcaatgaaatccccaacaccctttcctttttctccccatgcttctgctgtggcggcgatatctttcgtatccatccgcatatcgtccaaagatacataatcatcagctttaaagctgtctccccatgactttagtttagttgaaaatcctccgactgctcccgccaaattagaaccgaatactccgtcgattgccgttgcaatatccttgataatggtaagaacgctagtagccattccgataaataaattaacgattgcctgtataggatggtgaaatacatttgccaaaaattcagcaaatgatatgaataaattccacaggctggatataatgttataccctgttccgtaaaatgctccaagtaatccaccgataaagctaaatatatccgcaaaggttactccagtagatgtcagggctaaaacaatagcccccagagtagcgataatcaaaatcaacggccagtgtgccgcaagagtagctccagctgctacaagcatctgcccagcccataagcctgccataataatagcaaccgcaaaaaaagtccttacgatgggatctcctcgaataaatgcatcaatcagccagttggctccctctgcaatcgccgcaataccttcattcaatgcagccagaagtgtctgcgctccactgctattcagcagggtatttagcttttccattgtggggccgaaagcctccaatgcgttatttgccataagctgcccgacatcggcaaaagtcattggcatttctgcaaatttgtcattaatatcgtcagcagccgtaaacattgcattcttaataatatcggctgtgataagtccatcagaagacaattccttcagttcacctttactttttcccatatacttagcaattgcatcagcaaccataggcgcattttccataacagatcggaactcatcaccctgcagcttaccggccgccatagcctgtgtcaactgtaaaaatgcagattgctgctccgacgttccggctcctgatactttcaacgatttttgcagaagttcagtaaaaccgatagcttcgtcatttgatgtaaaactatctccggcaaggagattcattttggcaactgctccggccatgtctgtataactgcctcgtgaccggtttgcggcatcgaaaaccttatcctgcaattctgctggagtctgattgtcatcattaaccattcttaatctggccgctgcattggtataatcgtctaccaagtccatacctttcttcacagccgccaaactgaccactgttccaattaaagtttttaaactgccgttcgccttattggctttcctttccgtatcagaaagagaattgttaaactttgtcattttaggagaggcagcctcggatccatttcccgcctttgtaaccgagtcatttaccttatcggcagcctttgatgctttaagcattttatcagtcgcggcattcgtcttgttcatcattttattaatctgcgagctatacccatccataagacggaacatagcgcttaatgtcggcataatccacctcctatttcatctggctggcaagtcttttctcttcttctattcgaagatctatacttgcgtatacgacagctttttccttttgactcatagcttctaagacagttggcaaaatgtgaagtttctgcagggcaaagtgagtataattcatctcaacatcaccctgctttatcagttttttgcctcgtcaatatcttcgttgatatccttatccaagccagataatccctgtacagcctccattagtgttgcaaactccccaacatagagcatggctacaagagtcttgtcagcacctaaagtgccatatgctctctgtaattctgaattttccagatcaggttccacgaccgccgccgcaaccaaattctggttatatgatactttatcaaaatactcattcccttttttatctttttttgtatatttccggagcagtccatcattttcctgctgagtgattgggcggatcacgaatggaaccggttttccattttctttgaatcgttcagatacaatcacctctttattttccgcttgctccggatgtaaaaacgcatttaagcttcccatgtttagctctcctctcaatcaaaaagagacgctagctttgcgtctctcaactgtttaactttttccattttttccaagtcatgtttgctggaacttctatatttttacctgtttttggatctctggcgacccttatttcaccttccttgtcatcatcgtcaaaatacggaactgtcgtacagcggcacccgcggtgcagcggaggcaaattcttgcctatcacacttcccttaattttaatgacctttccgtccatgtttccacaaacggggcatgttttattatctaatgtggcaagaaacgctactttatcgaatccgtctcttaccaaaccttgaatatcgcacaaagtcatgtatctagactcaagatagtcaatttccaaatacacctctttttgtttttctttatctggacaggcccattttgatactttgtgagggtgcgctcctgttaaagcgcagtagacagcattatgcaacatttcaggatccgccttcatcgtataaaaatactgtatggtggattctgtttcttcgctcagcccttgttcaagctcctcttcccaatcaaatcctaaactgggctttccactctcaacattccatttgcaaatgatcctatatgctcctttaaagtccttgcgccttaacgccttcatggcctcctgatagcaagactcgtcactatcaacgactaccgccagatccttatgcttcaaaaaatcaaataatcccatttcaccacccccttcttaccatcaattataatagttcccgaggcaagtgtaaatgacttatctcatattctccggaaaggcataactctccaattcatccacatcatcaaacgtaaaatcagtatctacagtattcagatcttcgctggaatcgtccagataggccaccggcgcctttgccagaatacagttcctcataacaaccacccggcgtcccacagtagatgcaggatcctcattcgtggtctgaatactgatctgcggaaccttgccctctttgatatactgctgataaacagcaagcgcggcggggcttacgttgtacatagtcagtgttccttttccctctgcgcctaccaccttatgctgtgtcatacgatgccccaggagccgctttgccagcaccttaaattcgatgctggcatctactttcgatatctcgaaaaaataccggttctggccatcgattgtgataaaagcgctgccttcacttcctgtcaccagatcagtgagttttgtgtaatttcccatgtcatatcctccttacgacagattaactgtgatatatatcttctctacgctgtcaaccggctgtaccgctgcttcgattacaacagcatccgaatcatttccctttgtgaccgcaacatcgtcagtcacaaaattctgaaccgcccccatcgcctgaagtgtagtaaaatagtccaccagagacgccttcagaagagatctgccttcatcattattattgactttcccgacataattcgcttcaaagatcttcgtgatatcgttggcaatattgtcaacagtccgaatcactctgttcttcgtgaacatctttcctttgtccaccgtaaccgcagttaaggagttgatgtcatacactacagatacattctgggcagtgtctaccttaaaaatgaacttacccgcagtgacagccgcctccatctctgattttgtcattcggggtttaacgtcgatggcccccgcataaaccataccagtatttgacgtagtgatactggcaccggctgtggatcctgccacccatgcagttacctctgcagccgtcagttcctgattccccggcatgatgatgccctgaacaacattgatgatcccctcgctgtctgccacatggttcgcgagcaccgcctgacacttcacaccctcatcgtccctcatggccttgatccatgtcgcaatcgctgttttgttgacctcctctccttcaccatcatagggatagcagagagtattgaactgcacggttttaagggctgcaagggccgcagtgacatcagccgctttgtgacttgctttgagtttatataccaataccgttttagcttttttcagtgcttccgcagccagcttcttatctatcgctgtgactccgtctggccatgctgcttctgttgccgtgatcgtatacacagcgccatcagcgcccgcactcatttcctgcaggatgacaacgatcccgcggtcccctggtgtaatagacagcggctcatttgtccggatattgatataggctccgggcagtaccttgttttgggattcccatgttcccgccataacttattcctcctttacgtctgtattctgtgataccgtctgcattgccggtgttttgtcaggaagatattcccggtaatccacatcaaacagaaaatgcaagacattatccacgatttttaagcctctatttctaattttgaaatcagtcattgcaaactcccgacttaattcctcaccgacacaccagcactcttcaaatggctcatttccggattttggaaagtatgatacatctactctgaccgagtttttaagtcggccattaatacctctggaaggctcctgttcatagaaggtaaccagaaaagacggctgtgcaaagttctgcggcacatcttcaacgtacaccttgcacggcctgactgccttcaatccagcagcaatcttcttatatagtttttcaatcatgcttgctctgtaccgcctttacttctttctcgaactccatcaccagctgcttctcgatgtatcccctggttttttccagcacgaacgtacctttgacaaaaccttttgttgggcctccttttttcgttacgatgcgatggccgtaattccaatatgtggaatactctgcggtgttcaccagctccgtctccacgcctgcttttgtcttctttgtcggaagcttatgccagctttttcgcaagaatccgccaactcccggattcttaactttaaaacttacaacttttctgacgccagggccattattcacaatgaaagttactgggttggggtgatctcctacaggcgtacgccgcttcgcataggccgcaccggcgtttacagccttgttaagcaccttcttatcaatctgctggatatcctccaccatcgccataagttctttccggaactggtcaatagcagccttattcctacggtaattgctactactcatgcattatcatctctctttatttcacactgccactgataggtatacgggtggcactcccccagatcaacttcaatggtctttccggttcgcagagtgatcagcagctgatctccttcccgaatatcctcagtcagtccacaaaatagcttgtggctgttcacaattgccggatttggtgcgccggtggatacctggcccgaagaactgtaccgacagggacgcccagttgccacggctgctcttacctgctttgtgataccatctatttcaacgtctgtccatcggtacacatccattttagcgtcatacattcttgcatacgggtttcgcatatcctctcagcctcctgtgcctcctcagacctgccttatcgctctcagacaggccatagatacttgccttcgtatttccctccgtctgcgcccaggtaatgcttccatcgccttccttgatacttgcaatctctggattatatccgctgccttcagatgcctcgtactcgattattcctctcgcctttttccgtacaaagggttccagaatatccggtacgcaatccggatccaggttacagtaatcgcagactgtcagaatcagatccgagatgatcagatcatggtcttctgtacccagccgcagattttgctttactgtctgcagcatctcattactattcattttacacctccatggattcaatctgctgatgagtcatactgtgaagagctgaatggcggtattcctgaagctgtgcataagtaggaacggattctcctctcagccttaactgtccatttgtataggaagtcagttcagcattggttgaccttcccagatatccgtgcgtaacgacagatacgctcacaataagacgctctttgacggaaaccggattccggcttaactccacagcttcaatccgcaccgccatcagaccacctccatctgctcccggttcttaataacctcgtccgcaatcatcaacgtgatttccaaaatgtaaagattgctccggtacgttggctgaattttcacgtctacaaagcttccatcttcctcctgggtcacttcacagccgcctgatgcctctacttcgccattatatatcagttcataggtggcatctttaacaacaaagtattctgacttgacagaatggacgaaatactttacatgtctgtcttcgcccagaataaaacgtatcataatgccacctcctgacattttggaatcaatcgtgtaaacagatactctgtaaactgcggctccatttgatatggcgcctgaaggagctcaaacgtatactttggaagcggcagcgcgtgaatacagatatttccggcatctacggtataaagcatctttgaaagatacgtctggtttcctgcttcatcttcggccaccacctccaccacatattctccgtcagcatcaaaggggaccggcacattccaccggtcctcatctgccttctgtagtattacttctacgccatctaccaggccaaatacacgtgctactgccatggtattgcctccttagtcggtaacctccacgctgatcacataagtcttaccggcatctaccggattaggtgtgagcgttacggccttaatcgtcggggctacggtatcgagtgtcactgtcctggttacggtcgtgctcttacccgcggagtctgtcgccacaactgtgattgtgttaccgccagataccaacgtcagagctttgctgaaggaaccatcggcccctaccgtcacggcctctgctgatccgctgttaagcttaaccgtcacggttaccgggctggacgtgatgtcattggtcgtaccggttacagtgcaggctgccttattcgtaatcaaaccatttaccggagccgtgacagacagtgtcggcggtactgtatcgatcttaaaggtgacactcttctgagtagctgcattcccgtcattatctgccgcatcgatcttaattgtgtggctgccatctgccaaggctgtagtcggtgtataggtacaatcatatccaccagtgatggccgtctttgtaatggcgctgcctgtaaccttgctgccgctgtcaatggtaataccgatcgtatctggattgacgccagagtcgttatctgtaaccttccagcgaatcgctggcttattattgatgatcagtgcactggccgtcggatatgtgattgtaatagctggggccgtcttctcctttacgtggagctgcaggctgcttccgagtgtggcatctgtgtcattttttgtggtcacattcccggcctcgtccgtggccttgatcgtcactggaaaataatgcccgtcgttattgttataagacgacgtggccggcgctgtaattgtggcctcatatttcttcgaggtactgttataggtcagtgtggttgtaacaccgttaattacggcctgtactgtcttaactgccatatgtcagacctccttatccgatcttatgcttaaacgcaacgatcctgatctgcttcggctcatagactctttcatagttgatggcattcatcagttccgccttcgtcggagtctctacatgctctctggcaaggtcagtccatttgatcccacgtgcatgcatgatgaacgtcttacggttaatcaggtaatctacaccggatcccttcttcttgtctcgatctacttcagtagcaacaaagccgacgggagaaccatttccgaatgcaattgccccctggccaaacaaataggtggtatatacgccatctgcgaccggacagccatcatccacaattacccggcgcccctggtaggtatcaaactcaacatccgtagaatcccgttctgtgtcgatcaggttatttttcttcagaaaagcctttgtggcgctgtgcatggccacagccgtcagctgtccctgtgcatcgccgagcagctgcaaagcatcaataaaagcgctggcactgatcttctgggccgcggcggaacccgctgccgaaatgtccaggatatggtctgcaagcggtgttttggtctctgctggttctgttgcagtctgatagctgccgaacactccggaaagcacctggatcagaatcttctggtactctctcgcccaataccccgctaccagatcaccaatggcggccatcgggtcactgccggcaagcgcagccgataaatctgtggcggcccacatattagccctgcggactgtcgtagatacatctttgttagacgtgatcttctttgcagtcagatcctgatcctcgataatgtcctcagaatctccgctcagatcctcgaaaaatggcatctggtggatcggcgctgcttcactggccagacggtcaaactctgcattatttgttataattccgctctggaagagtgcggataactccatagtccggttcacgacataaggcgtgaaaagctccggtacgataacatctgataatcttgttactggcatttaatcacctattccctttcttatacgttgatggttactccggccgcggccgccagggcctgggcctgtttcggattctctttcaacagcatcccctgttctgtcaggttaaagctgtcttttgcaaatggattcttagccggaggagtccccccgccggccggtctatagtctgcccccggctccgtcttaaacagatggggagaggactccttcaggggcttcacgacatcatcaatcccgaccggcttcccgtccttgtcgaaggtaaacttgtcgagccctccctgcttatagataatataatcggcatcaaccacacctgcctctttcaacttatccttcagggcgtattcctttaccgtgttggccgaagcgacctccaaggctgtcaccttctccttgtactccttgacctgcttctgaagctcctcgttgtccgagttgtcttttttcagcgtctcgatcgttgtatttgcttccttcaacttcccgttgatctcgtcgaaacgttccttcggtacaaaaccttttacagattcgttccatgcgtctaccgcgatctgtgcgtgctcctctgataatccctttgctactaactcttctttcttcatgatcccttgctcctttcgattcatcttcacttgttatcccggtcgtgtccggtgatgtctccctctttaccgcctgggataccaggaaggcgaaaaaaaataacacccaggatagtcccgcgtgcttatacctctgttatagtctgtatttctcttgccctaataaaaacggctttcccctctggcgtattgcatatagcgaatccaggctcctcacaaacatcattagcccacacggctaaatcatctggacttttttcagtctcaaccgtgatttccctgtcccctgacaatccaattttgtataacataatctccctccaatcctgcatgctgttgtttatcaatcttctgtatactccccccaggcctacgatgtccctcttcctgcacgccaggcgcaaaccactcttgcaggttatcacaatatactcattttgccctagtacttcattatccagaatcgccatcatttcttcaaaggaattatctaccagcaaggtatatccattggacatgaaaatctcaagtctcttggtttcggaatacattcttgttctatgcctcctttataaatcgcgttttccactctttatatgtcatatctgccggaacatccacatacttcccagttctagggtccctggccacacgggtcatgtccgtcaaatccatatcgtcatagtatggcacatctgtacatcggcaaaaacaatggaatggtggcatgttctccccggtaatctctttccccacttcgtagacctcaccatctttatccccacagatatcacaggtcttactgtccagcgtagccagaatctgatatttctccacaccgtcctctttataccccgcatgggtggcctcgctcatcaggaacgaactctctgtatggagcagccggtaagcatcgaactttttagcattcatctttttggcaaagtcattggtcagggcctgtggactctgcccttggaccatcatggttgtgagcgattccatgagttgggtctgaagatgatccttctgcttccagagccggctggaaaaactggcgccgttgaaagggtactccagcagcttctccaccgcgtgtggatctacctgggcgaatgcagcgtgaaagccatggtactgatcgacgctataccatgttcggtaataggtatccttatagacctccttcatggtctgctctgccgcagcctggtagtcaaccgcatacaactgacggagcatagcgtcaacctgggtctccaatgcctggtatcgggtgattctcgctttaatagacatgttattgacagtctgattatgctttccgatgttttccatggccaaatcgatgaagtctctcagattgccgatttctgccttagataactggcgctgtgccgctgcataggacagtccattctcctctgcgtattcgaagtagaaagattctattgtcttctgcagctcacggcgtgtctggttgaaagccttctccagcttcgcataatattggttaacctgcatctctccggctttgtacatggcctcttgccgtgtcttccaatagcccattactcatcaccgcccttgccacctggggccttttcgtccggatccgcaggagggaacatctcggagatctcccggtgggcctctgtttctacttccttctgcttattgaggatatccatttctttttccggatcctcgacccacgggtgttttgatacgatagtctcatcagagatcactccccttgactgctgggcaatttgggagagctccagatcattcttgacactggtacgtgtccatgtctgaacgattgtgtcgtctttgatcttgatattcagtaaccggcagacgcaccggataaaccggccaaagcccagtttaaattctgtctccatcaggcctgatttaagctctaggagggaatataaaaagcccagggccacgcctgagctgttaccaaaattctgtgggtccggatcgatgccctgcccctgttcaaaaatacatttccgggtcgtagccagcagctccttgcgggcctccaccggcagctcaatcgttagggtggaaactcccgacttgtcctccccgccttcattctcgatctgaattgctttgtagtccttcagttcccggaggaactggcccagatcgtcgccaccatagttggtaagcacaaaaataacttcctgaatatcttctaggtcattgacgaaaccgctgaacaccttgcagtacacgtcgatcagtggcttgatgttgtccagatcgcccgtgtcaatgttgttgttgaagaatgggaagaaaggaacctcaccgacatcatgcttaaactcgttaaccaggttgctgtttcctgccgtgtcgatcagtgtaaacgaattgtacggcatcagcccggtgtcaattacgcccccagcttcaattgcgtacgcctgacagatcgtatcattccagtattcgtagacgtccagttcttgtccgtcgtctgtgatatcgtgatagcagcgtaatgctcctttaagctctctctccagattattactccacactggaatcacctgtcctgatggcactatggcatacttatactgcccgctcgctttgtccttccataggtgtagccatgccacagaagcgttggaagcctctacacagagatccttgcaagtcttagcatacttatcccccagaaatgccgtcaatgctttattagatgctttatcacccagatcgaacaaaggtggtgccgtaaacatataggacgccttctgattgactaggagaccgtggaagttgagggggatcctgttatctgcattccgcagcgggttctccccttgctctgcttctcttttcttaagcggctccagcaagatatccgtctgattccggtaataccgatccgcagtatcggcctcggcaagaaaagcaccatgccccgccgtatacttcttaatcaatttttttacaacttccatttccatttttctcacctctatttcataattcgtatccctgttcgattcttaattatgctcatgcagaaataccgcagagcatctaatgcatggtcgtgttcctttactggtttatcctctccgcgctccccggctttcgcatcccagatgtaggaagcaaattccttaatcaggttgtcacaggaggaatcaataaaaatggaaccctgaagcagcagcgtggccacgaaccggattccgtccaaaacatcattttttgctttttttactttataaccgtccttctccagctgagccttaaagctggcagctgccggatccagaataactgccttaattgcaataccgtcaagccaggctgtcaggtcatcggagaactccttatccgtcttctgcctccccttgtcgcggcctgagtagtaatattcccgccggcagtaccatttcttatcggcagccttattccacaacaagaaggccgtagggttctgggttccgtaatcgcagctgacgtaccgctcatctgtccagaaatcatgtcctgtctttgtcttataggacaccgccagcgcttctgtgtccgttgcatttcgggcaaggtcgaacatatcatagataatgccctcggccattgcccacaggcccatgatataccgcttgaagaataccccggtatacatactgcggtatctggccttaatctcctccgataaactcagattgtcttccatcgtaaaatggacatacagcaatttcttgagcgccggatcagcccctgtcttagctgcgtcttcccggatttttgccactttttccttaccaagataaccgacggccttatcaatccagttgaccttgaaccagtgatatgggccgtccggattgcagttaaaccagtacttcgaaccagtaaccgagcaccggccggttgcctggttgacaaaggactccggcatcagggccacctcatcgcagaagaggccggccagtgtgataccctgaatcaggtcctggctgcgttcgtccttgccaccaaagatataaaagtagttcgttatctggccgcggctgatttccaccagattgtcagcccgatgatctgatatccgatatccacgactttttagcatcagtttcagccaaaagagaacgttacgccggaaggaaccaatagtcttgccgcacatggcaaagttctgaccgttatatgtgctcatcgcccagaatataaaggacagggacatgcagacggttttacccgaccggatagcgccatcggcgataataccgtcataatccttcaccgggctgtcaggcagccaccaggtaagaatctgtttctgtctctgtgaaaatggctggaacttgaaagtctgtacttttgtgagaattccccgcttttctttcagccgagccagtttctccttcatactggcaatatgctctttaattgtcatcggctcctgcctcccaaagactttcggcttctgtattcagtgctgccaggaacccatcatcttcctgccctgcttcctggcctccaattttcagagttgccagctccaccttcataagttcaatttccaggcgtgcatcatcaaaaccgaatttatgtagggactcaattgctcgttgctttcggccctggacacgggtcaatgcatcttcaatggactggatctgccccaggactgcctgatcctcttttaaatctgtccatttatctttttctgttccctttttctttttaactgtcgtgaaatcgcagtcccgcaaatcttcaattcgtttcagcatccggcgctcccggactgtcaggagctggatctcttgaaaaagtagtttctctttatctggctggatcatgccgatcagcagcctctcatcgtcttccagggtatcaaaaaagagagtttcaaactctcccgtagtgactgcattcttatttcccggcggtccggtgccgccatggccgacagcgttcctatttcctggctgtccacctttatttctatgattggtaacgttacttttcgcattaggtaacgttactttatcccattggtcctgattcttccatttccggatctgctcctctgatactcccagttccgctgctatatctttaagctgacgtttctttccacttttcagccataattcacaggctttgtccctgttcgggcttctcggccttgccatcaccaccacctctcattcgtttcgtttttgggtaaaagaaaagagacagccggggccatctcctttctcattaacttctctgttttctacgtaactcaacgtattcagccttagagagacaactaaaactatttctcataatcatcaaattctttgtgcttatctttttcaagtaaaggctggtcacaaggcaagtgcttgtcataacaccttttgcataacatcttcctgcagttttggcaagtcttaagttcattaactattatctcgtctccacacatctcacattttaaatacacgtaattccctccactcatatttttcttccatcatacaccaaaatatgtcaaaagaaaacacccatcttgcgacaggtgcttcttagggagaaacatgaattatggaggataaatcagccaccgaccggtaaaagccggcagccgtcaattgtgggaggaaatccgtttttcagatcttccagtttaaagtctaccacacttgaagcgaaaaaaacgaaattactttttatctttcaaaaaattcgttattgccattctgcaaccgtccgccgtatacttccctcccatgcgatgcgccacctgaacccaagacagctcatcaaaaaacttatatcttatcatgcgccgcattctggaatcggccaggctgtttatgtagtcgtcgacatcgttcgtcagctccaataactgcaactcaaacttagacagatttgccttgcgtttctccagcagcttcttccgccggtaataatccggaacaggaaagccggttatcgtgatactgccgtatgtcccatcaggccgcgtccccttaacggagtccgacacctgacatcggctcgtctccatctttctaatctgtttttccagctttttgatctcgtcctgcagatcctgatattccaccctcaggctgctgtactgctccagcactaccttgtccaacggctccacctcctcttaaccatgccagtttctcgatcctaacccgatcccactcctcggcccaccctggttcagtatcgtccactgcctcaatcgtataccgtcttaagaatctggccccactggccgcgtaggccgaaactcttctcagtggaatcccgataagttccgatacctcatcagcatagtactgacccagcaggacaccgcgatcatatactgcatatgttttgctaaatgccatgtttgttcctcctccagatcggctcacgcaacttcggatccggacacgctgccgtgtagcagtatgccggcttgtccatggcccatgttctttcgggcgtctggtcctttagcagatcctcgtatttccggtgctttgccatttcctctttaaggctcaatacttcgccccctatcgtcaccagaagtgtcttctgccgtttcattacctgcgctctccacctctgagtttcccgttaccatctcccgcatgtatcgatgaggcacattgcatttaattccctttgccaaaaaatctctttctgcacagcctttcatcagttcatagaaagctgaaaatgtaacttccactctgtcttctttcccaaatacatctactaatcccatttcttatcctctctttctttgttcacaaattatcagtttaactgattttttaaatattctaaattgctactctggttatagaaaaatccatatctgcatagattaaaagaaacataacaatcacatccttcggttccctggttgaatccattaaaatctgcaccaacatagaaaccacacaaaatagttgctccgactatttcaccatcattatttctgaaccaccgcttatcataaactgtatactcatcaccaaatacaatttttaaagccgcttccagttcttgcatatttctttttcccttgtaatattcaaattcccagtcgtcctcaccatgataactccagcgaggatgtcgaaaataattactcagaatttcttttcttttattaaattcggacgaaaccataagtctcctttctctgcaaaatgctaatatactcgcccattccatctttcaatagcagcttgttctgttttttcatatcccgtccctgaaaggcattcctgacactctaccatccatgtgttcaatttcacatccgttccgggaactatctgttcgtctctttcggaattatgcattgctacaacatttgtacttccacaaaacggacaaggctttaattgttccatctctatatcctttctccgacagcgacggtaaatattaatatgcctgtctctcaagccatttcaaagcatctgctaccttatccgctctatacgctacaatgtcaaagtcatcccgatacaaggctgcttctacacgtgtcagaaagcacgccagttcttcgtcagtcatctttctaatgcgatccgcgtttttcatgtgcttctccttccgaaaatgttaatatgcatggttttgcgccttgctggacgcccggcgcccactaaattcttatttccccgccacttccccacgacatcaggcaatgcaatttttctagtgaaaccagaaactttattgtcctgccgtactcttcaaaatactaattttccggttctttaaaagaccatttattatatactccgtttctaatttcttcagtggcagaaactccgcagttatcacaagcccaatgtttgatagttataaatcccaaagtattattatcaactaaacgcatttcggattcacagtatttacattccatcggttatcccctttcaaaatcttaattttcattaattataaagatcaaatatactaatctgcccctccatatcgcattttctcgtgtcgaacagataatgctcccacgttcttctcattggaggatcgccggtccatgaccatgtttgctcgtatttttctgtcatttccagagccagccgcgctgcatcatgaactgtgtaaaatacctgcaacccaatatcacttaaagcataccgatacggggtcctgtaaccttccggtgaaagtccggtcagacaaatctctacgtatccgcctttataaaaaccagtcacttccatttcgcatacacaatattccagtagcggagcgggtttgtcctttacgtagtatctatgctcttttactgcgtacatcttcgtccccacttcaggttttctattcattttgctttatccccttacctcggcggccggtgtatcagttttctggaattactcgtccttccttttccaatctatcagcggcccttcccagaacaatactagtttttgtgaatcgtctcctatcttttctcttcttccaattgagagaacgtcgcaagcataatccggccacagatagatgtagctccataccttttcatgatttcggcgaagtcgtccgtagcttcctgccacattcccggctcccttgcccttccgtggtactttaggtaaaatctatacgcatcgcagaagactcccttaaccatagctgcactttcttcatctcgcttgctcataacctgcaccctgccttcctgtaatgtgcccggcgccgcttccactggttctcgcagaatgctatattatctgcataatcgtaacagactgcctcttccttcccggccgctaccctggcaatccggccaacgctctgtgtcaccacagcataatccttctttggtgttgtcatatacagccgatccagccgtggaatatcaagcccttccttcgccaggctgtagctggcaaacagataatgcttctttccttctctcatatcttcaattgcccgttccctggcacaccgcgccttcttacttgtcatgctgccatcaatcatcaccgcagctttccggcattcctccggcagcatctgcattaatgtccggagatgatccagccggtccgacaataccaggttgtaatgctgctggttatataccagatcctccacaatcagctggcagcgttccctgctcccggtcagatactgcatcaacttgctgtattccaacgttccatccgtatccaaacactcccgcgcggtaacgacgccggtatctctcttcaggatcctgacctgcatggtcttatctgctaccgcttcgtccgggacccggtagattactggtcccaacactgcgaacgtgctgcggatcaggccgtcagaccggtgtactgtagccgacagtccatacttatgccgcgctgccaagctgttcataaccttatagaacatcgtcatctgtgtgggtgttccagccagccggtggcactcatctacgattatcacgtcccatgagtactggtactgcgccagatccagcttgcagagcgtctggaccgtcgcaaaggtcatatggcttcctatgctgaccttgccggccgtaatggtccccagtgtttcccgagggaagtactgggctgcgcggtcaagtgattgattcagcagatcctgtgtgtgcgtaatccacagtgtcttgcgtcccagggaagcagccagggcaattcccatctgcgtctttccggatccacagggactctgaaggattccacagcttacctgccacattgcctccaccgccggcgtctggtaatcatacagagggatattccctgtatactgcagctttccattatccgccagatcgatgatgtattcacagtcagcaggaagcaatgcccttatctcttttccgactccaaccggcagcaccagatcgctgccatcaacccaatacagccatagatgctgcggcgtgctgcttgtccataatccccggcgggcccggttcgcatattcaggatttggtattaccagctgctctctgcaccagttatgtaattctttcggcgcgtcctttatccggatctcactcccgattattacctgcatctctgtcactccattccagccattgctccaggggcattccctgggttctgcatacggtttcattgatccgcttaaaaccagcctcctgcagttcctgcagcttcgtgtactgcaggagatatatctggcgatcagggaaccggattgcgaacattccgggagcattccccatcatgctgaacaggatcattgcattgatctgattttcctccgcccggcttaactggaaacaatccgtttcacaatttttgcagtcaaacagatacgcatggccgtctttagccgcaatcacgtcacatggctggccgtttttattatcctggaagagatgaacccagaaccagtgatccgccaggatacccgcaaactccttttcgaacctggatcctgccgttttattacttaccatagcttttctgcctccttctctacctcaatggacagccggcgcatcatctttaaatcatcttttatcctctggcggttcggcctctccgcgttccataatcgcttttcatctccggattccaacgcatctttgaattcgtttatcttcttcgcctcattgtcggcatcttccagaaggaagcccagcatttccaattttttaatcaaaattatcctccttattctccccagtccaaccatttttctggtccgtccaaccaggttttgttccgataagtatccgcaaccccttgattttacgtatggtccaaccgtccaacctaaaatccggttgcatatctatatatttttagagcaaactatatgtgttaaattttctacaaacttttttctcgcgtcacgagatatataaaactggttggactagttggactggttggactctatattaaaaagccttattttatgcgggtttcatggtccaacctatggtccaacctaaaattttatggttggacccctctccactaatcaaacggcagtgtttcttgtccatcagacactataaatccatctcgatctgtattatcatcgtcctgcggcaggataagtttgatataactggacttaattccataaacttttgtattgtgtataaacttactttgaggcgtctttttcaaataccctttatcattccacttcctgctgaccgcggtataatcaaatccattctgttccagataaccaagcagcacatcccggtttaaaatcagaatttctccatcaatcttcccccatacctcccctttattaggggaattgtctgctttaggatcctcaaatctcaccggattctttgctgcccagttaagcacggactggtaagcgcgttcagcgacatcaacttccagtgcgctctgcaggtattggcttacctgccggatccccaatggctgctcctttgggaagaacaactctgccgccagttcatcagccagtagaatacaggccattgccatcgcctgcttgtcagtcgtatccagatggcatagttgttcaaacagctcccggtatctctctgtaagtgccccctcttccgcttcctgaatgtattcaaccagtttccggccggcaaatccatagttttcctgaacaatgctgctgacatagtgcccgtcctccaccagcggtccgtcaatcgcgatctctataacgcggttcttgcttccgcctccggagtttgcttttgtaaccggctcctctccggtaaacagaaaactgtttttccaggtcctggtttcctctactccgccataggcccgcgcccgtccccggtccactccttctgttatctggtagatcagctggtcaaagtttccctgccacttgtctttgatcgtctgcagctcatcaccagcgaatgggatactgcacagaaaggctgcattccgcataatggcattgcgcgtcatgttcatggtcttaaccaggccgcccatcttcgggttgccccagatgctcatagacaccataagagccacggtcttgcaggtcccagtcgtgccccatacatgcaaaacaaaaggcaggactttcaacggctccagaagcacagaggcgaaactggccgccatcatcatacgaagagggatatttttccgaagatcagcacatagattcagccaggtctcaaaactgccagcctcttttacattcctgaaaatcgcctcataatccatatctccctcataccgaatatcatctgcataaggggtaaaggaattccccacccaccccagacgattaatggattttttaggattcagtgttaatggattcaaccccacgcagtctgatatgtaacggaccatattttttgcgttgtccgaagttacctcaataccaaactggctcagcgcatctacgatcttatttgtatttgcgcagacgctccggtctacggtaatggtctgccaggcagctgacttaaaatatgccagcgtgatccgctcctccgccgtatctacatttttcaggatctctactggcaggaccggatggctgcatgcctggtacggcaccggcatggcattcttgtcatatcggatcgtcctcactccgaaatcattcgcagtccactcgccgcatactaattccagcggctgatcggtgaattttgttttattcccggtctgcttctgacgctgtgcataatcaagcacaaatgacttataaagattgttaaattccgttacccttttaagctgccgcgcggtgttacgaagggattctatatactgggtccgctcgatattgtcctctatctcgaaaatctcataaaagatttcatctggaaatggttccgtcggcttcaatgcggatataccagtcagcaattcgtccttcgatttctccaatccttctcaccgccttcttgtcttcataaacctcttccggacactcctccaggttctgcagcagatactcaatatacgtaatgttctgcagtgcctctgtaaaatgctcatttcgctcatggatcgcctcacacagcaggatccagtacattttcacatacattatggcccgcttcttaaatacagccacagccgctctcctccggcgtgccagctccgcttcccgcttctcccggtatgtcaccggctccgccagaggaatatcaaaagcggcagccagttctttcgcggcttcatagttgctcgtatcatggtacaacgctacaaacttgatttggtcaccaccagttccacacgtaaagcagtaaaatccctttccgtccggatatattttaaggctcggattcttatcctgatggaaggggcactgacacagccccttccgattaagctgcaggccataatactccgccacttgctgcatggagaccgctttctttaccttccggaacagatccggattataacctttcattatcattaatcttcaaacctcgtatgaccgagaagtccctccattgcaaacatccagccgttctgtcctatatcatcagcacaatggattccgccctgcaggcttcctatgtcggaattatcaatcagacgcatatcaaactcatccggatccggaaaccctctccggatgagtcctgaacgataccctgggattaataacggaacttccggccttacatgaaagggatcccttcctctccggttccttccgggatattcacaaaaccgtcactgtccataaaagaagggggcgccgcggcatctgccggatttggtctaccgcctccggctcctgtcactggcagcagctcatcttccggcacttccgcttctgccaggccggcaacgctgcggattcgccacagctccgtcgtcattgcgcgctctccattatccttttcgtactgccggcggcggaaaataccaccgaattttttattgacaagcgttttctcattgtcttccttatcccactggaaagtgaaattgttagacctctcaatggcagtaacaacacccttgagccatggcgttcccttatcatccatgttctgtttaaagacacctctccatttggcttttggattcgtttctttttctgctttaaactgcttatcataaaagtctgcatactctccttccgcaatatcgtacagaattacaaactttctccactcatgcccgctcttatctgtatccgtcacttcggcaacctgacgaattttacaaacatattttccttttggaagggcctgaaattcgcccgtataagctgccgcctcatcatatccctgtggtttcttaatcatttttcttatcctcctctaagttcttcgggttctgaatcccgtaatattctctgattgtgttgtctaccattaaaagatcgttatcaatctcaagcgcctggaacatccccattggagacttactgaccgcgccatttgccgactgggtaataaaccggtgatcctcgccatctaacacacaccgcagcacaatcgtaaacattccttccacacatactttctcatccagcagtttcccgatggtcttcggtttaacatcgccgctgtcgtccttatcttcgtgcatcataaagtacacgatctggtcttcccgcatagttaccacgaactgaatcagactccagaaccggtctcccagatcattgtaaagggagaatacgccattcccttttccagcgttactgtggccccgcatgaactgattcgtaataagatatccggcatcgtcaattaccactgatttctgctgacagcctttaagcgctgtcataatcttattgtagtcatcggattggactgccgggatcttccccttaaatgggagcggctttttcaggacattgattagggcaaaatccttacccacgcaatttctcatacttgcacttttaccggccccgctccggcctataattaatactggcactgccatggcttcctccttaatatggcagcgaatcttccgctgcttcctctctcccgtctgccggttcctcatcttcctgacctgcattatccgcaatccagtcatcctcaaaaaagctgatgccgttcagacgtggaaacaacacttccagtgccttattccctggtgattccgtatgtacccaatagattgtcgtttcattcttccaatagagcacgccggcaagaaaactcggcctggttggcatcacctccacggttgtatccagttcgctccgcgatatcacccggtctgacagggaccgatccgcaaccacgaatctcaaatcgctgtgcttctgacacacaatatactcatgaggccaggcaaacagcattaccggcgccactacggcaaaatcttttgctgctttccactgctcatacggatccggataatcgaatacagtctccggttccgtatctccatctggattaatcttaaaaagatagcattctcctgcttccggcagatctccgatcagctccatgattgcagccttgaacttattcgatgcgtacggtatttcaatatacagcccccagttatcggaataaaccagataatggtcattcacattccctacgatcaggccgtgcttcttcaaactggccttcatgatcttcttcaattctcctgtttttaagaacatcttcacaatcccctttcctgtttctctcattgctctcatctattccgtgccgtaccaatgcaagtaccatatccatttcctcgaaagacagatgccacacgcctgtaaccatgagttttacaacccgtgctgcaacatccatcaatacctgcatacggaacggagtcatatccccgccgcccatcagcggatccccagatgctccccacgcggttccaaatgcgcccagtctacctggcgctcggataataaggcgcggaccgcatctccgtttaccttcggtggctgcggaatcaggaagcggcccgggatatcgtcaatggctccgtcaatgaccaatggttcctgaccgccgttctttgccacgctgatcgtaaagaggggtgtcttaatcttcgtctttcctatagccttcatgttctccatgagcgttgtcttcaaagccttctggcggttctccaagcttgtcctccgggcattcaggcgggattcttccgccttcaatgtctcaatatcggctttcatatcagtaataatgatcgcataagattctgccttgtcctcgatctctccgaagatagcttctatagtatcccggataacctgctcatccgtttcgccatcataaagcatctgctccaaaatctcgtactgctctgataattcgtataatctcatctcgtaatcctccttaaaaatctacttcatccggtctgatcgccccataaagtctttgcggtactggctgtttacagttcacaggctccggcggcaatgcctcgtcaatcgcctccagtacctcaatcagtgcctcggccatcatatcctgcctcaccagtattttttcagatatacatttcacgcactcagccatagtctcctggctgaatccgatctcttcatcattcagtgcgatgctaccataattactgctaacagtaatcgccggctgctctgcaagtatctttgtagccgtctcgcacaagtcaattccgtcatttaaacggttgactcttcccagcgtggcctctgcgcgtttcattaattctttttttaccatcttgcactccgtttctccccatggtacaatggggctgtagaataattagtagttaccttgaatccctgggagttgcagctcctggggattctgcttttagtgtatttacgcggcgtaccgcatcagaaagctcactgagtttgtatgcgcgcggccatatttcagtatcggaatctttgccgggagtccagccagcagaatatgtccgaatgcttatccgcccaacatgaccagaaaagtcaaaaaatactgttggaagattccctgtaactttctgttctcttggttccagtccattgatatccagcgccagatctagcagccggtggatctgttcacgcttccgcttctccatcttcttctctaatcgtttcttcatcatccttcaccttctccttccagttcccttgcatgggtattcataaaatagacagtcatgtggttgatctgtgcaaactcctcccgcgttattgcttccagctgacgcgccatacaagcttgtccatatgtctgataaagcaggtcgcgcgacagggagcgctgcgcataccgcgcttgtttttccaactgtttcataattgtttccttctgcatctgattccctcctctcaaatcaatctcaccaacagcagataccctatgtacccgcaggccaccgccccggccagatcaaagatcccaaccagcagccattccacccaatcgattagcggcggccggctgtcgtcctcgaagtcgtcgaggttgtcaatgtacttctgcattctgtatcacctcctgcttgtccatcagtaccgctattaagcggtttcatctttctgtacctcgtctttctttttaatagacttaacagtcactgtacattctccccgcgccgtgaatatccgggccaaagcctcaaacgcccgttccacattaacgctgttaagcgcaactacagtatctttcatttctcaccacccctctctggtagattgtatgtatgaccggttgtacttgtttcctgatttcctgccatttgctccaaatccatgcttatctggccttctacttccatacagcgccttgaggccttctcttcggataattttaacccgttaagcttttctgtcagctgcccgtccacgcttcttaaggcttttatatcccggctttcgtcgatattgacgtattttgatacgccacctaccttacagttgaataccgtccgtatgcctttatcatcccggatatgtgccatcatctgatgtgttagtttccggattccctgttcttttgctgcttgtgggtcaaacagataatgcggtcggactaaatccatgatttcttccgttgtcatttctcctgattccatcattttctgaatgattacttctctggccttaggttccaattttcgggttcttgccatgctctgttactcctttcataaaagttcttatctttaataatttgcgtatcgtgtcttcaatttcccgcaaatacgattcagccgtctgcggaatgattatttcactcatcattttgaattccttttcatcagcattgagttccagaaatgcatacagggctttgtggtacttctttgtaatcttcccgcactcgtccatataggaataaaaattctcttccttctgcacctccgggagctgcgacttcctgctggcaaaatccagaatcttcgcctgctcctctggcggagccttacgaagttctttggctgtttcgatcgcctgatactttgggaggttctcaagaggggggaattcttctactgccttgacatgctgtttggcgtcatgaagcgttttcggcggaattccgatttctttagctatagtccttacacctattctgttcgggtcatttaagtgtgcggactccgcacagttgtttttcccgggctccgaaaagtattccttttcctctaattccttttccttgatctctgccaactccacgagattctttgacttctccagctccgttaaatctttgcggcggatgttctcctcgagctccagaactcgcaattctttctcggaaatatcttccagtaccttcgcttcaatctctttctttccgatccgctcacaggccagcagtctccgacacccggctattaagttgtaatcggaatccactacaatgggatggagaagaccgtgttcctggatactctccgcaagagcctgcatatcgccatactcatcccgaacacgttggcctatctttacatctttgatttttagaatcatgtgtcctcctcttgttgagttttctcaacatccaatgtgcttctacatcaggctaccccttgctttcttccgccagcttcatcaggtatgcatcccacttaacggcatctacctgccactcgcgccctacccgatacgccggggagccttttcgcttaaacagggctgctatggtgtcgtaacttttgttgtggcgggccatgcagtctttaattgtcaagatgtctgacactgatatcacgctcctttctttgaaatattcatcctatgcgttgcaatttatttctttaaatggtaatataattacatatttaaggaggtacgcgtatgctatatggtgaattaaagaactttacctggggtgaattgaaaacgttgcaatggggagatctggcccttgataaatacgagttaatcgccaaagctgaaaacggttcaattcaattgcccgatgatgtcaaagaaaaacttcggtctctctgtgttgaactggacaaccattcacctgaaaagaagactttcttttcaaaacagaaattagaaactgttggagatgtaactaaaattctttctaacatcataaccgtcgcaaaaggcttaaacgacttaggggttcaggaaatgttgaaaaactgccttgattccatcatagaactttttcattaattccttactctcagacccatgcaacaggacaagcaccagtgccataacgacagcccataacagcccgattgcccgccagcaatcattgaagctgctttcgatcacgtctacggcatttgcgtctaccgagtaccgctttcttcccagaatgcttattttctgcgggggaagcggtgtatttacctttcttttcattcctatgctcctttctcatcttctgacacactcaccattagatattccattgttactctaaataacctcgccatctccaatagcttcgagcttggaatatctgtggattcggatatccagttgtaataagtctttaaagaaacatttaatttctgtgataaattttcttttgacaactgtttcctcactcgttctgcttcgatattgactttcagatacaacacctcttttcataatgtgaaatatttttcatgatatagtaaatatttttccaaaaccactatatattgtgtttttcaagatatttttattgcttttctaaataatttgcagtataatacatttagaacttacgtttggcatatcaataaaaaggagatttaatgcatgtatcaacattactattttaacaacaccactgatgaacatggataccacgaagtccacacagaaggttgtagctttttaccctctgtttccaacagaacatatataggatattgtgcaaattgttctgaagccataaattccgccaaggacaagtacccttattatgtttttgatggttgtttcttttgttgcaactcatgccacaagggataaggttagctgacattagtcagctttctttataactgcatttttcttataaacttcctttacttcattacaagccaactcaagacactccaatgtcatttgattagatatcatacattcggtaattgcgttggttaatttcgctgacatttcatgtaaaaaaacagtattaagtttttctgggatttccatttattttaccacctccttatctggcaacttaagcttatattcagcgagctccattggtgttacgttcattgcttcgcacagtgcaaacatttcattggcctccaaacgtctttcaagattaattacctgggatagtttgcatggagacatattcgctttattagcaattacagcttgaatatatcctctgtcgcgaatcatgcttttaagattcaatctaatatccattaggtttcttcacctccttaactcattttttgagtacaccatcatattatcactcactattttagttatcaatattattttactaattttttgagtttttgtattgattttctaaatgagatatggtaatcttagaacatagaaagcaggtgaatataatgacaaaggaagatattggaataacactaaaacaactgcgattggcctgtggcatgacgcagaaagaagttgctgagaaaatagggagaaagcagcaaattgtgggacactgggaaacaggctacgctcagccagatgcaaacacgctatttacattatgtgagatatatggaaccactgtagatgaagcatttggatttgttcgaaaaaatatagatatatcaccatctgattacgaactaataaaaaaattccacgctctcgatgaccatggcagggaaagtgtcaacataatattagatcgggaaactcaacgtgttaagtctctggccaatatgcagaaacagctttccacccagtccacgtatgttatcgagctggaaaaggctacgcgccctcactacactattagctattatcagaaactggcttctgctggaagcggtgaatacttatttgacaatgttcccaccgacacgattgatgttccagtaactgcattatctgaacaggctgactttgcgatcggcgtcaacggtaattcgatggaaccaacttattacgatggagacaaggtatatgtcagattgaccgaggaaatccctactgggcatatcggcgtgtttacgcgaggcaatgagtgctttatcaaggaactaggaaatgaccgtcttatttcacacaatcatgcgggtggctataaggacattcctgccagcgaggagattaaacttgttggggaagttttgggaaaggtagaagaaatatgaaaatagagtttgccaagccggcggtaaaatatattaattctgctgacaagaccaccaaacagcggcttaaatttgctattgaaaaacttccgctcggcgatgttaagaaactgcaaggattacaaaacgattatcgcctccgtgttggtgatttaagagttctgttctccatatcagaaaatactattacaataaaagatattctgccaagagggcaggcatataaacgattataggaggtattgcgatgagcaaagaaatgttgcatgggctgattgatatgatcccagagtctgacactgaaactatttataatgtattgctcaaatttatccctacagacatgccagagaacgatgaattaaaggccattgcctttgccgatagaagcatcggatccgaaggcactgtgcctatggattcaatcaattgggactaaggaggcgcattatgaagtacaaagaatttttagagtatctggaaaaaaatctggacggttaccagacgttcatgcgtaaagctctagaatatcagacaagaaaaaatgctaaacggcagaaaaaagaccgttggaacgaagaaaaaatagaaaaagccgcttatgagatgtggaaaaagtccatggagaatctatacaataatctgaaaaaggaaattaaatccgatttatctttttcatggacttcttacattgaaaaacatgagatattagaaaccgtaaacgaaagtatcagtgaactggattttagcgaggaggtggcataacgcacgaaatgtaaaaataagcattttaaaaccgaaggatttagattaattaattcaggagctacgcttcagaaaacggatttagagttaattattaccaatgacgaaataggtaaaaccattacagtcattgacggacctattggtcttacatttccagcagatattatctccaagtatctgcaatagatctgaaatagcaaaaagccccaggagctaccaactcccagagcttttcacatagatttctcttgccggacgcaccggaagatacaatcattctcgcaaattgattatatcatttccaaagcgtcctgacaaggggcgtattttttatacccaaaattaatacacttaaccaaggagatgatattatgacaaagccccagaccgcccttctgcgtgtagcgctctacatccgtgtatcctcagacgaacaggctgaacgcggcgattccattcgcgatcagaaggaacgcggaattaaatatattgatgatcatcagaacatggtcctccaggacacttatatcgacgacggcgtctccggccagaagctggatcgtgatgattttacccgcctgatcgggaatgtaaaagccggcctggttgatctcatcatattcacaaaattagaccgctggttcaggagcctgcgccattatctcaatattcaggtcatattggataagtacaatgttgcatggacagccattgaccaaccctactttgacacttccaccccttacggccgtgccttcgtagctcagtctatgacatgggcggagctggaagctcagaacggcggcctgcgcgttgccgatgtctttcgcaacaaggtagttcatggagaggttatcaccggaaaggtgccgcgcggctacatgattcaaaataagcatttagttttttctgacgaggcacccgcgatgttggatagtattcagtacttccatcgggaacaggggcttgccaaaaccgtaaactacatgcgggaaaaccacggaataaatatgagtatccagaaccttaaaaacagtatcctgcgaaacgagaaatacaccggccgttatcgcggcaacgaaaattactgtccgcgcctgatttctgacgagatgtatcaggacattcaacgtgttcttgacaacaacagcacgatacgctccagccaaaaatacccctacatattctcaggaatcctgatttgtgacgagtgcggccataaaatgagcggctgccacattaacgtcgtgagccgcaggaccagcggaaaagtctaccgctacaaatatcctgcttatgaatgcctgcagtaccgtgcatacaaaaaatgcagcaacggcggtgagattcgagaaatgaggattgaagaatatttattagaacacatccgggaagagttaagcggctatctggtagattttgagacaggggaagccaagagaattgataatcgcgcaaaaaagaataagatccgcagaaaactagaccgtttgaaggatttgtacctgaatgaagtgatcaatctggaagaatataaaaaagaccgcgcggagtatgaggaacagcttgctgcccttccagacatggaacaaccgataaaaaatctaaaaccgcttaagcaagttctggactgcaattttgagatcatctataataatttaaacaatgaggaaaagagggccttctggcggtcaattattaaggaaatccgtgtatcaaagagtattgggcggaaccggaaatatcaaattatctttttgtaattgttttaccgttaagttaagtttccggtatgctgattcattccagtcatttcattaaataccgtactcttccccacattcgggttacctgccagcgcgatgaccttatcatcttcccggcgttttttgatttcaagtccgcagtccacagacttgatccccacagaatctctgcttaaccccataatacgtcctccgtttcctcctgtcctgccttcccctcacagattgaggcggtatctgcggctaaagccatatccgggctctcagcacgctgttccttcccctctctcgctccctgatgttctgattcctttctatataccatcacacggccggagtcctcgctcctgagggctatgaccgccccccggataatgtatgcgcaggggtctcccagcgggctctttcccacacactccactacagttccttcaatcagaccgatgtcctgaagccgccgtctcatatcatcaaaaacggccagttcggaaatcaccgctttctgaccctttttcaagtctgttaactggattacttctgtcattaaatttacctccgtaaatgtttccatatcctaacatatgcgaaggctggtacagtggttccgggagattttttccttctttcctgacggcagactgtttccctgacggcaattatttttaagcccccgccgcggccgtcatagattgttctcatccggaatatattgaactgatatgcagacacgtaacggaggtaaacaaatggatcaggaagataatttttatacactaaaaggctattcccttctggagcacatccagatcacctcctccatggaggactatctggaaatgatctgccgcctcagccaggacggcaccccggtccggatcggggaccttgccaaatgtcttcatgtccggccgtcatccgcctcaaagatggctggaaacctgcgcagccacggacttgtgcggtttgagaaatacggtaccgtcacgctgacggaagcggggcttcagcttgggcgctatctcctgttccgccatacggtgctgcaggatttcttctgctttatcaatcaaaccaccaatgagctggagcaggccgaaaaagtggaacacttcatcgatccgaaaacagtgtataatctgaaaaaatggatggataaaattacatagacagtcttgtgcgaatccgtaattcgtcgtatactataggttacatgaagagtatcacacataagcggtcagagtacgcttgctgagtgttcataacaaggaggaacagacacatggataagattaagatgacaacccccatcgtcgagatggacggcgacgagatgacacggattctctggaagatgattaaagatcatttactgcttccctacatcgacttaaaaaccgaatactatgatctcggcctggaataccgcgacgaaacggacgaccaggttaccgtcgattccgccaacgccacgaaaaaatataaggttgcagtcaaatgtgccaccatcacccccaatgctgcccgtgtaaaagagtatcatttaaaagaaatgtggaagagccccaacggaaccatccgtgcgatcctggatggcaccgtattccgtgctccgatcgtagtgaagggaatcgaaccatgtgtaaaaaactggaaaaagcctatcaccatcgcaagacatgcctacggcgatgtatataagggttccgagatgaagattccgggagccggtaaagtcgagttagtctatacggcagaagacggaagcgagacccgcgaactggtacataactttacaggcgccggtattgtacagggcatgcataacctgaataattccatagaaagctttgccagaagctgctttaattacgcgctggatacgaagcaggacttatggtttgccaccaaggacaccatttccaaaaaatatgaccatacctttaaggatattttccaggatattttcgatgcagaatacgcaggtaagtttgaggaagcgggaatcacctatttctatacgctgatcgacgatgcggttgcacgtgtcatgaaatctgaaggcggctatatctgggcctgcaagaattatgacggcgacgttatgagcgacatggtttcttccgcgttcggctccctcgccatgatgacctccgttctcgtatctccggatggcgattacgaatatgaggctgcccacggaaccgtacagcgtcactattacaagcacttaaagggagaagagacctccaccaactctgtggccaccatttttgcctggaccggtgcgttgagaaagcggggagaactggacggcaacaaagatctgatggattttgcagacagactggagaaagctaccatcgataccattgaaaatggcgagatgacgaaagaccttgcgctcatcactaccatacccaatcctactgtattaaacagcgaagattttatcaaggcaattgctgcccgtctttaagggaagttccgtctgcttcgtttgaagcagggaatggaagcccccctctccgtctttgacggaatcagacggctgctgtaaaatccctccgcaccgcgagtcatttcacggtaccggagggattttcttaaacaactaattttcatatcaggaggttctgtccatgagatacaaacccaaagatcacatactgaaaaacggtgctgtctgccgtctgagaagccctcttcccgccgacgcggccgccatccttcatctcatgaaggttacctccggcgagacggacttcatggcccgatactccgatgaaattaccatgccgccccagcgggaggaaaagtttctggaaaccacactgaacagtcccactgacttgatgatctgtgctgttgtggatggaaccattgtcgccaacgccggcttgagccccatcgcccagagggagcggtaccgccaccgcgccgccttcggtatttccatccggaaagagtactgggggctgggaatcggttcgctgctgctgtcggccattatcacatgcgccagagaaatggatctcgagatgatcgaactggaggtagtctgcgaaaatgagcgtgcgatcgccctttataagaaatacggcttccgcatctatggcagccgcccccattcgtttaaataccgggatggcagctatgcggatgagtatctcatgctcttaacgctctgatcgccagggttcgctgttattttgctaatatttttcaaaaaaagacaaaaatctctgttcaattcattatcagaatgatataatatctattatcatatgttgtattggtaatggaagggatcctgatcatgaacttaagacatcttactatcttcaaaaccgtctgtgaagagggcagtatcaccggagcggcgaaaacgctgtccatgacgcagccggctatttctcacgcgatcaacgaactggaagaatccgtaggggcctccctcttcgaccgcgtttcccggaaaatcgtcatcaatgagaacggcaaattctacctctcaaaagtgataccgcttttggagctctatcacgatcttgaaacctgttccggcgccttaaaccgccagactccgctccgggtcggctcctgcgtgactctggccagcttcctgctccccggcgtgatttcccgttttatgaaaagcaatccggagtccgtcataaaagtcactgtgaacaattccaaagagattgctcagcttctccttagaaacgaattggatatcggtctgatcgagggtgtggtccccgacgagcagctggagaaaattccattttcctcctacccgctggccgtcatctgcgctcccgaccatccatttgcccggcaaaccagtcagcccgtatccttagaacgcctcctggaagagcctctcatcctgcgggaggaaggctgtacaatccgggacgcctttgactgcgccctgaccctgcataacttaaccgccgctccgctgtggtccagcaccaattctgacgtggtcgtccaggctgtccgtgaaaatctgggcataggcgtcgttccccggatctttgccgatccttacattcagcgcggggagattgtggagattgatgtgaaggacttcgatgtcagctgcatgaaccacgtggtgtttcataaggataagttccaaagcgagagttttcaggcatttattaatctggtgctgtttgactgaccggcaaaagaccggtgcgtccttctgttccgtcacttgccggccgttgtccggtctgcagtctcaattcagtgttattcctgtgctatcaaaaataccgcagaaatgatcttatcatcacttctgcggtattaactgattgattcgttttgtatttctatttacaatgttacagtctcagtcttctcattcatctcagccagcaatttatcaatactcacaatcttcacgcacaatgcaaataattccatcgccagaattaaatcagataacggcggataggacggagcgatacggatgttgctgtcatgcggatcctttccatatgggtaggttgcgcccgcaccggtcatgataagacctgcctttttacatcttgctacgatagacttcgcacagccatccagtgaatcaaaggaaatgaaatatccgccctttggactggtccaggaaccgattccaaggccgcccagttctctctccagaatctcgattacagcttcgaacttcggtctcatgatatccgcatgctttctcatatgttctaccattccgtggatatccccgaagaaacgcacgtggcgcagctggtttaccttgtcatggccgatggtctgaatctttaactgcttcttgatgtctaccagattgttctggctgcaggcgatagccgcgataccggaacccgggaagcttaccttggaggtggaagcgaacttgtaaaccaggtccggattccccgctctcttgcactccgccaggatttcgattaaatgatcctggtcgtggtcgtataaatgatgaatcgtataggcattatcccagtagattctgaaatccggagcagccggttttaatctggcaaagcggcgtaccgtctcgtcggagtaggagattccctgaggattggagtatttcggcacgcaccagatccccttgatggattcgtcatttgcaaccagttcttccaccttatccatatccgggcctgttggcgtcatgggaacattgatcatctcaatgccaaagtattccgtaatggcaaaatgtctgtcatatcccggaaccgggcagaggaattttaccttgtctaatttacaccacggggtatttcccatcacaccgtgtgtcatggaacgtgaaaccgtgtcatacatgacatttaagctggagttgccgtagatgatgatctggtccggatgaacctccatcatgtcgccgagcagttctttcgcttccttgatgccgtcgagcacgccgtagttgcggcagtccgtaccgtcttcacacgttaaatcatcatcgctgctcagcacatccatcattcccatggataaatccagctgatccacacttggctttcctctggacatatcgaggcgtaaatccttgccctgatactccctgtacttggtggaaagctgttttctaagttcctgtaactcttccttcgtcatctctgcatacggtttcatcgctttcttcttcctcctcatattatctccttcattcgtttccgggagttttttctcccaagacggcagccagctgccggattacagcagttcctctatcatcttatttaccatggcggggtccgctttccctttcatcgcccgcatcgtctgcccgactaaaaagcccctggctctctctttcccattacggtaatctgtcacagactgtggatttgctgctataacctcctctatcacggcgcggagcgctccctcgtcatttaccaccttcagcccattttcttctacataggcctcgggatcaatatcttcagcgaatattttttcaaatacttccttcgctaccgtgcgggtaatagtaccattatccaccaaaacaattaattttgcaagattttccggtgaaaatcttatggcctccggttccagggcctcctccttcaacagcctcataccctctaccatcagccagttggccgcttctttcggctttttgcacagggaaacggtggcttcaaagatatccgccatgcgctttgatcctgtaatgatatccgcatcatattcggaaagccccagttcagcctggtatctcgccatcttcccggtcttaaactccggctggcggtcctttatctcctgtatccaggtatcgcctataaacaccggaggcaggtcgggatccgggaaataacggtaatctttggcatcctctttggagcgcatggcacgggagctttccttattatcatcccagcgccgtgtctcctggatcaccttcttcccttcctccagaagctcgatctggcgctttcgttccccctcgatcgctctggcaatggccttaaaggagtttaagttcttcatttccgtcctggtaccgaattccggagctccggcttcccgaacggacaggttcacatccgcccgcatggaaccttcctgaagcttgcagtccgatgctccgagatactggatgatcagccgcagcttctctaaatacgcgatcacttcctctgcgcttcgcatatccggttccgagacgatctcgataagcggaacgccgcttctgttataatccaccagggaacagtcttcccattcatcatggatcagctttcctgcatcctcctccatgtggatctcgtgaatccccactttcttcttaccggccgctgtctcgatctccacgaaaccgtcgtgacagatggggaggtagagctgggagatctgataattctggggattgtcgggataaaaatagtttttccggtcaaaccggcagtactggttgatttcacagttgaccgccagccccaccgccagggcgtattccaccacctgtctgttcagaacaggaagcgcccccggcattccggtgcagaccgggcaggtgtgggtgttgggtgctccgccgaattccgtagagcaggaacagaaaatctttgttttcgtggcaagctccacgtggacctccagccctatgactgtctcatactgtctgctcatctactccgcctcctttccggccgccatgacggattgtactgccacagactcagccgtttccggtactgcacaaggcggcatttcataagaacggcttctctcaaacgcgtaaccggcgcggatgatattcttttcctgaaaacagtctccgatcagctgaaggccgatggggagtcctcctgaatcttttccgcagggcaccgatagccccggaagcccggccagattgacggaaattgtataaatatcgccgagatacatctttaaaggatcactcaggctttctcccagcttcggcgccgtggccggtgaagccggcccgagaatcacatcgtatttctcaaaggcacggtcaaaagcctttttaatcaatgccttggtccgaagtgcttttaaataataggcatcgtagtaaccggagctcaaaacgaacgagccaagcataatacgccgctttacttccggtccgaatccctgggaacggctctttttatacatatcatgaaggccgtcataatcctttgcgcggaaaccgtatttaacgccgtcgaagcgtgataagttggaactggcttccgcagaggcaatgacataatatgccggaatcgcatattctgccatgcccaaatcaaactcttccacagaggcgcccttttccctcaatacctccgccgcctttaaaacagcttcttttacctccggatcaagcccttcacccaggtaatcgccgggaattccaattctcatccccgttacatcatccaccaaagctgaggtgaaatcacagccgccatatgaagtccagccggctgctccctgttccatcttctgccgcatcacggcttcccggtccaccgatgtgctgtccttcgcgtcatgacttgccaatgcctccagaataaccgcacagtccgtcacatccttcgccaccggcccgatctgatccagagaggagccgtaagcgataagcccataccgggaaatggtcccgtaagttggttttaaaccggttaccccgcagaaagaactgggctgccgtatggagccgccggtgtcggaacccagcgcatagaagcattcatttgccgcaactgcggcgcaggatccgcctgaagagccgccgggaacgtaatccgtattccagggatttctcgtgacgccaaaggccgatgtttccgtcgtacttcccatggcaaactcatccatgttggtcttgccgatgatcacggctcccgccttccttaagttttccactgcctccgccgtgtaggtggggacgaagttctccagaatcttcgagctgcatgtggttcgcataccttctatacacatattgtcttttaccgcagcgggaacacctgcaagaggcccggcaagctggccttcatcgatctttatctgtatctcccgcgcctgttttaaagccttttctttttccagagttacgtaacagtgaagactggactcctgtctttcaatctgtgcgaatacggctgtcagagcctcttcgcacgtcacttctttttcttttatcttttttcccagctgtaccgcggtcaatgataagatttctttttccgtcatgggctccctccttattccactgttttcgggaccttaaatgcgccattcttctgttccggtgcatttttcagtgtgttttccctgccatcactgctgtgttcccctgtagtgtcataagagtcagcagcttctctcaccgtatcctcgcggaacacgtttgtcaccggaaaaatatgggtcatgggttccaccccgtctgtgtccagctcgttcagtttatcaatataatccagcatacgtcccatgtctttttttgcgtcttccttttcggactcagacaattcaagcttcgccaggattcccacgtattcgattgttgcatcatcaatcctgtgtgccatctcattccctcctcattccgggcacgcagccgtgccgccaatataaatatacactatggttccagacgcgtcacgtcacgtggaaacatagtcgtttcccgtacattctgctcatctaacaaccgcatggtcagccgctccagaccaattccgagacctccgtggggcggcattccgtatttgaatatcattaaataagaagcaagttcttccgggtccatacctcttttctccatcttctttatgatggtatcgtaatcatggatcctctggcctccggtggtgatctccagccccttaaacagcaggtcaaagcttaacgtatattttggatcatggggatcgtccatagcataaaacggacgtttttttgacgggtaatgggtgacaaatacgaaatcgctgtcgtattcttctttaaaataccggccgattaagtgttcttcttccggttctaaatcatagggattgcggattggacggctgtatttctctgaaacgagttccttggcccgtttgaatgttacagcaggaattcttgccacgtccgggagtgtaacctttaacatcctgagttctttttcgtattcctcagagagaagcttcatcacgtactggagcatggaggtttccatggccatcacgtcctcgaagccgtcgatatatcccatctcgaagtccagactggtgtattcatttaaatggcgcgtcgtgttgtgcttctcagcccggaacacgggagccgcctcgaatacccggtcatagacgccgaccatggtctgcttgtaaaactgcgggctctgccccagctctgccttcttgttaaagtaatcgagacggaacacattggaacctccctctgcgccgcgggccacgatcttcggtgtgcgaatctcggtaaatccctgcgagtgaagaaaatcccggaatccccggacaattccttcctgaatccggaatttcgcccgctccatgggattgcggagtgtgatagggcgaagggccagcttcgtctccagcgacgtgttcagcttccatttgctgacagcgatggggagaacctctgccggtgttgacagtactttgatctctgtcagacggatttccacgccgtggggagcacggggctccggcgatacgattcccgtgacggtgacggcggattcctcctttaattctgccgaagggatttccggcccgttgtccgcgaattccagcctgccgtccgctgcttcctgcgccgctcccgcgccgcgttcccctgccctgtatacaggaacagagcgctctctgacacactggacaagtccctccgcttttcgcaggatcacgaagcttacctcgcccatgtcgcggatggtgtggaccgccccgtttaggctcaccgtttttccggtgtaatcaccggaaagcaaatcggccagttctacagtttcttttctttggatacctttcataaattccatgtctgcacgctccttaccagatgtagattggttggattccggaaacaggaaaagccccgtcccggaatacagttacatattccgggacggggctcttattatcataagatcccgcggtaccacccgctttgagatattatacttctatctccactctttcacttaacgcgtgtcacgggtaaacctacctctgacaccggagatccatccggccgcttcggcataccggctccagagtgttcccttaattcagtccctcatgacggcgctctcagtcggtgacgccctcttcctgtcaagtttcttaaatcagagtctctttctcagcctttcgtcttatctgtaattcaccactgcactacgatgaatttcatatatgatagcacacgttttttttctttgcaatatctattttacataaaatatttctgaatcctgcaccttttctggtgaaattccattcaaaagagctgtatctgcgcagaaacagctctgtgcatccacggctcttttcttgacttttcctgtcgaacagggtacaattatctgcatgtttacaatgttagacaggggggttttacatgtcaaatatgaccatttccgggaaaccggccgaaaacaaaatgggcgtcatgcccatcagccgtctgctgttcaccatgtctctgcccatgatactttccatgctggtacaggccttatacaatgtcatcgacagcatctttgtcgcccggctcggggaaaccgcgctggcggccgtatcgctcgcatttcccgtacagaacttaattatcgcggtatccaccggcaccggcgttggcgtcaacgcgcttctgtcccgctctctgggagagaagaaccagagaaatgccaatctggcggctgtcaacggactctttgttttcttcctaagctatctgctgttcgccgtcttcggcatcttttttgccagaatctattttacggttcagacctccaatccggagatcatccggcagggtaccacttacttatcgatctgctccatcttttcctttggtatctttttagagattgcgctggaacggatcatgcagtccaccgggcgcacgatctataacatgattacgcagggtctcggagccatcatcaacattattctggatcccattctgatcttcggactgctgggattcccccggatgggaatcatgggtgccgcggcagccacggtaatcggtcagattgccgccatgctcctgctgctctacttcaatatcaccaaaaataccgacgtgaatttaaacatgcgcagcttccgcccgaatgcggagattattgctgaaatctacagggttggactgccttccatcatcatgcagtccatcagctcggtcatgaccttcggcgtcaacaagatcctgctgctgttctccgagacggcggtatccgtattcggaatctatttcaagcttcagagcttcatcttcatgcctgtattcggcttaaataatgcaatggttccgatcgtcgcctacaactacggagccgctaagaaagaccgcattatgaaaaccatccgggccagcgtgactgcggcagtcgcaattatgctggtgggactggccatattccagatattcccggagcagcttttgtatctgtttgacgcctcagagaatatgatgggaatcggcgttccggcgctccgcatcatcagcttaagcttcctgttcgcagggtactgcatcgtgattggttctgtattccaggctctgggcaacggagtctacagcctgatcacttcggcagcccgacagctggtatgtattctgcccgctgcctggttcttcgcagcggaattcggccttcatgccgtatggtatgcgttccctctggcggaaatcatctctgtcgtccttacgactgtcttattccgccggatctatcagaaaaagattcagttgttataaccgtaaagcagcggctttacgccggctcagttattttcccacacgatcctccggaagcaccagacagtacgcctgccggtactctttcgccgtgattcccatgtatttcttaaacagtctgcgaaaataatcgacatccgtgtacccgcactcgtaggcgatctcgctgccggtcagattcgtttctatcaacaggcggcaggcccggttgattctggcctcatggatagcatccgttaagtttctgccgtacacggcgtgaaagacccggcccagatggtccggattacattccagcttatcagccagaaatgaggcggacagcggttctttccagtgctctcggatatatctggccgcctggttggccagataaaccttctgtccgctgacctccagcggagagagggaatcggaaagctcgcacagaagctccaaaagcaccagattcaaaaatgtcttgtcatcgcggcacacattctgtctccggataaaacgccggaacagctcctcaaacgcctccggcttcgccagacggatcagctgaggcagtgccataatatcgcttcccatacggagagcctcctcctccatggtaaaatggagccagtaaaaggtcagatcctcgtcaaaatccctggttcctccgtgatgccgcccaggaaacaggatcagcgcctcccctttttccacatcatactccacgtcctcctcaaatatccccaaagtcccggaattgacgtatataatttcaaatgtatccatggtacgctccacatggcgtccccatccctttgtcaccagataaccggcatttagcgcctgtaccggcagcagtgccttcaaatgcagaaaatgttccatccttttcttttccctctgcggattaccggttcttccccgcggcgccgtgctctggttcgcttctgccgaaatcccgtacccacagtcggaatcctccagttattctcttctttctcctcttgtataatcaaccacaaactggcaatatagaagaagataagagctcttaaaaacgtggaaaaaccggtcaatttcccgtcttaccaacacaagaataccagaaaaatcaataaatgaaaaggggattgcggcaattccgccgcaaatattggcttatggttacagttctgcaattaaagcaaatggtgtcccaggcgtatttcggggatactgtcatgacggagacggattattccaggggccggaagctgtttattgccgaaggctgctgcgccaacggcgtcgtcaccctgacaacgggggcgtttttgtccggctacgcaggctatctcggcgctgatgattccttaaacggaatcatcggctctgttccggtgctcttgtgcaccctgcagatgttttcttccgtcgtcctggagaacttgagacagaagaaatttttaatcgcctgcttcgcactgatccacaggcttctgctctcctctctctttttcgtcccgctgctggtcgaaaaccaggcgggccgcctggctgcagtcgtcgccatctatgtagtcgcccacttctttggcgcgtttatcggtacgggtaccggaagctggcttctttccctggttcctgagaacatccgcggaacgtatctggggcggaaggatgcgtttgcatttgcattcaccacggtgctcagcctggtctgcggccgtgttttagactggatgagaagttcgcatcaggacctgaccgggtattatatcattggcctgattgtattatccaccgccttcacggatttctggtgcctttcctcaatccgggagccggtttctgaacctcaccggcgcagtttaaaggccgctgtcatcgatccgcttttcgacagcgaataccgaaagatcatcggcctctacatgttctggaatctggcgctgcaggtagccggaccatttttcagtgtatacatggtaacagggctttctctggactacacctatatcaccttccttggactgatcgcctcctccgtccgcgtggtggcggcctgtttctggggacggctggctgacgccacctcctggcttcatgcggcgcgctgctccatgctcctgcttggctttgtacatacttcctggctgttcatgacgccctcaacctgcctgattctgcagcccgttctgcaggctctctcaggagccgcatggggcggaattgccatcgcagttttcagcctccagtatcagtacgccccggccgacaagcgggtatcttacgtgagcgccaactcttcttacgctgggctatgcggctttttcgcaacgctgctgggcgcctccctgctaaaaattcttccggaatttcagatcgggggctttccggtgtccgggatgcagatgatttttgcactgtccggagtgttgattatcctgtgtgtaaggtatatgagacgattgcaaacataagatagccatgttatcaaaacagccgcgtcaaaatatagtgacgcggctgcctggtcatatacctcctgcctctctcttcatacatgactccctcacgatcagttccggcttaaggatccgctccacccggctctcttcatccggcacgccttttatcttttccagcagcagttccgccgccatggctcccagcttttcctgcgggtgggcgatggtcgtcagcttcaccgcaccgttttccgctataaaggagttgtcatatcctgttacagagatatcctccggaatacggatcttcatcttttgaagtgcctttatcacctccagggcaatctggtcgttataacagacgatcccgtccatggtgacgccgctttccagcatgagctccagcaccttcgccggcttcaccgcacgatcctccgtatgaaaccagatcaccatatcgggatcgtaggcacagccagcctcctgaagcgccttcacataccccttatggcgttcctttccctgactgtcatccgccttaaaaatccccaggatccggcggtgccctgattcgatcagatagtttgtcaccagatacccgcccagacagtcgtccatcagaatgtgcggcttattcttcatctgtgcgtagtatccctgtatgaagacatagggaatctgataaaaatcgagtttttcatacagtggcctgttggcacagagaatctcgcttttgctgggttccacgatcagtccgtcgatatctttctccagaatttcctccagacaacggctctccttcacgcggctgttgccggtatttttcaggataatactgtagccctccgctgtcagcacgctgtcaattccctgaatcaaccggggaaatatataatccgataagtatgtggtaatcaccgcgatattgccggacccctttcgatatgttccgcccaagttggatgagagggactttccccttcccggctttctggagacaaaggtacctctgccgtgctccgcctcgataaatccctcctgttccagaatggacagcgcctttcgcacggtatggcggctcacatggtgggatgaagacagctcattctccgatgggagcctgtcccccggctgaaacctgccggatatcatatcgcgctttaactcctccatcagaatatagtactttgtctttccgccctcgccctcttcccggcttaacgggcggccgctatctctgcccataatacgcattgggcccatgcttgcgcataaaatgcttatcctgcatggactgtggtgcaggctctgcatcacggttcaacatctcagttacaaaattcatctttgcgatctcttccagcaccacggcattatgaactgctcccgcagcatcctttccccaggtaaacggtccgtggtttttgcacagcaccgccggcacatgaaccggatctttgccgcggaaggtttcaataatcaccaggccggtgttcttttcatacccctcttcgatctcctccggcgttaaattcctggcgcatggaatctccccataaaaatagtccgcatgggtcgtaccgtagcaaggcagcccgcggcctgcctgggcccaggccgtagccatgggagaatgggtatgaacgattccgccaatctccccaaacgctttatacagttctacatgagtggccgtgtcggaggagggatttaagtctccctccaccttatttccgtccagatccataaccaccatgtcttccggtcttaactgaccgtaatccacaccgcttggcttgatgacaaacagtcccctttcccggtcaattccgctgacattcccccaggtataagtgatgagcccccttctcggcagttccatattagcctcatagacctctttttttaattcttccagcatcgtgccatttcctcttttctaattgtttcagttctgtttaatcaattaccggccgttccgcccagacaatcgacagcggctcgctcaatcggcagaccgtttatataccgctccataaatgccttgaaaccacgctcatcctcttcctgcggttccataaccacaccttcttcgtccgcaaagacgcagtccgttaagtactggtcaagggcggcgctgcctccgtctcttctgtaacgcatataggatgcaagaattgccgccccccatgcaccgccttcaccggctgtctccataacggtcaccggaacgccggctgccgccgccataatccgctggcctacgccctttgtcttaaataatccgccatggcccagcagactgtccagcttcacgccctcctccttaaacagaatatccataccgacacggagcgctcccagcgacgtatataaatgtacgcgcatgaagtttgccaggttaaaccggctgtcgggcagacgcacaaatgcagggcgtccctcttcaaaatgtgtgatatgctctccggagaaataattataggccagcaggccgccgcagtccggatccccttccagggcaagattataaagggtggaaaacaactggtttctgtccaccttcattcccatagccagggaaaactcttcaaacaaattcacccatgcatttaaatcagaagtacagttattgcagtgcaccatagcaaccagatcaccggccggcgtcgtcaccagatccagttcctcatgaacgtttttcagttcatgttccagaaccaccatggcgaacacactggtgcctgcggatacattgccggtgcgcttcgcgacgctgttcgtagccaccataccggttccggcatctccctccggcgggcagagaggaatacctggctttaacgccccggacggatcgagaagcttcgcgccttcttccgtcagcactccggcctcctcccctgcagtcagcaccttcggaaggatatcacggagcttccacggcagttgttctccggctgtcagttcatcaaactgtgcaatcatcctctcatgaaaatcctttttgccggtgtcaatcggaaacatgccggcgcagtcaccgattcccagaaccttctgtccggtcagtttccagtgtacgtagccctccagcgtgattaagtaatcgatctccggcacgtgcggctctttttttaagattgcctgatataaatgggcgatgctccacctctgtggaatgtgatattgaaacagcttcgtcagtttttccgaagcttcttccgtcatggtatttctccaggtacggaatggaaccagaatttcccctgccctgttgaaagccatataaccgtgcatcatggcagaaattccgatggaacctacggtggtcagcgtcacaccgtaccgcgccttcacgtcctccttaagctttgcaaaactgtcctgaacaccttcccagatgtcctccagagtatacgtccagacaccttccaccagccggttctcccagtcatggcttccggaggcaactggcttctggtgctcatccaccagcaccgccttgatccgtgtagatcccagctctattcccagcgccgttctgccatttatcatgttccggcatacttcctcctgcatcgcttcttctttttccttaaaaatacttgtcatagttttataccccttcatgattcagatacgctctaaagcatctgtcgataggaaactgagttccatctgagttcgtttttgagaccgcggatcgttgtgtcctcgtcaatgaagacagcctcgatccccatggaagcagcccagtctcccatctgttctgccgtcaaatcgtaggagaatgccgtatggtgggcaccgcctgccagaatccatgcttcggctcctgtctttaagtttggttccggagtccagaacgccgtggcaaccggaagcttcggcatgggcttttccacctttttgcagttcacggtattgatgataaggcggaatctgctgcctaaatctaccagcgacgtggccaccgccctgccttccttcgccgtaaatacgagacgggccggatcctccctgtctcccatggagagcgggcataccttgactgcaatgcggctgccggcgatagacgggcatacctccagcatatgcgcctgtaagattccctcttttccgggaaccagattgtaggtgtagtcctccataaaggacgttcccttcgccccttccattcctgccgtcatgattttcatcaggcggaccatggcggctgttttccagtctccctctccgccgaagccgtagcccttttccatcagacgctgaattgccagacccggaagctgttttaaggaacccaggtctccgaaatgagtaacgattgcctgataattcttctcttccaggaacttctcaaatcccagttcgatctgcgcctgtaccgccacatggcgcttaaattccgcagcgtctcttccttccagaagaatatcgtatctgtcgtaatactcctccaccagagcgcttacatcgccagccggaatctcttttacatagtctgcgatctcattgaccggataggcgtcgatctcccagccgaacttcatctgggcttccaccttgtcaccttcggttacagccacatttctcatattgtcggctacgcggaccacacggatatggctgctttccatgacgccaaccgcagttctcatccaggaaccgatttccgtctgaaccgttttgtcatcccagaaaccgacgatgacctttctctcgatgcccattctcgtcaccatatgaccgaactcccggtcgccgtgagcggactggttctcattcataaaatccatatcgatcgtgtcgtaagggatctcctgattaaactgggtatgtaagtgaaggagcggttttctgtattcctgaagccctaagatccaggatttggccggtgaaaatgtatgcatccacgtaatgacacccgcgcactccccgtcccggttggcctcgttaaacagcgtgcggatcgaggtattgtcaatcagggtcggcttccagaccacctcatagggaagaagtcccgactgattcagcccctccacgatgattctggaatgctcggccacctttctcaggcactcgtctccgtaaaggtcctgggaacccgtggcaaaccaaaacttgtatgctttcatctccataaaaaaatcctccttatcactgatattattatactataacagtagcacttgtaccatagtgtgaacaagttgtttttttccagttgttaatctggttgttttcttctcagttataagttaaaataacagcaggcttcacagcaaattcagatacaggaggtaacaatgaaaaaaaagtttcgtggattttcttttaaaagcagacgtttgacagcagtcatactgctgtccgttttcttttccagtgaggtgctgccgttaacgcctgtcttagaggctatggccattcccacagaatcccgcatcctttcatcattctacgattcagaagatgaagacctgtgggaaaaaatagaagcccacggagatgtgcttctgacctttccaagccagattcattctacgatctcttccccggaagacacagacgtttttaactttacgctggaggacccggaggacgtgatacttaccctggaatcatctgagccctgccaggttgtactgtctgatcatggagttgtggtggaagaatccagcctgcctcatgaccagagtattgaaagagccggtctcaccgcaggtacatacacagtaacagtaagtcctcagcccggaacagactacgcggaatatgagcttaagatacggcgccagaccgacaaaactgtaatgccggattattcggaggcacatatcgccggagtcaccttcaataaacgctctccttaccgttggatggatctggaagacgatgaactggaccgcggcggcagttccatagaagtactcaattacctggcccactggcaggggcctgtaaaaaattccgcagctccctatcccaatgatggaagctacatggagacacccagcaattatataaaatatgttgatgcctcccggacctcccgggaataccatattccgaacgcttatatgctgccgaccagcgataccgaaggatataaagagcactggaagaatgccattatgacttacagcgcaattcactccggactgtatttcctgcccccttactatacgtccgctgaacccggatatctttatcttccacctgaactttcagatgaactaatgggtggccatgcaactacgattgtcggctgggacgattctgtacccaaagaaaaatttacggtcagttccggaagcaatgcatggactcctgaggaggacggggcctggatctgcaaagactcttacggaacagatccaatattaacggacggaacaggatactattatatttcctatgaggatgcctttctcggatatcccggaatgttggctgttgtctatccagccggtgaacgtattgataactacagccatatgtacagcaattccgccaatggatccatcgatctgcctctggaggattatacagaactgatattgtcacaggtattccatactggacatgcccctgaaatgctgcgggctgccggttttatcttgtccaacccggatttctcctatcggatctatgtaagaatcggagaagataaaccttttttagcaaaatctggatatgaaaaatacggaggatttcatacggagcgcctggataccggtattctgcttcccgctgaaaccgagtttgaagtcattgtcaaaatccttattccggaagacaggcaaaatatattacgtttcttttttgcacacaacacgcccgggtggattgacgggattaaaagccagaagggaatctcctatcagtacgaacttttggaggatggtacgtgggagaggcatgatatctcggaaaacggactttacccctccatatttgcttataccaacgctccttccatgaaggagaagatcaccctgaccaatatccgtgaacctttatccagcccggccaatgcgaatcaaacagaacgcatgatctcttccggttccaatgcggccaaaaggccgtcactgtccgaagatggaatgaggacattgccaaatcctctcagtattgctgcggctccgcttcatgtaaaccttccttcctcctatgacttaagggatgaaaaccaggttacagttccaaagcatcagggaatcagcagtctgtgctggacctttgcggctgcagcggccatggagagcgggtatttaaagggcggctcaaacatggtaaattaccctggcggcctgaacctgtattctgaggacggcgctgcaaaaaacgggaaaatcaaactggcattagctcctggtgaggagcttccgattgatttcactgctacgctgttctctgacagcgaatacttcaaccccggcactgaccagatttactgggagattgccggagacatgagcagtatcgaggccggggatatcctctcagagagtggggaatccgtgcatgtactgactgccaggtcagccggaaccgtccgcgtaaccgcagtcagtctggctgaccacagccttcgaacttcctgcaccgttgaaatcacagagaagattccagcgaaggtacatttagacagggaatctctcacactgactcagggggagacctgcaagcttcaggtaacggtagaatcagacgaggaggtaaccgtattcttctcctccgatcatccatccattgccgatgtcagccctgagggagaaatactggccctccgtcccggaactgccgtcatcaccgcgagggccggcgaggggtatgcctcctgtaccgtgaccgttacgcgccgctcctcctcttctgacagcagcagcgggaattcctattctccggctggtcccggcagctactcaggattcattccgagcacatctattacatctgataccacaagcggtacgtggattctgaacagcacaggctggtggcttcagagagaggacggaacatatccatcttcctcctgggaaaggattaacgggaaatggtactattttaaagagagcggatatatcgccgccggctggatcaatcaaaacggcttctggtattatctgagcgaagatgctccttcctgcggccagatggccaccggctggattttcgatccggcatacggaggctggttctatctgaaaccggatggcaccatggtcacaggctggaatacaattgacggaaaacaatattattttaaccccgtatccgatggtaccaaaggccggatggctgaagatacagttttagaggacggaacccgcgtagggaaagacgaggctaaaacagaataaacgaaagccgccggcacagtatatcagtatatcgcgggataaaagtatagccgcaatcgtttctccattgacaaagagaaacgattgcggctaaccgccggtatatctttacccaataccatctgcctccgggagaaccagtccaagcaaaacagctgctgtacagccggccgcttttgagatcagcagcacaggcagcatatccggttccgtgctcactgtaaatcccagatgagccgccagcatggaggccgcgcttaccatataagccacattgaccagctttcctttctcattcatatccttcatcatggccagtgccggaatgggactcacaatgcttaccaaaagtcctaatacactgatgctgtccagtccgatttttgctcccaggaccgtacacggcctctttagtattctctgcagaaattccgtcaccggaagacttcccagaagcactacaccgatagacgataccaccgccatggcctcctcgacaggagccataccgggtatcaccacaaagccagtcatatatgtaaccgctgccagcacaagccctgcagttatgactgcccggattaaaacagcgaacacttcaaaccccttcaccatgccatcggggacacggtacagaccaattcccaacaaaagtgccagaaccagaacaggaagattctgatgaagaatctcccaaaaccccaggccgcacacagcccctccggcaatcagcgccgccggcatggctgccagccccagcatgattcctctggcaaatacagtcctgtctctctcttcgatcagacccatccccaccggaacagtaaaaacaatcgtacaaccaaacacggaagccgccacgattcccgcataccttccgatcatcggattctcagccagttccatagagagctggtatccgcccatatcaatcgccagaagacttccaaacatggccggatccacacccaaaaaacggtaaaccggaatgatcagcttccctaacgtcccggataccagcggagccagacagatgatccccaccatcgacagcgcggtaggtcccagatactgaaagccttcttcgaatttttttccatatccaaagcggttccccatgatgcggtcaattccgccagctacagcgccaagcgccataatgatcataataatccggtttatcatatctttatctccaaaatcaaatggtatcgttcaccggacactgtcggctgtgtctcattgtaccacaaatgatccattcggaaaagacctcaccagaggatccctgtatctcatcgaacatgtttttcctcattacttaccagaaaataagctttctctatcctgttcagaatctcctccatcacacatttcggaaccgctgcgttaaggcggatatagccgcgccctgcttctccaaaatgactgcctccatatacagatactttcgccttctccaaaaaaagctggagaatctgttcttccgtcagccctgtttttctgtaatcaatccatgccagaaaggttccttccggctccgtcagttcgaataacggcatgttttcctttaaatatccagtaagataccgcatgttttcatccaggcggtgatttaattcccgtttccactgttcacactcccggtatgcaggttcaatcactgctgctgcaaatatatttggattatggaatccctcccggtctacagtcttcttcattgcctgacgcatggaatcatccggtatgatcatattagaaaacataattcccggaatgttaaacgtcttcgtaacagactggtatacaatcatcttctttctcatctgttcagagagcgacaggatactgcaaaacttcctgccctgccttacgatatcggcgtgaatttcatcagagagcagcagcagatcatggcgcaggcagaatgactccaccgctctcagttcagccgcctcccatacacggcctgtcggattatggggattacacagaatcatcattttcacagaagaatccatctctgattccagtgcactcagattcatgttccagcgtgctccattccactctaacggactctctatcatggttctgtcatgttttttcaccgcgtccgtgagtgccggataagccggcgtatgaacaataattttatctccaggcttcgtaaacgtctccacggccatattcagaccaatattaatccgcggtgagaacaggatccattcgtctttgacaagacagccgtactccctttgtatccactctctgacaacagccgggtagcaggacggcagattggtgtaaccaaatattccgtgatccgtcaccttccggcacgcttcccgaatcggtgccggcacccgaaaatccatatcggccacgccgcagtgcagaacatcttttccgtatttttcatccatttcatcgtattttgcgcagttggttccccttctgttaaccacctcatcaaaataagctctttccatttttcgcacctacccctttacggaaccggcaatcaggctctgctgcacctgtctgcttaaaatcacatagataataatgatagggaaggtggctaccaccagtcctgccccaatcggtccccagtctgtcgtgtactgtcctactaaagactgtatgccaaccgtcagcgtccggtatgccggtttactgataaacacgaccgcaaacatcagctcgttccatgactgcagaaacgtaaaaatggcaattgttgccagtgacggtttcatgagcgggagtataatctgaataaatatcttgtaaatactgcagccgtcaatacatgcggcttcctccagttccaccggaatagaggagataaaaccggaactgatcataatcgccataggcactgcaaacgccgaatacggaataatcaggcaccagtaggtattaattaaatgcacctgcctcatcataataaacaccggaagcagtgctgcatgaatcggtatggtgattcccatgataaatatcagctggaaggtcttccgaagcttccatttcatacgaatcaaagcataggaggccatcaaagaagcgatacatacaattaaaattgtggctgccgtaacgataatactgttagccagatatcgccctacatttccgcccataaatgcatgagtgtaattttcaaatcgccagactttagggagaccaaccatgtttccctgaaaaatctccgtgttgtcttttagagaaaaagtcaaaagccagtataaaggaaatatctgaatcgccgcccaaaatatcaggcaggcctgtataattaccctggataattttatttttttcatacgtcctcccctactcattgtcacgaaatgccttgcgtatcaaccatgcgaaaaggaagcattccagtataatgaaaattgccatcgagcttccatagccatacatatttctggagaatatggtttcaaccatcaatgtactcggaagctggctcgcccctgccggtccgccgcctgtcatgacatagacaagatcgaaattcttaagagaaccaaccactgcaaaagtcacgcagaccttcagaattggtttcatcagcgggatggtaatatgaagagcggtctgaattccattggcaccgtcaatacgggccgcttcaaagatctcctccgagatagaacggacagaggcgtacatcagaagcatatggtatccgatatattgccacagaaccgggacaatcacggcaaagattacctttttcgtatctcccagccagtttccggcaagcttatccagccccatggatcttaacactgtgttgagaagtccatactgcggattgtatatcttcatccagagctgcccgataaccaccgtagaaatcaaaaccgggataaagtatacactgacataaaagcgctctccctttacgccacgggccagaatcagtgccagaatgagagaaatcggaagctgcacaaagacagatccggccgcaaaaatcaaagagttcttcactgccctccagaagccgtcactgttggtgaggaacagttctttataattatcgaatccagtaaatacctttttcccgattccgtcccattctgtaagactgtacgtcatggacataaaaatcggcactatgataatggttaaaaacagaatcagcgcaggaaacaggaaaataaacacagcctttttatttgacagtactcggttcacaaaaaacctccattctttttcatgaaggggactgtctccagccccctttccgtttgtttactgattcagtttctgcagttcagccacatactgctccggcgtaatacttccgacaaatagttcctgaagcttgtttaaatataccgttgcatcttttccttccaacagattatcccaccagattgtatagcttgtggcatcctttgtgaaatcgtaaatttccattaaaagcggattgatttccgactcatccacatctacattcacatacggaaggatgctggagccaatcttatattttccgattgcaagttcataagaaatgtactgggcaacctcggttgtaagtttcggatcctttgtagcagcactgaccgcaaatgccgtatccggtcctcctgtaaaatctgtcactccggattttccgtcctttaataccgggaatgggaatactccgatttttccctgtaccagggaggaatccttatatactctcgttgccgtccagcttccgtttaaatacatcggtatctgcccctgaaggaacggaacctctgattcctctcttgaaataccggcagatccttccggaaatgcacccatatctaccagctttttcagacactgggctgcctctaaaaagcccgggtcatcaaatcctgtttcttttcctgtagcagcctttacgccttcgcttccaacagcccgaagtgccagaagatcgtgatacatggcaatcgtccacggttctttaccgcctacagtcaacggagtaattccattatcaaggaatgtctggcacactgtcagaaaatcatcaaacgtctcggggacttccagattcagattttcgaacatctctttattataaaacatacatgctaccgactgatctgtcgtaagcgcatacgtttttccatcgaactgaaaaccggtcagcgtagacggccccagatgtgatttgaaatcatcagtcagataatcgtccagtgcctctacctttcctgcttctacaaacggcttgataaaaccgtgtccccatgtataaaagatgtccggagtctcgtttgctgcaatggcggcctttaatttcatcttatatgcttcattttcagccgtatcggactcaattttaacatggaatttttcttctgcatctttcaccacctgatcaataatcgccttattaggatccgtatctcctccaaatatgtgccacagttttataacgggcacttcctccgtcccggcatttgcctcctgggtggtttccttaaccgtttccgctccggtggtatccccaccggctgtattgtttcctgtccctgtactgcaggcagtcaggcccaaagccattgtacccgcaagtgcaagtgccgtgattgttcgaattgttttctttttcatcttccgctcctccaattttgatattaattacctgctgtttgattcaaaagcgcgcccttgtgaatgtaactctattctacacattcctgcgtgttcatgaaagagagagattttactgtttctggtgattaacttactatttagcgaaaggatcaattgccatatagtaaatcggttactatctctagcagattttttacttcatttttcgctttgtttacttttaaaattctccgtgatatgatgacatcatatcaggggaggaattcatttatggggaaacggaaacacaccggattaaacctgtggaactgggcgtttcacagtaaaatatcgagaaaaatcagcacggtcttttttggttttctgttactcagcgttattctgacttacttttcataccgctatgtttcaaaggactacgttctgtccaacatggagcagcattccaggcagacgctcacttcaattcgttccaatattgtggaaatggtggaaaataccaataacagctacagccttctgctgaaaagcggaatctctgatctcacaaaactcccgttaaaaccgtcggatcggaaattctatgataattatctgtttaccatcattgacagttacagccatctcgactctatctatataatgaatttaaaaggacagctttacggggttgataagtttggcattaagacaccggttattcattctgtcacagaggctccctggtatcaaatcgccatggaggcgaagggcagctgtattctctctcttcatgccggtaacattttccttcccgactactcggaagattttatgtcagcaatccgggttatcaatgatctggaaacccagaaaccgattggattctctattatgaatatcccaacgcgctctattaaccagatctttgagcacgtttttaatccatcggatatagaaatcactctgtatgacaactcaggagaaatcatcagcacttacggcaatataaaggaagggggagatcaccacaggatctgccgtttcatcggccctgactcttcatactacagcaccagcggtcagggttctctgtcagctggaatctatattcctgaatatcagtggaaattaactgccaccttccctttaaaatacgagtccacactcagcacctccctgcttcatatatccttctggatttttttcatcaatatggtgcttatgctgatctgcgtcattatcattgcgaaatccattcagactccggtttctcagctgatccaggctatggggcgcgctgaaaatggaaattttgaacccgttgccgttcgtcatccggacagcgaactggggctcctggaaattcattacaaccatttaactgaacggcttaaatttctcatggacagcctggtccaggaacagaaactaaagcggaagacggagctgcgtgctcttcaggagcaaatgaaacctcattttctgtataatactctggataccatcgggtacattgtactcactggagatacctgccaggcctatgacgccatcactgcactgggcagtttttaccgtcaaagtctgagcaggggaaaacagtttataaccctggagcaggagctgcagatcataaaggattacacgtcccttctctccctgcgctacgaggaattatttaccgtaacctatgatgtggatgaaacgctgtaccagcatgagattataaaactccttcttcagccactggttgaaaattcggtttatcacgggatcaaacccctgggagagcccggcatcatcataatttctgtcaaacgtcagaacgaactgatctgtctgacggtctccgacaacggagtaggaatggacgaaaatctgctgcaaagcctgcgttcttccagtccctcgcccagggacagcttcggtctggcaggtacaattgaacgggtccatatttcttaccctgaaaaaggtgccgtagaactgcacagccaaaaagggaagggaacttctgtcaccattaaaataccattttaggaggactgacaaaatgtatcagccacagcccataaaagtgatgattgtagatgatgaagataagatgaggggactgcttaagatctgtatcccatggaacgaactggattatgttatcaccgatgatgtttccagcgcaaaccaggcattggaactgatcgccgagcgaaaaccggatgtcatcatcactgatattgaaatgccgtttataaatggcctggattttgccgaaatggttctggaagaatacccacacattaaaatcattatccttaccgcgcatgatgaatttgattatgccaaacagggccttgaaattggaatatccagctttctgttaaagcccatcaaaagagaagagctgatccggacagtaaccgaaatacgcaattcaatccgggaagaacagaaaaaactctatcagcatgaacttctgcaaaaaaagctgaacgaaaaccgggactatattatacaaaattttttaagcaatatgatggtcagcagcctctcttccgattacctgtgggagaacttaaattattaccagatcccgctgcatcgtgattccggtttcttcaatatccttcttctgacactgaatgtcagccaggacattgaagaaagtattatgcagcaattccagtgccgggaaatccttcatactgccgcggaaagaatcaatggcctgctggtctttcaggatattcatatgaatcttgtcttactgactgaaaaccgaaaaatcaatctgtacaattacggcttccatttttccaccctgctgatggataaactggggattaaatcctatgtaggtgtcgggacaccggtagagcgcctcgaggatatccgaagttcctaccgtcaggcttaccaaaactcccaggtcgccaaatacagccataacaaatcatttctggccaacccgccccaggaacagaatcagcaggaactgcagaatctgatcaacacagtaatggaagagcttcccctctttatgcagcttccccaggaggatactgcactgcagcgcgtcgaagcggcctatgattcgctggaacgtattcccagccatgttctttccgacgtaatggtactgtctctttccattgttaatattgtgcttgcaacgctgagggacaaaggaatctcctacaatgaaatatataatacggatcacctgccctacacacatattctgaagcttactgatgaaaaagatatccggcaatacgttcttcagatggtgcgtttcactctttatcaggtaaatttatataccgatgcaaggggaaacaaactcatccacacgattttgcaatatctcaacgagaatctttccaaatcaactctgacactgaagaaaattgcagaaatcaattacgtcaacccgtcctatttgagccgtattttcaaagaagtcactcagatgaattttgtggattacttagcaaccttacggatcgaaaaagcgaaaagattactgcagaccggaaacctccggatctatgaaattgcagaatctgtcggaatcagcgatcccaactatttttcgaaactgtttaaaaaatatacaaatatgacaccggcccagtacaaagaagagatacaccgacaggaggatttttaagatggtagatttttcaatgttatcagactatattatcagcataagaaggagaatacacaaatgtccggaactgagcgggcaggaattccagacccagcgcctgatcagagatgaactggaaaaaatgggaattccccaccgtaccctgcatgaaaccgacgttctggctgagattaccggtctacagacgagcccggctgaactcaccggttcccggcccaatacggttgaatttcgtgattacgagacaggtaatcacgctaaaacagtacttctgcgcgccgatatggatgcgcttccgcttactgaaaaatcagattcatcgtatacttcacagtttccgggcgttatgcatgcctgcggacacgattcccataccgccatgctgctgggtgcagcgaggcttctgcaggacagccgggaccttttttccggcacagtacggctgatgtttcagccggcggaagaaaccggaaaagaaaccagaacgctgatcgatcacggtatgctggatcgtgtggatactgtattcgccctccatgtagagcctgatcttccatccgggaacatttgcattctgccaggcccctgtatggcaggcgtcgatgacttttctatccgccttaccagtcccggaggtcatggggccacccctcatctggggtctgataccctccttgcaggtgcccacctggcaatcaatctccaacagatcatcagcagagaaattgatcctcagaaaccggctgttcttaccattggcgtctttcaagcaggaacaaaagtaaatctgctggcccaggaagctgttttatccggaaacatccgtttctttgacaaggagctcagtgattactttaaagaatcgcttactcgttacagcgcacacacagcttccatgttccgctgttctttcgaggtcacctatacgccttccctgctcccgacagtcaatgatgccgcttgctgcggcacagccaaaagagcggcattgactgtatggggaaaagataacctcatagaacgccctgccagcatgacctccgaagatttttcccgatacttagaggcagtccccggcgtcatggtatttctgggaacgagcgacggtacccggaaaacatcctggccgctgcatcacgagtgttttgatctggacgaatcagctttattaaacggcagccgtctctatgcggcatatgcattagaatggttaaatgagcatgtagtttaaattctcacctaaaattcccggaacgatgatggcatttcccgaagacttatgataaaataagaatacttatctaatatcgcctgtctatattcccgatgccttccaggcagcccttcagattgatccatgattaaattggaaccggaatatcagacagcatggaatcatttcaaaagaaactcgacaccttcacagaaagaggataaccaatgtcaaacgaacttacacggtgcgactgggccgcccatgatatcctgaaccaggaatatcacgataacgaatggggcaaacccgttcacgacgaaagaacactatttaaaatgctgattctggaagggatgcaggcaggattaagctggattaccattctgaagaagcgcgaagcctttataaaagcctttgatgatttcgatccggccgtcatcagcagctatggcgatgaaaagatagaagagcttatgcagaacgcgggaattgtccgaaaccgcctaaagatcaacgcggccatcaccaacgccagagcttactttgctctgtgtgagaaatacggttcgctcgaacggttcctatggtcttacgtagataacaagcccattaagaacgcctggaaaaccatgtctgacattccagccagcacgccgttagcagaaaaaatcagcagggatttaaaaaatctgggattcaaatttgtggggcccaccattatctacgcctatatgcagtcggttggactggtcaatgaccatctgacctcctgtttctgttatgaacgggaaacttcggaatgacagatcatgttttagaattctaaagaaaagaagcgcatttccagtctattcaggaccagaaacagcgcttcttatatttttattttcttttccataactctctgccttctacagcagattcttcggtccaaatccaaccggcagcaattccttcagcgtataaatctcatactcttccctgccggaaggcagtataatctgaaatgtctccggatcgcaaaattccatcatgacctggcggcagacgccgcagggagccgtcagtccagacggaatcccatccttcccgccaacgatacagatcgcctgaaactctctcacaccttcgctgacagctttgaaaaatgcagtccgctccgcacagttgctgggtgtatacgccgcgttttcaatgttgcatccctgatagatcactccgtcagccgtaagaagcgctgctccgacttgaaagccggaatagggtgtatatgcctttgccatggccgaaaatgcctgggatatcagttcctccaccggaagcttttccttaagtgcagccagttcctccgtacgatccataacggcctccttttcttctccaaacagtccggtattcctaccgttattaataacccccgtcactcttctcctgtttcaccagcttaatcatccggctggttcccaggcgctccgcgcccagttccaggaatttttcagcgtcctcgatggaagagattcctcctgcggccttaatcttcacattcttgcccacgtgtgcccgaaagagggccacatcatcgaaggtcgccccggctttggaaaatccggtggaggtcttgataaagtcggcgccggaacgggtcaccacctcgcacattttaattttttcctcctccgtaagaaggcaggtctcgatgataacctttaatatcttatctccgcagcagccctttaaagtacggatttcctcttccacctcgtcatattttccgtcttttacccagccgatgttgatgaccatgtcaatctcgtcggctccgtctgcaatagcgtccttcgtctcaaatgccttgactgcggtagttgcataaccattgggaaaaccgatgactgtgcagaccgccatgcggtccttcatatactcttttgccgccttcacataagaaggcggaatgcagaccgatgcggtcccgtattccatagcctcatcacatatttttttgatttcctcccatgtggctgtctgggttaacagagtatgatccacatattttaacatttcttttccgtccataatttcctcctgtaaactaattttaccgcaaagtgtgacgctcatctgccggaaaacaatgtttggacgcgttctacagttccagcgcgatctccatcattttcccgaaaccgagctgacgctcctcggcgcttaatttctcctctccatagatgagatccgaaattgtcagcagacagagcgctttctttcccgccgctgccgcgttcatatacagcgccgccgcttccatctctacggccagcacgcccatgcttctccatttatcattcacggtagtatccgcattgtagaaaatgtcggaagaaagaatattgcctactaccacattcgttccctgtgctttcgccgtatccaccgctttcgccagcagaccgtagtcggcaatcggtgcaaatgtacccggaaggccgtactgatacgcgtaattggaatccgtacaggctcccataccgattaccacgtccatcagcttcactccatcctgcagcgctccggcagagccgatccgtataatctgctccacaccatagaaatggaacagttcatacgtgtagataccgacagacggcattcccataccgccgcccatcacggaaatctctcttcccttatacattccggtataaccgaacatgttgcgcaccgatgtcactaacaccggattttccagatacgtctctgcaatatatttggcccgcagcggatcgcccggcatcagaaccgtcttcgctatctctccctgttttgccccattgtgggcggttggtgtcacactcataattcgtctccttttccatttgctgcgctttaaccgcgccttattttttcccgttttcttcctgaatcatcagccggatcgcttctaccgctgtccggatcgccgcatccgtgtcatggacgatcggattctcaagcccctgcttcgccctctcctggttagccaaaaccaggaatactgatccagctctcaccttcagcgcgctggccacgataaacagcgccgccgactccatctcggaagccttgcagcccagctgcagccaggcgttccatttattcagcagctcatacgataccggcttcgtctccggcgaatgctggccatagaatgaatccttgcactgcacaacccctacatggtacggtttttccagtttttttgccgccgccacgagcgcgttggtcacatcaaaatcaggtaccgccggaaactcaatcggcgcatattcccggctggtgccctccatacggatggcgccgtttgcaatcaccagatcaccactctttacattcacatccataccgccgcaggtaccgatcctgataaaggtatccgcccccgacatcaccagttcctccatggcgatggaagccgacggtccgccgattcctgtggaggtaacgctgacaggcgtcccgtcaagcgttccggtatacgttacatattcccggttgtccgcgatcagcttcggatcatcaaaatattttgctatcagcgcgcaccgcttcggatcacccggcataatcacataccggcccacatcaccctttcctacctggatgtgatactgttttccttcattttccgaataatttgtcataaataacctccctttctctttgcaaattaaatatcattctcatcgatcttatccgccatggccaatttaattctctgatactgttcctcactgatgataattcctcttccctcccgggaaatgtatccttcatcctccatctggctgatgcaccggttcaccgtcttcacacacagccccgtgctgttggacaaatcctttctcgtcaaatggatccggcagactccccgtctggcagaatcccggtaaatctgcataaacaaaagaaaaagccggtcaataccctgaaggaagagaaagagacgttccttcctcacctgctctaccagataaacgctcatggccttcacctgttccagcaccgcgtgaatatccgtcagcatccaccggctgaactggtccttggacacacagaggaaccggcagtccgtctccgtcattaaagtcgtcttatacagatcataccccataagaaattccatggctccaaacacctcaatcggataaaagcgggtataatcgtacgccacctcctgaatccggtagtccgttgctttcacaatcccctctaccagaatgtatacagtgtccacatgcgcgttttcatggataaacgtggttccctttttcaggcgcacgatctgaaacgcttccagcagccacttcggcgcattcgccagataattattcaaataatcccgttcctcactgcgcagctcattaatcaatgccacaacatcattcatagtctcccccctttcctccatattcactgtcctctccctctagtttgcatcatttcacccaaaaagtctaccattcccccacaaattttacaatattttattccccatttctcctatccacacactctacccatccacgcattctatccatccacgcattctatccatcccccagcctcccgccagtccaatccgcctgtgacgggaagtggacttttccgtacccttgccggaaaaaggcggaagcgggctggcaggagacggcgattttttccgaagtgtgatgggacttagggcggacaggagccaaacggggggcagattttcgtttacaggacgaaaatctgagggcactgagagcgaactcatcaagagttcggtcgaattgcccggtacccccgtttggctcctgtccgcccttagtcccgtccgctttggaaacatgagccgtctcctgcccgcccgcttccgtctttttcctcaccacctgcgccaaagtccacttcccatcacaggcggattggactggcgggaggcgtccccttccctcttatcttgcccccttctcatacggctgcccgctcgccttcggcgcagaggacctgcccacaaacagaatcaggatcacaatcgtaataaaatacggcagcatggccagaatctgtgacggaaccgcaaagtttccgcctcccagagtgaccgtaagcgcctgagccgccccgaacagcaggcaggcaccgtacgccccgtgaggagtccatttaccaaatataaccgccgccagtgcgataaatccctggccgctgatggcggtcggtgtaaactggggaataatagccagagtcatggcggctccgccaaatcccgccaacactcctgaaaccagaacacagagatagcggatcacgtacacgtgaatgcccatggtatccgcggccgccggatgctcccccacagccctgatgtgaagcccccatttcgtcttatacagaaagaaccagataaacaccgccagcagaaacgcaatgacaaccgttacgtccacatttaaattctgaagggccccctgtactttaagtcctccaaacagcttcggaatcttattcggaaccggctgtgacatggtcgcgccgtcaaataaaagacggcagacgaagagcgccacgcccggtccgattaagttaatggcgataccggagattgtctgatccgctttgcaggtaatcgcagcaaacgcatgaagaagcgcgatcagtccgccggccagccctgcggcaataaatcccgcccaggcgcttcccgagtaatagcccaccgtggctcccgtaactgctccaatcgtcatcattccctcaatacccaggtttgtcactccggaccgctcagacacgactccgcctaatgcggcgaaaaccagaggggttgaatacataagtgtaatgccgataaacagcgtcagactgttaatcatgtttttttcctcccttcgacaaacgttccaccagcggcggaataatatgggtcagcgcaacaaagaacacaatgatgccgatgacaatgttgatgatctcagagggcgcgcccacctcgtactgcagtgtctggccgccgtagataagaccgccgaacagcagtcccgcaaagatacagccgaccggggagcttgccgcgatcagacagactgccagcccgttaaagcctgtattttcaaatgccgccagcgtagcgattccatggggagagttgccagttatataaagcgacgccgccagcccgcagatcgcaccggaaatcagcatggaatgaagaatgttccggttcacattaattcccgtaaactctgccgcaaaccggttggcccccaccgcgcgaagttcaaatccctttgcagtcttataaagaagaaaggacaccagcacagccaggatgacggcaatgataaatccggcgttgacgtctgtctttaagatcgtattgcgcaggaactcattctgcatcagggcagctttcccttcttccgtcgccttgtaatttccaagaatcatcgtatagccggagcggttgatcgcatacgtaccgatggtatccggcttatggaaacgctccagaccacacacataattggagaaatagagtgcaatccagttgagcatgatactggtgagaacctcatggataccgaatcttgccttcagaaatccggcgattcctccatacaccgcccccgccgcagctccagcgaaaagaacaagcggaatctgaatgaccggcgggaaatcacagacaattcccactaccgtagccgcaacacagcccataataaactggccttccgcaccgatgttgaagagtccggtcttgaatgcaaatgccactccgattccggtcagaatcagcggcgtacttttgataatcacgttggacatatgcttggggctggaaaagacgccgttcagcaggactcccagcgagcgaaccggcggatacccgactgccgccaggatgattccggctaccacaaaaccaaagaagatggcaatcagagtcatcgtaagcggcttcttcaaaatatgaacagttttatccatgattcttccctcctgccatcaacaggcctatcgtattttcatccacggtcccctgcggaaacgtatcctggatttttccatcgtaaatcaccgcgatggtatcggagacattcattacctcgtccagctcaaaggagattaagagcaccgcttttcccttgtctctctcgcggatcagcgtcctgtgcaccgtctcgatggctcccacgtccagtccccgtgtcggctgaactgcaatcagtacatccggattcatggagatttcacggccaatgatcaccttctgctggtttccgccggataaaccgcctgcccgtttcgaaccgcagtcctccggcctcacgtcaaattcctcgatcagctttttcgtaaactgctccatctctttcttattcaggatgccctttctggaaaatggttcctggcggtatcgctccagcacggcattttcattgacggagaaatcgaggaccaggccgcgcttctgccggtcctccggtattgtgctgatgccgctgtcaatgacgctgcgcggatttgtgttgccaaccgacttcccatttaccgtaatggtccccctctccgcgggaacgaggcagttaattgcctcgatcagctccttctggccgttgccgtcaataccggcaattcccacgatttcccctttcctcacggttaagtttaagccttttaccgcgtccagcttcctttcatttttcaccaccagatccttaatctccagcacggctttccccggctttgccggcgtcttgtctaccaccagctttacctcatggcctaccatgagcgtcgccagctcctgctccgtcacctcttcgaccggtatcgtgcgaatgtactctccgcggcggataatggtgcaggtgtcggaggaggccttgatttccttcagcttgtgggtgataatgatgatggcctttccgtcatccaccagattgtgcatgatggaaagaagatcctcgatttcctgaggggtcagaaccgcggtgggctcatctaagatcagcagctcggctccccggtataacgcctttaaaatctccacacgctgctgcattcccacggaaatatcactgatctttgcatccggatcaacttccagaccgtacttttcaacgattcccagaatctgttttctggccttcctcatatccacgattcctgcgtgggaggtggtctcatttccaagaataatgttctgtgtcaccgtaaaatcctctaccagcataaaatgctggtgaaccatgccgatgccgtttgctatcgccgcattgggatttttaatatccgtcttcttaccgcctatgtaaatctcgccctcgtcggcctgatacagaccgtacagcacattcatcagtgtactttttcccgccccattttcacccagcagggaatggatgctgcccttttttacgtccagattcatatcctttaaagcataaaacgccccgaaacgcttcgtgatcccgtgcatctgaaccgcatagtcgctgctcaccgtggccatctcgatttctcctttcaaatttacaccgcagtccctattctgctgtgaatgcttcgtacgtttcttttgtcgttggcggaaccagttccccattcttgatggattccgctacctttaatgtatcctcgtagacgccgtcggccatgttgccgtgttcctccggaatgcccacgcagtcttcctttaaaccgaaggtcagagtctgtccgccgatcgttttgccttccatggcttcgatggaaacttccttaactgcttttcctaccagcttaagcgctgaggtcagaacattctcaggagctaaataagcctgatctctgtccacaccgatcacccatttgtcagcttccttggcggcctcgataacgccggttccgcttccgcctgccgcatggtagatcacgtcacagccgtctgaatacatctttgtggcaatggccttcccttttgccgcatcgctgaagctctccgcatactggacggatatgtcgatatccctgcccagttcctttgccgcatacttgacgccagcctcatacccgtactggaactggtcgatcagaccggaggagattcctcccacgaagccgacctttccggtctccgtcatgcgccccgctacgtagccaaccataaaagagggctcctccgcccggaacataacccccgttacgttggccggcgtatcatcgtaggcgttatcaatgattgcatactgaatatccggattgctgtctgcagcttccagaactgcgtctgcacaggcataacccacgccccacaaaaggttggcgccgttgtcccccagtctctccaggttcgtaacaaaatcggaggcctgtttcgattcaatatagtttacttccacgcctttttcttcttttaactcggtcaggccttcccacgcagactggttgaaggactgatcgttaattccgcctgtatccgtgatcatggcaacggaaaaactgctcttgccttccgatgtcccgctgtctgcatttcctgcattttctgtcttcgtgttttctgtcttcgcgctctctgccgtcgtacttcctgtttttgcacctccgcatgctgtaagagacagtgctactactgctgttaatccgaatacaattcctcttctgagcttcataatatcaattcctccatttacattttatagttttattttaaatagtttttataccacctgaatctcctgaaatccgcatctgacagccagatttctcagttcttccatccgctccggcgacgggctgttccgtttctccagcctgcccctcacgccatacttacggaacgtaatcagcttcagccggaactcctttaaatacggggctgccgcgtcagccacaccggcgataaccgcttccatatctgtctcaccatccagacagaccagtctcacttcatacagctttttctgttccgccaggtatattaaatttttctttacaacggaaccgtcgccgcctgtcagccgtttaaagacctcataatcccatgcctttacatccagcatcacctgatccgtaaccgccatgagttccggatattcagacagatcgacacagccgttgctgtccgagaaacacgtaagccccgctttccccgccttccggtagagttccgtcaaaaactccgggtacagcgtacattcgccgccggagaccgtgatcccctggataaacggcatattatcttcgatctctctccacacttcctctgcactcattcggcgtaccttcggggaagcgaaatagggacagacacgaatacagttgtcacactggatacacaatttctcattccatacaatccgcttttctgatgactccccgcctccctcttccatggaaagcgctccggccgggcactgcccggcgcagattccgcaggcgcggcataactgctgtgtctccggattatggcagtaggcgcaggcaatgttgcagccctgtacaaatacggaagttctgcagcccgggccatccacgacactcagcgggataattttgttgattggcgcctcgggagaaaaccgggtcataacgccctcaccttcctgttttccagatgtgcattccggtaattgtcgccgccgagatacacggtattttgaagtaccgcttctccctcgtagtatttctccatctcactgcgctttaccaaatatccggtgattctgacgagatcgctgtccgaggcgtaaaagcttatgtatttatcaccgagagagaacgctccttttacgatgtccagcatggcagccggattatttcttcctgtcggatcaaaggagaagatatccgcacagccggttgggaaaaagcggtggaacctggcgctgtggcgaaggtggtcatacatgcgttccggctccatcccaaccgggattctcaccccggaggtgatgccgtggtccgaatcaatgccaacctgtgcgtgaagtgcgaagcggccgccgaatacctccgagtaaagggccttcgagtgctctgcataatctgcgatcacctgcatgatctggtcagccagatcatctgcctctttatcatgaccatagattttttccgggtcgcccatcagcatattggtgcattccgcaagcccgacgattccgaacatggcaaggaatttatccctttcaacaaatccctcccgggaaagaaatgatgtctcgaagaaattggattcctccacaagaaaccggatccgttcattcatgtaatctcccatatggcttaagcagtccggaaggagttctgttaagaactgttccctgctctctgcctccggcacaagcttcggaagtacgatcctcgtcagagtgtaggaaccgccgccaatgggaagtatgttgtagcagcttgaaatgccgtaatcttcatacgtgtccttatgcatccggtgattgcagatcgccgggttcgcacagtaaagggaagtatagagagccagttctccgtaggaatccggtgtgatgtccggatcgtactttaaggtcagattcggcaccgcattctgaagttccttttccagctttaagatgatccgtccggttctcgtctcctccggtcccagattcgcatggcagaagccatccgtaatcgtccggtcgagatagatgagaaacagcttaagcttcttctccgcctcctcatcgctcacgccttcgaggaacggttcgatcagcttatcgatatttcccaggaaaacgggatagctggtaatagaaggaacatggcggtaaaaaatctccaggaattgaagtacctcgtccagatccttcggcggatccagctgcagaaattcacacccgttcttcacagccttctcgtaatccggcatgatatatctcggccggtacggggcatgtccctcgtccagatcacagatcgctccggtctccatatagtgcctggtcctaaccggtatatccagtacctccagactgttctccgcagcatgtgccagggctaccaccttctgttcatacgtcagtcccttcgatgtgacaatgtctaaaaccttattcatgtattccacctctttcttttttcaatggtgcttatgtctctttatgttttggaatatcctcattgtagcaatggttttttcttttttaaaggacttatgtccttttacaaggaattattatccactttgtgaaaatatcacatttttacgagacgatttttaggcaaatagcagagacaaaaaggacacaagtcctcatttttcggttttttctcgtataaggcagcgtttatttatgaaaagaatgatcggaaatgaaaggattcagatgggaactgcagtcattcaggacatttttcgtagtcatgaggggtggtgacttgatgcaaaactcagaacagagagctgccgcttttatctatttttcataaccaatacttttgtactggtaaaacgcacaatttttcttttttattttttcaaagtttgtgaacacttttttgtacggatgagttatattaataatcgtaaacccccccaatacattatatagtttttgctacaccccataagaaacgaaataccttctccgaaaaaaggatcagctcccccggctgatcctttttcatattattcttgcattttcccatttctatggtaaaatacataactaactgctttggcatttccgccaaatgtgtgcacctgtaacagacaaatacataaaggagatttctaacatggaaaaaacaggcgtgaaagagtttttgaaacgaaaaaacgtcaacatcaccgtccagacctatctcattgatgcattgggtgccatggcatttggcttatttgcctcgctgctgatcggcacgatctttgcaacactgggcgacaagaccggtgtcgcattattcggcaccatcgcggcctacgcaaaaagtgcgaccggcgcggcgctgggagtatcgatcgcttatgcgctgaaggcgccgcagctggtcttattctctgccgctacagtcggaatcgccggcaacgagctgggcggaccggtgggcgcactggtcgccaccgtcgtggctgcggaactgggaaaaattgtatcaaaggaaacccgcgtcgacatcatcgtaacccccggtgtcaccatcatctccggcgtactgatcgcccagtttgttggccccggtgtggccgcctttatgacagccttcggaaacctggttaagacggccacggagatgcagcccttcttcatgggtattctggtatccggcctcatcggaatcgccttaacgctgcccatcagcagcgccgccatctgtatcatgctggcgctcgacggtctggcgggcggtgcggctacagccggctgctgcgcccagatggtcggttttgccgtcttaagcttccgtgagaacggctggggcggcctgctggcccaggggcttggcacctccatgcttcagatgggcaatatcgtaaagaatccgaaaatctggatcgcccccacactggcctcccttataaccggcccggctgccaccgtagtattccagatgaaaaatatcgaaacggcttccggtatgggaacctgcggcctggtcggccccatcggcatctataccgccatgggcggcggagcccgaatgtggaccgggatactgtttgtctgcttcctgctgcccgccgttctgacactggttttcggagcgtgtttaagaaaagccggctggattaaagagggggatttaaaactggatctgtagcaaataaacggttcgcggaaccggaacaatcagaaaataacgaatctggacctggcgttaccgctaggcccttttactcaggtaatatcatcccgaagcgcgtctatgatgctttctttttttactcttccagccgcatacttcgttgtaaaaaacacgataaagaacacactcaatgcactcactgccatactgccccacggaaccgcaaagcttacgtccgctccgccggcaatcatgcctctgcagatcagccagctgcagatccccgctgccggaagcccaatccccagagtccgcaggctgtaaaaaatacactcaaaattcatcatcttatcaaaagcacggtcagccataccaatcgaccgcagctgtgccagttcccgtctgcgcagcctgatattggtagaaatcgtgttgaatacattggcggcggcaatcagggatatcattatcacaaacacatacgaaaatacgtgaatgacaaacagaatgctgcggttttcttcaaacattttgttcacattatacagattgtaatccaccgcaatgcctgattcctgaatgatctctctcatctcagccaccgactgtgagggggtatccgaccgaaaagtcagccccattatctctccggcatcgggagcttcaaacgattcccttaactgccagggcgcaacaatcataaaaacaaaggactttttcccggaagcattcctgggaagcgtatccagcggtatcgtatcgaccaatgtaagacttatctgtttctctgatctggacggagctgaatcctgcagctttgcagggtgttcttctccgggagtcaccgacacctgcatggtgcgttctgcaaacagatcctccagcccgctctgtccgttgttcttctgcttcgtcttctccttggccacagcgatcattttggcattttgtccggtgtattcttccggagacagccccagactctcgataaagctgtaaaattccctgtcctcgataaactgaatatccatcggcagatttactgtctcctcctgtatcccagcccctgcagatttccggtaatcgtccgataaatcaccggcttttaccgcgcaggaatacgtcatcagcgtctgataagagctttccctgattccctccgcggttttcaatctgccgtaaagccggaacaattcattttcgtcgatattctgagacgtaaaacagatgtcataatccgaatttacaacagaccggttcgccccctgtttcaaacaggcgctgaatgcattggctgacacaaagagcacaacgcttaaggtgagtgaaagcacaatgctgcggcagcgttttttatttcttttaaaatttttcagcgcaagtgttccctccaggccatagatgcgcagcgccgcttttgacgttttcacgtccctggattcgactttgatttcattggtctgacggatgctttccatcacaggcctggctgctgctttcctggccggaatccaggcggcgaacagaatagttgccaggctgatcaccgctgctcccgctatggccgggccggacaccgtcagagacagcgtcaccgtgctgtaaccaaaatttttaaaatactccgctacagcagatatcaccaggctgatgctgccaatgcccataatcatgcctgtggggataccggccgcaccgatacagagcccttcaaacagcaccgagttacgcagctgtcctgccgtagctcccacggatgcgagaatgccaaactgccgcgtccgttcgcttaaagagatggtaaatgagttataaatcagaaaaatcgagcctgtcataatcagcacagtcagcatcccgcccaccgaatacagaagtgtattaaacagccgatcgctggatactcccagaaaacgaagcacattgtcattcaggacataagcgttctgtccggcagttctgctgatataggaagcagccttccccggttttttcagtgtgacaaaaacactgcagctgcccgtctgatctgccgggtccgctgccgtaatcagagtatagcccggcgcggtaaactcttcaaaagccggtctttcacagatcccgacaaccgtataggttctctcttcccgcggcacaaatttttccattgccttcccctgctcattcctggagcggaaaggatcgtgctgacccagacttccatcttctgccatacggcctccgatggtcaggtacagcgtatcccccacggaaaaattaacacctccgtttgcggcgacatgggccggaaccagaatctcactgctgttttccggcagcctgccggagactaagctgacaggcacggtgtcaaaagcctttttactgaatcctgttataaacagatagggcttgtcgggatttttcccgccatttaagtacgcatagccgacattatcaatttcagccgtatcagccacatcgcggtccctggcctgttcctcagcaaacgcagaatcgatgtccacaaattctacgtgccagccgccatattttaccgtcgctccttttatcatatagttcagcagtgaaacggaaaacgtcgtgacagccgtaatcatggcagttgacagaataaccccgatgatggttaccaccgtccttgtacggctttttttcatgctctggagggtgaccttatggaaaatattcattctcacaccatcctctcgtcccgtaccaccctgccgtcggatatcccgatcacccggtctgcctgcagggctatcgattcatcatgcgtgacgacgatgagggtctgcccgtatttcttattgcttaatttcagcagactgatgatttcctgcccgttgcggctgtccaggcttccggtcggttcatcggccaggcagacctgcggggcgttcatcagagcccgcccgacggatacccgctgctgctggccgccggagagctggttgggcagatgtgttctgcggtcttccagcccaagcatttccaacagttcgttcagccgttcctcattgaccttccgtctgtccatcagaacaggcagcgttatattttccaccacattcagggtcggaatgaggttgtggaactggtaaatcagccctacctgccgtctgcggaaaatagccagcttgtcatggccgcccgcatagatatcctgaccgtccagaaaaacctttccgctggtaggcatatccacaccgccgatgatatggagcagtgtcgattttccggacccggacggccctgtaatcgcagtaaactctcccttttcgatggtgagcgacacatggtcaagggcggcaacctgattttcacctctgccgtatactttgcacagatcatcaatttttataagctccattatgtgagcctccttccacatggtatactcatataatagaaaattactcttacattcctgtgactttcaggtgagagatccgtcactttggaaaacgaatcacaaaaactgcgccgccctgcgggtggttctttgccgtaaccgttccgccctgccggaggataatcatcctgcatagagccagtccaatcccgtatcccgcccttcctgtgcttcccgtgctttttccactgtaaaaccggtcaaagatgcggggcagctctgcgctttcaaatcccggcccgctgtcatgaatcgagatttcagtaaacagtaccgtatccgtcagcccgatctcaatctttccgttatccccgatgctctcgatacagtttttcaggatgttctgaactgcctccgccagccagcccgaatccccctgtatgaccacaggggagtccggttgggaagacgccgattttgacggcaccgatttccggacatccgtctgcaccacgattccatgcagttccattgggatcagtaaagggcgaagcgctgcgttgatcagatcatagccgtcaaccggttccttctgaaataccacaacccccgcgtccagacgggacagcttcagcagggaggtaagcagccagtccattcgcaccagcagctcctccgtttcccgtacaaaggccctccgttccttttcgtcaggatccttctccagcaaagacagaatcagatttgcggatgtgagaggcgttcggagctgatgggcaatatcggccagtgaatcggcaagatgcattttttctttcttcagcgcctcattctgctcccgaatccgcagcagcattttggttatctcactgtggagaatcgacagctctccctcctccagttcgtccagatccaggcggtccgcatgatgcagcacgagatcaatctgaccggaaaggcgcgcaatactcctgtatctggctctggtaaacaacaaaaacgccgtgccaaaggcggctgcagaaaagaccgcaagaattccggccgcccagtgaatgataaatccaagtatgaccgtgacagctgctgtgaaggcgtataccacagcaaactgccgaaattccctattccgaagcatagccgcctcccagtcgatatccggtcccgcggaccgtcagaatgatctgcggatttgcgggatcgtcttctatcttttcccgcagacgcttgatgtacacggtcaatgtattgtcattgacatattcccccgctgcatcccacaattcgtccagcagtctccccctggtaataatactcctgggattgttgacaaacaccagcagtaaacggtactctaacgcggaaagaaaaacctcgctgccgttcttcttcaccacgcctccagccacatctacaaaaagcccgcaaatctcaaatactgcccccagccgcccgttttttctcagggcagccccgatccgcgcaatcagctcacgcggacggaagggcttggtaatatagtcatccgcccccatgttaagacctgtgacgacactcgtctcatcgcccgacgcggtcagaaagatcacaggaatatcctgagtctccttaattttcgtgtataccgtaaaaccgtttccatccggcagcgcaatatcgatcagcgccagatcaaatttatgttcctccgctgcggcaaacgcctcctcccgcgtgggagcgtgcgtaaccgcaaagccttccgagcgaagcaaaagcacaaggttctttgcaatctccctgtcatcctcgaccaaacatattcgcgtcatcgtttgtccctccattctgtctgcggctccaaaggtccttcaccgccggcgtataccgtttgccgtccctgataaaatgtgttatttttacttcatcttctctccaatgaggtcaagcagcctctgaaccgcttccggactctccgcaaatgtctccacaggttctcccgcccactcggagcactcctcccgggtcatggttcgctgtcttactgccggcccatcctccagctccaccgtatacgtccaggtgacctctcccagatttccggtcagggccatcaggacgcaggcgtatcccttcatctgctcatcgaatacagccgaattggcggcactgttttcgaatttcagagtccagccatacggttctgccgaagtctgaagctcatttttgaagcttcccagcgtattcccgattccaagcagctgcgcagctctgccgttggcggacatatcccccacatacggatgctttgcggcaaacagttcattggcctgtctgctgacaatggttccatcctgcttcacggtcatcccgttgatcgtaagatccgttcccacttccgtcaaatcaatggccaaattaaatgctccattccggttccagacggatggcagacatccgtagatcaccagtttcgtatttccatcctcctctccgatcagtttataccgccggtataccggggaggaatcgtataagattcccccaaccgacagcatgttcccgtttacattggcatacgtcacaaggtaggaatccaccggatatccgatgacaaacaatttcaggaacagggccagcaggattacggcaaaggcggagaaaatccccaaaaacacctttcggatgctgctcttcctgatttttttcagataatcgatttcccgttcattttccttttgcttcacttgcgtttcccgttcaaggtcctctttcatccgctgataccggctgcggcagtcgccgcaggtctctaagtgtgcctcaatctgcctgctgctctcatcggacgtcagcccatccacatacagcggcagaagatcctgaatcatttcacagggtatgttctgtttcacgttccttcgcctcctttacaattttttcctttccccgatagaacgtcactctcgcccagttctcactctttcccataatctctccgatctggccaaaggtgagactgccggacaggcgtaaatacatcacctcgcgcatgggttcctccagaccatgaagctgcttcatgaccgagagatgatcccaggagcagaatacctcctcctcagcggaggggactgcgatttcctccgcttctttaaaatcagccctgcccttctgcttccgcagatgatcgaaccatacgttccgtgcaatgccgcagagccaggtggatacactgctctgctctttaaatctatggatgctttttaccgcctgataaaaggtttcctgggtcagttcctccgccagatccggattctgcgtcttcgtcaggagaaaggcatatactgttctcgcgtgtgataaataaatctgttccatggaatccatacatgtatttcctcctctctgttaattagtgttacagaatcccggttcgttacaggccggtcacaatttttttcattcagccattcagcatgtcctctgatgcatgtactccggttcctccggtgtttacgcgaaggttcgcatagttatgatacgagcagaatatcacactccctatggataagcaactgattgccaaattttattgctcctttaaaacggctaaatgacggcacagcttccgtaaaaccagttgttttttatccatttccaacaatcaatatttttttactggtaaatcgcacaattttattctttaaatttctttaagtttgtgaacacttttgtatgggttatggtgtatattaataatcgtaaacccccccaatacattatatagtttttgctacaccccataagaaacgaaataccttctccgaaaaaaggaccagctcccccggctggtcctttttcattgtactgtggcattttctatttcaccgcatatcccttctccgagagcgcctgcgccgcccgcataaaatcttctttcttcgtcagaacgtaatccgtattgaacgtagaaacaacgaaaataccgatcgagcactccgccagaaccgccgatatttccgccaaatttccgatcagcgaaaaatccagcactccctcgattcgaaatgccttccagccatcctccctgtccgtcgtctcctccggaacatgttccgttctgcataccagcgataactcctcatcggtttttccgataaaataaaacgcatccgtcaggtttacacctgacagatcccggattttacagactgagaactcatcctccaaaagctttatttccatggttctgcctccttcctcttattccgtcctggctctctgtctgagcctgaaagacgccacgatactgtccagtcttcccgcctcatcggagagcgtctggctggccgccgcttcctcctcggcagtagcggaattggactgaacaatttcggcaatctggttcatgccgccctgtaaaagcctgatatgttccgcctgctgtgctgacgcggccgatattccacgcaccagatccatcgcctgactggaagccgtcacgccctgatccagggccccggcagtggaaaccgcaatctgtctgcctttgctgaccgccgcgtttgcattctcaatcagccctaccgtatctctggatgcctctgcactttttcccgcaaggcttctcacttcctccgctatcacggagaatccccttcctgcctcgcctgcccgggcagcctcgacagcggcgttcagcgccagtaagttcgtctgcagcgcaatatcttcaattacctttgtgatccgccctatctcatcagaggcctgggtgatatcattcatggcatcggtaagctgttccatctgaacctttcccgcctccagtacccggactgcctcctgtgagacgaggcttgcctctcccgcattgcgggccgtactgtcaacctcttctgatgcagcttccagcgtcgcggcaagctcttccacggaagccgcctgctcctgcgccccctgactcagtgtcatggctccatcagccaccataccggccccctcagccacctgggccgacgactgaacgatctcttccagcgtatcattcagccgcgcggtgatatgatccagagattcccgtattgaactgaaatccccgacataatcgagaaccgggcctgccgtcagatcgttgttcgaaatccgccccagcacataagacagttctccgatatactctctcagccttttcaccgtaagttcgaaggttcctgccagttcaccaatctcatctcccgatacaattcccgatgtcaccgtagtctttgaagcaatcccgaaatccccctgttccaccgtatgggcaaaccttttcagcctggcaaaaggaaccgttatggctctttttgtgaaaaacagaatcagccacactccggccgccgcacagagcagtcccacgatccccatcgtccacagtgcccgatgcatcgcggatttcgcttcatagcttgacactccggaaaaaataagcccgccaacggttccgtccgcatcgtacagcggtacgtacgaacagacatggggaataccaaggatggaggtttcccccacaaatgattttctctcagaaagaacaatttccgctatggccggatccaatgttgttcccacagcacgcgttccatccttcatcacggtggtcgccacccgtttatctccctcgaagatcgtatactcgtaaccagtccgggctttcagctcatcaagaagccgagtcctgtcctgatccgtgtaatcctcctttgagagttcataatccagaagattcgttccctgaacacactcctttgtcagcatatccataaactgggcacggaaaacagctccacagaatacgatgataagggccgtgctgatacacagcagaagaccggccagaatactgaatctggtccctaatttaagtgtttttatatgccgcgccatctctgccctcccggaattcattcccaaatactctaagtcataacacattctgcttaaacataacacgatgccatatgtctgtcaagaactttggagtgcctctaacgggtactgggcagagctcaatccatcaaaaaacctgccgcagaagaatcgtaaaaaggcggacaaaaaggcagcagctgtgtgtcacctttttgtccgtctttttacagttctttttacagttttcgcaccggaagcagttcgatatagcctctggtaccgaccggttccagctgaatccggggattttcgtcatcccactggtatcccgcagcagacggctcgtacctctggacagccgtcctcaccgcctcaatcgcctcacagtaatcttcctcctcaaacggttccccctgaaacatgaggtacttcgccgccggaagctcgatcacgtcaaagccctccggaaccggtccgccgtaatccgcagcgacttcaacgccctgtacatagaccgatgtccccggactgcggtatgcctccggaagccagaggcataccggttcgccgcagagggatttcatgctggttaacagcccccagacatcacaccccacctcttcacagtaggggaagtaatcctccgccttaatccccctcttaataatcaccttgcgcaccggtttgtcgattgcctggataaacacatttttcacattttccatcgcgttccattcctttctgagctctctgtatttgacgccatacggggtaaacagatacagaggaaccggattcccggcatattcgcggggattgcagccaaattcccggaaaaatgccctctggtacccatcgacactgccaaacccgtactcaaacgccacatctgcgattctgcaccgctgatctctcagcttcagcgcagattcggaaagacgcagccgcctgatatagtcggccggagtctggttcgtccactgccggaacaaccggtaggaatgccacggcgagaacagcgacaccctggataaatcagccagagtaaccgtctcccttaaatgctcctggatatagtcctgcatcctctgaaccgcttccacctgttccttcatctccatcacctccctgttatgctgacacgattatcatacaaaaaatcagaaaataactctcgacgttttttgctgtccggtattcccgttctgcagcttcccttacttcgcatcttgctctttggctggagccggcattacccatatttccatataaatatcatcctcatttttcaaaaaatacttttccgcagaaaatggcaggactgtcagaccgtgcgccggaagccacgtcccgaataagtatactcctgcctgatccagcgcagcagtcacaagtttttcaaatgtctccgcctcgattctgcacaccagatactctcccgcaggcagctcccgctttaccaggggaaacccgtcttccgccgatttttcttctgcacctgcgaactccgttcctctctctgccagggctcctgcaaaatacaaaaacgtccccatttccggtcccccctgtgccagtccatccacagccggcttcttttcatggaatgatttccacaactgacccggaacatcgattccggtactctcgcctgcaggcacctgtttcttaatctccacagcagtctccaatccaagataccattctggttccgtgagccgcattcgccggatctccagaacgatatcccccgcaatcagcggcaccccctcatccaccagatggtatctcatggacagctccggcttttcgcacatattgagcatgggcctgtccttccggtacttctccggcgagatgccatacgcctccttaaacgcccttgtaaatgaagcgtggctggaaaatccataatccacagcaatatccagaatcctcttttccctgtcctcaagcgccgaggcggcaagggccaggcgccgcatcttaacgtattccagcaccggccgtcctgtcagccgtttaaacaggcgctgaaaatagaagggagaaaggccggccgactgtgccagcgcctccgtattcatctcctccctcaaatgctcttccataaaatccagcaccccgtcgatcgcttcccatgcatgcatccttttgtctcctttcaattttcctctcaactgctgtgcttattttaccatgcagaccgtccgcacgctttccatccagtgccctttttggggtatcttcacattttgtccgtttttgaaccgggatattcccattctgcggatcagccgttctcacgcgctgcactgaaccctccacgacaatcaaaaaaacccggtgtgccatttcaacacatcgggccgttctgatgaattcttagccggcgttcagcagtcgcccgcataataattcacgatgtttaagtaatccctggggactggaaccgcaagacacagcaccagagtattccggtttctctgatattccgcctgcagtctgacctgggttccgtactctttattcacgttttctcttcttccatcagaatccaccagatagacgggaccctcgcatccgttgacagttttcaaaaattccttcatatttagtatcctgagtttcatcatgtccatccctcctgaacaaaacagtccggcctgccggacccctgcaccggttaagctgttatcctcgcttcacaatatcattatagtgcagttttattcaggaaactatcatatttctgtcagtatatatcacgattccgccattttcgtcggtactccatgggactgtatccgatgtgctcccgaaataccttaccgaaatagctgctgctgcccagcccgcaggactggcagatcctggtgatggagtcgttcccttccgccagcatatggcacgccttctgtaaacggtaatccgtcatatactccaccggcgtcatcttaagacagtcctgaaacgtccggaagcattcccgttcactgatataggcggccgcagcaatctccgccaccgtaattttatccgcgcagtgttcatggataaacgccatcatcatcttcatcttttcactcgacctgctgccctgagcgtcttcatggcagagaggctccgccatggcaagcagccggcaccacagctccgagagaagcgaccgcagacggatctcgtaggcgtatccatcttcctgaagttcaaacgattctctgagaatctccagaaattccgcatgttccggacggtccgggtacatcccgaggatctcgatcccgggtgctgtgatgagcggacgcacgtatctctggtcaatccggcttcccgtctgcccgctcaccagcaggggatcgaaaatatgaatcatggaaaccgaagttttctctccctgtctcacctttgacatatgaagtacgttcgaattgacaaaaccggctgacccctgcggaaacacagttttcccctggggggtgttatactccagcgccccttctttcatatagaacagttcgacctccttatgccagtgccagggcgactgtctgcccagatgcttttccagttccacataagacgcaatatacgggaagtccggggaaaaatcaggcagcatctcctcataacttcccggctttagctccacggtatgaattactttcatgataaactcctgtccgccatcgtccccacggacgctgtcttactttcatagccccttcttttccttcattctaaccgctcctttcctctgtgtcaaacggatcctccccgtatttccttttttcatacacgtctcagtattgcttttaccgtttcattcagatataatatgaaccaggtgctttatcatattatatttgaatatcaaatggaatgtataacaaaggagagttatcagattatggaattacaagacgcggtaaaacagaaagcggagcggcccgatgctgccggaatgggcatggacggtttactctccatgctggaaatgattggcagtcccgcctgccagtgtatctttgaccaggaactcactctcctgtgtgccaatccttctttttataagagttccggttattcaaaagaggaattcaacttatcctgccccacactgcgccaataccttcaccagcaccccggtgaatttgacatcatcagccaggccctgtctgccgcggcagaacacgggcagaaccttttttctgcagactgccgcattccggtaaagacaggaacatttcttcacgttcgtattcacggtaccatcacagaggaaaccacctctggctgtcccacagttttcatgactctgaccgatatcagcgatctcgttgaccaggcagaacagaaggtacagtattttgagtggatgatggatgaatacataggaaatgtctatatcagtgacatggacagctacgaacttctctatataaaccagacagccgctgatacacttcagtgcaccaaaaaagctccattgggccataaatgctacgagatcatccagggacggaccgagccatgccccttctgtacgaacagccgcctgcggacagatgaattctacgaatgggaattcgacaatcctctgctgaaccggacgttcatgattaagaaccggattatcgactggaacggacaccgggcccggctcgagctttcccacgatatgttcagcacggaatataagctggcaaaaaaggaccgggaacgcgatgccctgatccggactattcccggcggtcttgcccggctggatgccagagactgcagcaccatcatgtggtatggagccaattttttagatatcattggatatacggaagaacagtttgagaatgaactgggacggcagtgtacctacatccatccggatgacctctcccgcttacagcttttgctggaacagatacgaattaccggtgaaagcactgcctttgaaagcagaattatcacgcgggacggtcaggtcaaaattctgaccatgaccttctgctatgccagcggggagaacagctgggatggcattccctcgttctacagcatcggcatcgatttgacgaaggaccgggcagaacaggaacggcagaagaaagccctggaggaggcgtatcaggcggcacgggtagccaactcggccaagacaaacttcctctcctccatgtcccacgacatacgcactcccatgaacgcgatcatgggtatggccgccatcgcccaggccaacctttcttcaccggagaaaatccgcgactgtttaagcaaaatcaatgtatccagccgccatctcctcagcctggtcaatgaggttctggatatgtcaagaatcgaaagcgggaagatcgatctaacgccggaagaagtaaagcttccggaattaattgaaaatgtgtttgccatgtgtaagcctctgatctccgaaaaagatctgcagtttcagatcagcgcctctaaagtccggcatgagacggtcataaccgacggggaccgtcttcagcaggttctcataaacctcctgacaaacgccgtcaagtacacgcccaacggcggccggatcagcctgagtattaaagagattccttccctctcctcacagaaggcgcaatttgaatttatcataaccgatacgggaatcggtatgtcggaagagttccttccccacattttcgagccattttcacgcgcggaggattcccgaatcagcaaaatacagggaaccggcctgggtatggccataacagagaacatcgtgcgcatgatgaacggctccattgaagtaaccagcaggctgggagaaggcagccagtttacggttacagtccagctggaactcgtcaatgaagaggtgaccgatacggaagagcttaacggccttcccgttctcgtcgtggatgacgaccagattgtatgcgaaagcgcctccgcgcttttaactgaacttggcatgcgcggctgctgggtactgtcgggtgcagaggcagtgacccgtgcggaggaagcgcacaaatgcggagacgacttctttgccgtgatcctggattggaagatgccggagatggatggcctggagaccgtcaaggtgcttagaaagaggcttggcaaccatgtccccatcattattatatccgcctatgattattccgacatagaggccgaatttctgcaggccggcgccgacgccttcatatcaaaaccgctgtttaagtcaaaaatgctccacgtattacagctgtttctggagtccggccattccaccggttccggcgctgcagaggaacagagccgcccggcgctggcagacaaacggattcttcttgccgaggacaacgagctgaacagggagatcgccatagagcttctggaaatgcaggaaataatcgttgaagccgttgagaatgggcaggaggccgtagaagccttccgttcctcccccattggctattacaatgctattctgatggatatccagatgcctgtcatgaacggctatgacgctgcggcagccatacggagccttgaacgggaagacgccccgtctgtcccgatactcgcgctgaccgccaacgccttcaccacagatatcggaaaggcatacagcgtggggatgaacgatcatattgcaaaaccgatcgatgtggagcggttaattaccgttttagagcggtgtatgaacgcatagcggacgctgtcccatgaatttacgttaaaaaggaaggataccatgtcaaataccaacagtaaggaacaaacgatctatcgcagtctggcaggcaaaatacaacttggatttttcgatgacggcgaacgttttccctccgcgaaggaaatcgccgaacggtaccgggtctcctactgtcctgcccagcgcgcgctcaaaatgctggaacgcgacggcctgattcagcttaaccgcggtaaaaacacaattattcttggaaaaccatacgagaactacctggagagcgacgtttttaagcggcgggccgcggcgctgtcagacctcttaaagagtctcgatattctgtcaccggccatatgcttacagagcctgcttcactgccgggaatcactcgctttaaaaaaggagcaggcccttcccggccgcagcctgtatcagcagttcgagcgttcgctccattcgctgggcagtcagactgcgctgagcctttactacgatatcagttccttcgctgaaagcgctctcctcgatatcctctgtttgaaactgggaaaaaaagaagcggaagcatttttgcatgctgccgctctggaatataccagctgcttcgaagatttcacaaaagagtctgccgagtctatcgggcatcgtctggagcatctgtctgagacgttccggaaaccaattgaagagtatctggccgaactggaacttccgccggatatcgaaccggaggccttcgtctgggaaccgaacaaaggccgcacccgctactgtgatatcgtggctatcgatatgatatgtaagattaatcagggtatttatcccctgggaacacttcttcccggagggccggttctggcagatacgtatcacgtttccgagattacgatccgccggaccatcggcctcctgaacactctgggtgtggttcagaccatcaatggcgtaggaaccagagtcattggccccggagatgcctcgatcccttatcgcttaaaggaactgatgctggacggcaatttaaaagccttcctggaagcgcttcagctgctggcggttacagggaagccggtctttctttacacctttccatggattccagaggaagtactggcggccatagccggtgccgccgccattccggaagaaaaaagctccatggtggccgtcatcagcgccgggatgcaggcggttgtccattactgcccgcttgctgccgtccgcgatatctacagcaaactcacgcttcttcttttaaagggcagtattctgcggctggaggagacgggggccgagaaggttccgggctggtctttcgtatccgcagagcttcaggaaagctgcagtaaaaaagacggagtacggctggcagacgcataccggcagctgtttcaaatgattttcactgacacccggctgacccttatcgatattggagttcatggcgccgccgaggtagccggtatttagattgattccgctgcggcaaatcaggaccgctccctcccgggaaatcgcagcataaatgtcgttccctcgccgattacgctcttcaccgtaatctctcctccatgcttctccacaatatccttaacaagcgacagtcccagacctgcgcctcccacggcgcgggaccgcgactggtccactctgtaaaacggctcgaaaatatgggaaagctcttcttccgggattccaatccccgtgtctgtaatctccaccaccacagcatcgccgtccctgcctgtgacaaccgtgacagatccgtgctcccggttgtatttcgccgcattttccagcagattactcatgacgcggtaaagcatgatgcggctgcctgtcaggctgatatccggcgtgttctttatggtgacagtcagattctttttctgaatcatcggtgaaagctcatccaatgtcatggcaaacacttcatttaacggcacttcctcatccatctcgtgagcctcctctgaagtcagccgcatcagattctcgaccaggcggatcatccgctccgtatttgccttgacaatggacagcaccttttccattcgggccggagatgtctttccatccagttccatcacctccagattcacgagaattgtggcaagcggcgtcttcagttcatgggcagcgctggcggaaaaacgtttctgccgttcaaacgaggcgctgactttgtccatcatatgattaaaagaccgggcaagccgtccgatctcatcctgtctgccctttatctccacacggctcgataaatcgctgccgccaatctcctcaatggtggaggacagttcttccagcggcttcagtacatggcctgccatcagccatgtcgccccggttcccagaaggagaaccagaaaaagagccgccagcccccaaagattaaactgggtgccagccttttttaaagatatggtaattgactgtatatttgaatcgtcgtccagggcagtttccgccttaacgctggtgacaataatatcctgtgtctgaaatgtcatctgctgccctaaatcacggacaaaaatacggtccgccccaaagagaaacatggcggtcagaatcaccgccacactggccattaccagagccgacaacagcgtcagacgcatgcggagcgatatgtttttcagcattcctcttcctccttaccgatcagatagccggctccgcggatactccggatgatctcctcatccgtaaccgcctgcagcttgcgccgtatgacgctgatatagaccttcacctgattggagaagggatctgcctcactgtcccacacgtgctccagcagttcctcggcgctgaccggtctgcccatatggatcattaaatattccagaatcgagaactccctcatggagaattccagcagtcttccctgaaaagatgccgtctttaaattggaatccagacagagacctcccctcgtcagggcggcctctgtctggataaaggatcttctcagcagcatacggatgcgtgcctctaattcttcaaaatgaaacggtttggtgagatagtcgctggctccgctgtccagtcccctgatcttgtctgtgagttctgagcgggccgaaagaatcagcaccttcgccggtttctccatggaccgaatatgcttcagcacttccatgccgtccagaccagggagatttaagtcgagcactaccagatcatactcattgatcccgcactgttcaaccgcatctgcgccgtcacccgcagcatccactgcatacccgcgcttacgcaggccatagcacagcgcttcccgcatatcttcctcatcttccacaatcaaaagtctcatggtaattccaatcctctcattctttttcaaacatccaaatgtaaatccggtcagtcagctgcaacgacactgaacataatactgccgtcactgttaactccatcttccgtccagctgatatacactctggagccgtcttccgcgataaaatacgtttttccgtcttcatccgtcatgagctcaggcgtaaatcccggctgtgcctccacactgcttatcactgcagaatcgagtacgatggatttactggtatccgcctgtacgtcttttccctccgcagatgcggtaaacgccagcgacgtggttatcatggctgccgcagccagaccggctgctgttttgtgttttaacatcataattgcctcctgtgattgattattttatttctgccgtgttatgtgatcacacgcttattatacaggagtcaaggttaaagtacggttagaatctttattttgaaagagttatgaacattaagcgtttttatggatacagcccgtaagcgttttacaaagctgaacaatatccagcggcttactgatatgtgcattcatcccggcagccagcgcagcagcgatatcatcgctgaaagcatttgctgtagtggcaataatggggatcgtgagagccgtcgggtgattggacttgcgaatgcgcctcgcagcctcatggccatccatgaccggcatctgtacatccatcagaatggcatcgtaatcccctggcccggaggcaaggaacgtatccaggacctgctgtccatcttccacacagtctacctctgccccattcatgtgcagcagtgtggctgcgatctcctggttaagcgcattgtcctccgccatcaacagacgcatacccgtcaaaggcatgtcggtgtgtttttgttccacggcttcggagggctgtcctttcttctccagtgcatccttgatcgctgcatagacggaagaccggtaaagcggcttgggaagaaaaccgttcacgcctgctgcccgcgcctcttcctccacttccgaaatatcatacgctgaaatcatcacgatgggaatatcgtcccccacctcccggcgtattcgccgggtcacctcaaccccatccatatccggcattttccagtcaatcagacacaggtcaatattccggccctcacggtacatttctttcacctgttccactgcctctgcaccagataaatgccattccgcatgaatctttattttttccagaagaatagctgtctgttcacataccgtctgctcgtcatccacgatcagcgcctgcagtccgtacggttcaaagtcaggctcctgtatgccgctctcctcccctttcagaaacggcagttcaacaatacaggcagttcccacccccggttcgctgtctacccggatacaaccgcccatcagggtaatcagattccgggtgattgacatgccaagccccgtgccgccatacagctttgcaatcgaggcatcggcctgttcaaacggctgaaaaacacgctcaacggcctccttcgtcatgccgatgccggtatcagacagagtaaagcggatcatatcggctgtatttctccccctgtatcgggaaacttccaaccggatttttcctccgggaggcgtaaactttactgcgttagagctgaggttaaagaggatctggttgagccgcagggaatcaccgataaagatggcatcctcaccaaatccctccatagtttcctgaaactcgattccttttgcttttgtctgagcgtaaacggtagatacaaacccgttgataatctcaaacatgtcaaagggctcttgttgcagtatcatgcttctgctctctatttttgacatatccagcacgtcattgatcagcatcagcaaatgcctggaagagaaggtgattttcgagagacagtcctccactctggcaggatctctgacaactgccgccgctatggtggtcattcctatgatggcatttaacggcgtgcggatctcatggctcattctggataaaaactcactctttgccatgttggcctgttccgcatttgtcatcgcctcctgcagaatctggcgtgaccggacctcttcggtgcggtcggaaaatacggtgatgagctgcggcgtcttcaaatcttccacccggtaaatgcgaatcagcatccagcatttttcccggttgggctttgtataccccaccattctttcaaacggggaagcaaactgaggatcgctgactccttcccggagcgcctgtgcatcctcctccggcatgccctgatacagactttccacatagtccaccgggattcccagtatccgttccacgttaaggccacggtaattgatggctcccgtgcccgcatcccgaataatgaatgcatcatcaatgctcagtgacagattatcaaacagtttgctgcggtatgtcagttctttccgctgacggtgaagaacgtactgggagatcagaagcacaaagaccatcagcgtcatcagtacgacagaaccgatcagagtggtaagccttaacgattccgcagtttctccgtaccccacctttttcgcctgagctgtcgctataattgcttccgtctggtgaagcgcttcctcatagagaggctgcagatgctcctgtgcgtaggcttctatattttcctccgtgattacggcctgtccgcaatacgttaagtacgcagcctgttccgtctgcaggcgggtcagagtctctttgagctcctgcacatcttccgcatcacccagatacaattcctcgaggcgtaagattggcttctccagggaaaaagcaagcttctccagcatatcggcggcaatctccacatcctcacggttatggtggcgctccagccgcccggtccgcaggctcatctccgatacatagagcttcacgtcgccggctgaaatcaccacctcaaacgggtgggtcgatatgatctccgtctgtgcagccagactggcagaattccgaatggtcatgacgagatagcaaaacatcaataagatgagaaccgccgtactgacaatgctcatctgctggctccggcccacagagctatcctttttattcacagctttctgcatgtatcttaactcctcgcttttccggccgcgctcaccatgcctggatgtctgccgcccaattttattttattttcacgttgtttttatctcttttacccatattgttcacatacatatttatagttaagagtatagcaaataacagtgaaaatagcaactgttggctgtgaactgcggctgtaagaatctgaccggatttccaatatggaaaatgcagaaaaaaagtggtatactataactttcatatgatacattacctgttagaattggaggaatccgttttggacaacagtacagaactgcgccaggtggtttacagcgtcttactcacccagatacaattcggcttctatcgttacggtgagaagctccctgccatagaggaaaccagtacacgactctgtgtatcagtcgatacggcccgcgccgcatacttaaagctcaagaccagaggatacatcactctgataaaaaatgcaggtgccacagtaaaagtaaagtatgacagcagggagacggaacagtttatccagaccttcttttcagcacgcaaacatgccatgatcgatctgggtaaatccctgcagcctctgttcggcactgcccagtggacgggactaaaatatgctgctccggaagatttacagacaatggaactgcttttttccaaagaagacgcggcatctccttatgcgatgctggaacacctcaatctaaaataccgggcattggggaatcatatcctgatgcgtctcgtctggcagtcctttatgtttttgcacaacccctttttcagcctcagggacaatcttcgttactttgaccgtgatgccgattatctgtcggcagttctcgtattctgccgtgaaaaagactggtccgcgctgcgtgccgccgtggcaggatcaatagaaaagctgccatcggcccttatccgtttttatgaggacagaatcaccacgcctcctccggaagctgaaacgccctttgtctggagttcctacaaaaagagccggcagctgtgttattctcttgccatggagctcctcacctcgatcagcctcggacagtatcctgtcggaagcctgcttccctcccaggaggaacttgcccggcaaaaaggtgtttccgtcagtaccgtgcgaagggcgcttttgcttctggacagcatcggggcgataaagtctgcgaaatacatagggacacgcgtcctgccatttgataaaactgcagaaaacagtgattttaccagacccgttcttcaaaggaggcttatggatatggctgaaagcctgcagatcctggctctgtcctgccaggcagtgtcccagctcacgctttcttctctaaacacgacgtttgtagaacagctttgccgtgacttaaaggcacacaggcagcggcggcgcggcgagactttatcctattttctccttggcctaatcgggaatcatgctccgtatcagaccattcggaccgtttataccgagctgctgcggcagatcttttgggctcacgcattccacggcatgaaaggaagtgcggatacgattcatgccatttacgatccgtattatgatactttcatcgactctctggaacacctgaattttctccgattctctgtcactctggaggcactcatcctctttgaacttcgctgtaccgttgattatttactgcatttcaacgttccgggggccgaaaacattctggtcccggacagcagcttccgctgactttcttcgcttcttaaccagccagaaagagagatgccgcaatcttatcaatgagacaatattgtggcatccttattcttctggctccctcccgcactctcctttcgctgaaaccagtggcatccacctaaagaaatcaaagaaaaaccgaaagccgttccattacaataacggttcacaggaggtaaaataaagtcatcaatcaagaaagaggtgacgccatgacccccagcttcctttccatcagtacagtgcttgccgcaggacttgtttccttcttctccccctgtatcctcccgctcctgccggtatatctctcccttttttcatctggcggagttgcgtcaaaagaagacgcagccagacgaaagcttcgtgtattcttaaaaagcgttctgtttgttgccggtatttccgtatgctttatccttctgggctttggcgcaggggcgctgggatcagtcatccgcagcaaatcatttctgactgtaatgggactcattgtcatgatcctgggactccatcagacaggactgattcccatcaaatggctgtaccgggaaaaaagagtcaatttggaacgctcccggagaggtgactatatcggagcatttttattagggcttacattcagttttggctggaccccctgcatcggtccggtcctgggtgcaattctggggttatctgccaccagcagccggccgctctacggcgctctcttaatggcggtttactccctgggattcctgatcccatttctggcactgtctctcttttccgatgtactgctggcgaaggtcacaagacttcatcggcaccttggaaaaatcaagactgccggcggcgttatcatcattctgatgggatttttactgatgacggatcatctgggcagtattctgactgtctttgtttaacacagcagaaaggagaaactatgaggaaaaaaaatttattaacaggtgctgtttccgtatttttactgatttctctaaccgcttgcggcgccggaactgtggtaaaaaccgggtctgctgcctctcaatccatgggggaagaggaatcagagatgaagaaggaaagtacttccgaaatgatgaatccgaaaacccccgcgcctgactttgaaatgatggatttggacggcaatacggttaagctctctgattttaatggggaaaaagtttatctgaaatactgggcttcctggtgcccgatctgcctgggcggcttagaggatatcaacacgctctccgcggaagaaaatgattttagagttttaaccattgtagcccccgggcagaaaggggaaaagaataccgaagatttcaagaaatggttttccggtgttgaaaacaccgaacatatcacagttctgtttgacacagacggggcttacgggacacaggccggtgtgcgcggctatcccacatcagaatatatcggttctgacggtgtgatggtcaggttagttccgggccatgcggacaatgagacgattaagacagttttcgaatctgtaaaataatcgggatagaaaggagcatgtatcatgaaaaaaaactggcaaaaatcaatgggcatgggcattatggctgccgccatggctctgctcacaggctgttctgcctccacgctgaataccggcgctgttaatacagggaaaacagcagatactatgtccatggaacaaaaacaggaggaacccatgatgaacaacgacaatttacacaccatttacctggccggcggctgcttctggggcatcgaggcctacatgaaaaaactgcccggagtacgtgataccgacgtaggatacgccaatggaaatacggaaaatccaacctatgagcaggtttgctatgacaataccggccatgcggagacggtcaaggtcgtctatgaccctgcccttatctccacagaacagctgttagacggttttttcaaagtcgttgacccgaccagtatcaaccgtcagggaaatgaccgcgggagccagtaccgctccggcatctattatgtggatgaagcagataaagccatcgccgagtctgcagctgcccgccagaaggagaactataaggatccggtcgtcacagaaatcctgcccctgaatcagttctatctggcagaggactatcatcaggattatctggataagaatccgggcggctactgccacatcaacttaaacgccgcagatgaattcatcggggaagaagggcttggcatgtccgatgatctctccgtcttaattcggcctgaagattatccggttcctgacgatcaggtattgaaagaaaaactgactgatatccagtaccaggtgactcagaataatgacacggagcgcccttataccaacgagtacgccgccacatttgacaaggggatctatgtagatgtggtcacaggggaaccgctgttcagttccgaggacaaatttgaatccggctgcgggtggccaagtttttcaaaaccaatcattcctgaggtcgtaacagaacataccgacaccagttttaatatgaagcggacagaggtacgcagccgtgccggagatacccacttaggccacgtctttgatgacggaccgaaagatctgggcggacttcgctactgtatcaacagtgcttcgatccgcttcatccccttcgacgatctggagacggaaggctacggctaccttaaaccactgtttgatatgtaatacggccatagaacgataacgccgggaccggaagacttgctatcttcgtcccggcgctatataatgatacaaatacagaatggaaaagaagggaggcggcgccatgtatcatctcctggtagtagaggacgaaagtcttatccgccgtggcatccgggcttttattgattttgaccgtctcggaatagatgagttctttgaggcggagaacggcgaggagggtctggaggctgtccgcagccatcgtatcgacttaattctggcagacatcaatatgccaaagatgaacggcctcgaattctgccggctggcaaaggagctggatccttccataaaaatagccatcctcaccggttacgattacctggactacgccatacgcgcaatcaaaatcggagtggatgactatgcgttaaaacccctgtcccgcgacgatgtgcagaagctgctcttccatctcgtcgaaaagaaaaaagaggcggacaatttcgcagcagtacgtcaggccgtcgataaactggccggaaatgccggtacggaagatgactccggcctccgcgcccagatggccggtatcctggaagaacacctgtccgattcccatttttccctcagcaccatggctgcagagctgggatataatatcagttatttaagtacgcttttcaaacggtgcttcggcgaaaatttcagggattatctgttcgacctccgtttagagcgcgcaaaaatccttctgctgtccacgcagatgaagaactatgagattgcggcggcagttggcattgacgatcccaactacttcagcgtatgtttccggcgcaaatacaagaaaactccaaaagaattcagatcggaggccgggcatggggaaacaatttaagctccgggactggagccgccgcttcagtgttcagctctccctgttcttcctcggcgcagggctgactgtcatcctgcttctcagcggagccgtctactggttcgcatcgaatctgctgatgagcgagacaatctccaaaacccatgacttgctggagatgagcggcgccaatatcggaacatacattgcacgtgtcaaaggggaatccaacgtcttcgccggcagcccatcgctccgccagtatctgtcagacgatgaagagagcctgcgtaccggactgctgtcccagattgatacactgcttcaaaacgattcctccatcaaatccatcgttgtcgtatccaaagacgggcgaatcctttccaatgagaaaaatttagatatgtccgtctccagtgacatgatgaaggaagactggtatatcgagtccatccacaatacaatgccggttctcaccggtgccaggatgcagagcttctcttctgacaaagataactgggtaatctctgtaagcactgaaatcaccggagattccggtgacaatctgggggttctcctaatggatatggaatacagcgtcatcgaagaccacctgcgcagcctggatttaggcagggagggctacgtcttcctcctgaatgacaaaggggagccggtctatcataaggataccagctatttctctgatcctgacaagctggcgcagcttttggaaatccagtccgcaggagacggttacgataaagcgtcgaatcttctcacctgccagactcagatcgaaaaaaccggctggaccatggttggcgtagtgtcattagacaccttaaagatgttggaacggcagctttttgaagcggtacttctgacgggcggtctgctttttatcgcagttcttttaatcggaattctcttcacccgccgtctttctacccctatggcagacctggaacgagggatgaacgagattgaaaagctggcagaagtgcgtattcgaaaaaacagtttttatgaagtggaactgctggccggcaactataaccggatgattcaccggatccgcatcctgatggatgagatatcggacaaggaaaagacactgcgccatgccgagcttaacgccctggtcagccagattaatcctcattttctttataatactctggataccatcgtttggatggcagaattcaacgacagcaccagggtcattgcccttaccaagtctctggccgcctttttccgcctgtcgctaagcggaggccgggaactgattaccgtgggggatgaactggaacacgttcggcagtatctgtatatacagaaggaacggtatggagacaaactgaattatacaatccatgcacccgaagaggtattggactacacggttcccaaaatcattctccagcccattgcagaaaacagtatctaccacggaatcaaaccgctggacagacccggccagatcacgataaccgtgcaggaagaaggagaaaagctgatctttacagtttcagacaacggtgcaggctgccgcccggatgcagctgtggcggataccccctcgcttcctggtaaagtagggcttaagaatgtagacgaacgactcaaactttactacggaccgggatatggggtgaccatacactccgctcccggggcaggctgccgggtggagcttacagtcggaaagcagctgttcagcagtccggtctcttcatcaaacagttcttctcatagacagcctaaacagcagtaatggtctggacataaaaaatgccctaaacccgcatgaacactacattcttacgggttttagggcatttatctttcactccgaacgattacttcgcgtaatcggtaactctggactctctgattacgttgaccttaatctgtcccggatattccagggcttcttcaatcttcttggaaatatcgcgcgccaataagatcattccgtcatcgttaatctgttccggtactaccataatccgaacttcgcgtcccgcctggatggcgaaggacttgtcgactcccttgaaggagtttgtaatatcttctaactgtttcaatctgtttgtatatgtttccagggtctctcttcttgcacccggtcttgcggcagaaatcgtgtccgccgcctgtacgatgcaggcgataagactctgtggttcaacgtcaccgtgatgggattctactgtattcagcacaaccgcaggctctttatacttcttacagagctccgctcccagctgaatatgggaaccttccatctcgtggtcaacggctttcccaatgtcatgtaataaaccggcacgtttagccatacggacatcaagcccgatctctccggcgagaaggccggataactgggccacttcgatggaatgctttaatgcattctgtccgtagcttgtcctgtacttcagtttaccaagcagtctgatgagttccggatgcagaccgtgaataccgacctcaagggccgcggcctcaccttcctcacgcatgttggtctccacttctttctgtgctttttctaccatttcctcaattctggccggatgaatacgtccgtccacaatgagccgttccaatgcgattctggctacttctcttcgaaccggatcaaatccggataatacaaccgcctcaggggtatcatcgataatgagttccacgcccgtcagggtttctaacgtacgaatgttgcgcccttcacgtccgatgattcggcctttcatctcatcgttcggaagctgtacaacggaaactgtcgtctctgcaacgtggtctgcagcacatctctggatggctgtcaccacatattcccttgcctttttatcggcttcctcttttgctttgttgtcgagttccttgattaatttcgcagtgtcatgttttacatcatcttcaacagattttaaaagatattcttttgcttgttcggaggttaatccggaaatcttttccagttcctgtatccctttttcatagagagactctacttcggcgtttctcttattcagggcttcctctcgagcagcaagacctgcttctcttttttccattgcgtcggacttcttgtccaggttttcttccttgcttagtactcgtctttcataacgttgaagctcagctcttctttctctggtctctttttccagttcgttcttagtcttcaaagactcttcttttgcttcaaggagagcttcgcgcttctttgtctcagcggtttttaatgcttcatctattatttcccgggatttttcttctgcagaaccaatcttgctctcatacgttttggtacgatacgcgatggcagcagtccaggcaataaaagcaactacaactgacgcgacgattgcaatcaatgcagccgtgaatactgatactgacacaggagcacctccttatttaattttcattgtacatcaatacaacactacaattttaaactgttttatacattatgtcaagtatttaaccgctgtttccagtatacttatacatatttttgtaactgccctgtcacgcctctttttctcttcaaaatgctccgtcatcactgtatctgctgcctaaaacccggttgaccgtctcaaaggaaaatccttttcttcccagcgctgccatggcttttctccgttcttcctgcgtcatggcctccggttccagccttttctttctcatataatctctgatctgggcttcctcatccaccgggtgttcctccaaaatatcggaaaccgcctccttggtaagcccttttctctgcagctcgtactgaatctgccgcttgctcttcttcgctgaatggtactccacatagcgcctgccatactcttcatcattgatgtaccggtgcttcttcaggaattcgatggcgtaatcgatggcttccccgggataatatccgtccttcagtttctgacgcagctcctgttccgtcttatcggaagatttcaacaggtaacagacccgctccaccgcgcgctttaacagaatctcttccaggatctcccgatacgtctcctccggcagctcctctcctgcttccatgtgatacctttttatttccccgttataaagcgcaagagcaaagtcctcatccagaatgactttactcctgcgcttatcaaggggtatgatctccgtaactgtcatgcctgccccttactcttcttattaatttattcgccggttttatgactcttttggttcggccttaatcctcttgctctctttttccggagctgcttcccctgtggaggcatcgtctgccggagcaccttccggagccgcaccgtcttcaccgagtccgtaacgggcgcgcaccttattctcaatctcttcgcagacagccgggttatcctggagataaatcttggcattctcacggccctgtccgatcttcgctccgccgtaggcaaaccaggcaccgctcttctccacgatatcttccttcaccgccagatcgaggacatcgccttccttggaaattcccctgccaaacatgatatcaaactctgcttccttaaatgggggagcgatcttattcttaacaaccttcacacggacacggttaccaacgacttcaccgccctgctttaaggactcgattcttctgatatccatacggacagatgcatagaacttaagcgcacggccgccggtcgtcgtctccgggttaccgaacataacgcccaccttctcacgcagctggttgataaaaagcacggtacagttagacttgctgatgacaccggtcagctttctcagcgcctgggacatcagacgagcctgcaggcctacatgggagtcacccatgtcgccttcaatctccgccttcggaacgagggccgcaaccgagtccacgatgataatatctaccgcaccggaacgcaccatcgtctctgtgatctccagcgcctgttctccgttatccggctgagagatgtataaattatcaatgtccacaccgatcttcttcgcatagaccggatcgagggcatgctccgcatcgatgaaacctgcgataccgccgcgcttctgtacctctgcaatcatatgtaacgccacagtcgtcttaccactggattccggaccgtagatctccacgactcttcccttcggaattcctccgagtcccaaagcaatatcaaggcttaaggaaccggtagggatcgtctccacattcatattcacactgccgtctcccagtttcatcacggaacccttgccatacgctttctcaatctgtgtaatggcggcatcaagcgcctttaatttatcatctttattcatgttatcctccaatgcgaacaaatgttcttttcctgtctataatcatagtatacttgtccctaaatgtcaactggaattttcctgaattcccgcgtttttctgccgctgagcacaaaaaaatccctactgtcttcccctcaaaacacatcactccccctgttttcttttctcttttgtagcttctctgaaactgcggcgaactgccggtgaactgcagaaatggaaaacggaacgttctccgatacccctctactataccatagccgcgttcttcgcgcaatcggtattttctgaaatctttctcatgccaaaacaataccggaacagcctggactgttccggtatcatctctgttatctgttatttctctttaaatcccattattccgctttgccttccggaatcagactgattccaaaggtaaattccgcctcatccagccggtatttctcaagcagcctcgggccgcagctgttggagccgatgccgttcatccggtaatcgagacacagcacggtataaggggaacggaccagctcataattatgatttttctctgtcagctcttcctgggtatacacggaggcgttaaaggaaaaggtctgatctcctgctgccgttaagccggctctccggccagtcagcgttacaaaatcgcagtcatcgtggcttccgttttcctggggacggatatagtcttcatgaagcgcggccacatttgcggtaaacagtccatggctggaggctctcctcttgtccctgtaactctccaccggtcccagtccgcagtaggtaacgtcttccatgtccttcggcaggaataaacggagaccaaatctcggaagttccggcaattctgtatcacgcttcacagctaagtttatatccactcttccgtccgccccgatcagccagtctgcctccatgtttaaaatccgctggatcaccggtgaaagaatcgcaatcaccgaatggatgcgcacgccttctgctgtgacagagtaatccgtctgatacgccctcgaatacgtcagatcgtaatgggccttctgccatttcagcttcaaatagcggtcgttatccgtaggtgcccgccatagattgtattccatgggccgttccagaagacgacactgattgacattcatctcttccagaacgccggtcagcttattgtagacgtgagcaaaatccgggccggacacatagagacggcgatcgtcctcttttaccgtaaacaggccgggctccctactgcccgtacatgtttccccgcaccgtttcaggagatgcagaacggtctggtttcttccgtcttcgttcttcagcgggatttcatcgaagcccagctccgtaccggcagccaccagtctggtgctctctctgcggatataacggagctttaagaaacattttcctgcctccggcacttcaaaatccagacggacggcggcttccccgtggggcagaatatccggcactgcgtctccctccagcgtcccttctgcgatgcacactccgtcgcatgtcacttcccacgcgacagacgcatactccttaaaactggtaaaatccagatagttatgaatgatggcttcccgcttctcctggcagaaggaaacgactctcgccggccggtttacatttttcagttccttaaggcccgtgtgaggcgttctgtccggatagaccagtccgtccatacagaaattaccgtcgtggggatattcgccgtggtcgccgccatagagatacatggcgcgcccctccggggttctgccctggtaaattccgtgatcacaccactcccatacaaatccaccgcagaggccgtcgtactgttcgatcacttcaaaatagtcctcaaaatccccaggcccattgcccatggcatggcagtattcacacatcacgaacggcttttccggattcccggcaaaatattcatgaatgtcctccagaggcggatacatccggctgtataaatcaatattagagaaatcatacgttttgttgctgtctctgtatcgcgcgctctcatagtgagtcagccgcgtagagtcaaacgcttttgtccaagccaaagccgcctcaaaggtacagccgtaggcgcattcatttcccatggaccagataaggacacagggacggttcttatcgcgctccaccagaagctttgcacggtctgccgtggcctctgtaaacgcaggattgtcggaaaccgcatgattccaccgctctcttcttcctgcctcgtggtcgtcttccatgtagatatcgttggttccgtggctctcattgtccgcctcgtcgatcacatagaatccaagctcatcacagagctggtaaaactgcggggcgttgggataatggctggtgcggatggcattgacgttatgctgcttcatcacctggaaatccttcttcatctgatccaggctaatcacaaatccggtgaccggatcgctgtcatggcggtttacaccgcggaatttgattttcgttccgttgaccagcacggctccatccttcactttgatttcccggattcccaggcggtctgtgatgacctctccgccgcactcgtaaaccaccgtgtaaaggaagggctgttccgcgttccacagaaccggttgatctaacgtaagggatattccatcatctcccggcacatcttccgccagtgctgaaagacttccctcctgatcgtatacagaacacttgaccggcatcttctcatcaaagaacgtaaatgacacattgatctctgcctgctgtccgtcaatccgcgttttcaggaaataatcaaagatcccctgttccggcctctttaacagatagacatcccggaaaataccgctcatgcggaatttatcctggtcctctaaatagctgccgtcgcaccatttcaagacaagaaccgcaagcttattttccccggcccggatatagggggttacatcgaattcaccggtagcgtgggacacctggctgtatcccacatagcttccgttcagccatacatagtaacaggaatccacaccctcgaaattcaaaaatgcctttggcgcggcctcatccggctcatagacaaaatgatggatataagcgccgcagggattttcctcaggaacgtaaggcgggtccatggggaacggatatctcgtgttcgtgtactgatggctgtcaaaaccgtaattctgccagcagcccggcaccggtatctctccgaagccctcttccccatatccttccctgtaaaattcatcctttaaatcatatatactgtcaaaataccggaacccccacattccgttcaacagctggaagcgtccggaatgctccctgttttccaccagatcgtcaaaccgttcttcagccggaatataataggaccggttcgccgccgtattctcatgcagcacatgcagattttcgtaatgtctcggtattatcatggattttcaatcctcctccttcattctttcttttattataaaatagaaggctgaaaaatccatatccttcgttagacaaaacatgcacaaaatgatacaattgtagaaacaaaaagcaaagagtcaccgcccccgaaaggagaacacacgcatgtataccaataccggatatttagacatcgccgacgcggatctggaagacgatacgatccccctgcggatcaactgctgcggtgtctaccgcctgctgacccgtctctccctgaccaccatcagggccaccggccgccccgattaccagcttctctacattgcttccggaaaagccgaattcgtcttaaacggcgccgccgtcaccattcccgcggggaacatggttttatatggtcctggagaatatcagcagtatacgtatctcctggaggacagaccggaagtcttctgggttcatttcacgggatacgaggcggcagaccttctttccagaaccggcttaagcctcgaagactgccgcattctgcgcaccggatgcgcctcccgctatcaggatctctttctctccatgatccgggagctgcagctgccgcgccccttgagcggtgatttctcctcgctgtattttaaagaacttcttttgaccgtggagcgccagatcgcggagggcggaaagaataaaccgcagatacaaaaagaaatggagcacgcggtccatttctttcatgaaaatttctctgcggacatcgatatatccgattacgcggccagtcttcacatgagcacctgctggtttatccggagcttcaagcagtacgtgggcatcccgccgcttcagtatctgacctccatacggatcaataaggcaaaggagcttctggaaagcaccgactgcccggtcagtgagatcggctccatcatcggctatgaaaatccgctgtacttcagcagaatctttaaaaaacagacaggactttcaccggctgcctaccggaaagtcctgccatctgcacacactagcacttaatggatactccgcacggatacttgatatcgtcaatcacaacaaacacttcgtacgtccccttcattccggccttgttcacattggtctttgtcacgcgctcgtcggactccaggaacgttccgcagcacatggccttgtgggagaccgctgtagtggaaatataataacggtgcttctcctcgcccttctccagcatgagcatgaccagctgacccttctcgaatttcgcgtggaaggtgaagcggtcctcctcatcctcaattcttgcctcatagcggtccgggatcagttcgctgctcaccggcgcagggatgtctgtgtcaaattccttcgtcacgcccatttctcccagaacagaacctgcgcccagttctaaattcccctgttccgcatacagcttcatcttctcagctctgtaataattgcccttggtatgcagctccagcatcttcttgtcgtcacagatctccaccgttgtggcaaagagcgtgccgcccatgttctgctccagcgcacccagagattcggaaatctcgccgtccttattgtaggcgcttccaccggaatgaaccatgtaatggccttcattataatattccacgttgcagatatatggggagaagaacttcgccccccggtcctttccgtactgccagatctgctcgatcgtcatatcctttgtattgattctgtagcgcacgcctctggaataattatttttagcggcgcggtagttctccctgatcttggaaccccagtgatggttgtcaaaacacatcacatcgccgtccggcgtgattaagcaggcgtgctgctcatactgccattcaaagtcggttccgataggcttgaagaaataacggtccacccactcctgcggccagccttccggatcagacagaatccagttaagccttccggtctcaaaatcgatattcacgatggaatccatatgtctgccggaaaatgtcaggctgtggctcttctcatcgtaccacaccgcgttgttatggaaccagtccttctccgaccagctgccgctctttcccagtcccggctccagaaaattcttataatcccaggtctttaagatctcgcccgtgttcctgtcaatcagcacgcacatatcttccacggtgtccgatgtcagatcctcggtcagacagagaagactgccgtccggcatctcaaacgcatcatggtgggaacctcccggcaggcggtattcgtgatagatctttccgcaggcactggtctcatacatgccggacatatagtacggcatctgcacaagacggtctgttcccatgagaatatggccgtttttcagtcgtttcatatcgaagacgcatttgatgtttaagcaccatctgacatctcccgcatagtcaaaggccaccgccagctctgcccccgacggagataagaaaatacagtcatcctgtaagtattccggtgtcgtatccatggattcaagcggtgaatctccgtcaaatacatccggcacctcgatctctaccgtatgtacctttccgcggtattcccgtacctccacccggtttacatatccggaataaagccccaccaccggcagcacatgctcctttgcccgcggaaacgtatgtgtaatattgccttccttcgccttgccaagtacggtcactgtaacggcggtctcttcctctgtataaaaagagattaccgcggaaagcggattaatcagataaaggttgtacgataccagcggattgtcgatggtatacgctccggaacggagttctttaagcattgcctcctccgctctggcctgttttttaatcatgtgttcttcaaatgagtagactgctcctgccataaattctcttctccttcttccggcctctgccggttttttgtttgacaaaagtataacatacagggagaaggcagaaatttagtcttgactatattcctgggattttttattgcctgagttcctgaaagccggttttatcgttccgcatctatctctgcattgataagccattcaccatcatcttttacagtaatattctgccagtgaaatttattctcaccaatctcagtaaaaacccactttctcctttcatcaccagtgaaagtaagaacgatcatttccccctgctttcttgcttccagccgtattatgtttcccgtataaccataagcgacatcccaggcgtgtgtatcgggattgaagatacgaagtgaggttccgtattcataatcaggcagaataataacgtcctgtactgccatcccctcaagaacccgggaaaaatgccactcgcctttgattacgcgcgaggagttactctcaacatagttaatttgccagctgccgatcagtttcccaaaataatcaaactcttcaggcagcgccgtactttttctttcgctggtcagggctttcataaaatcctgcatatgatgattcctccttcgggataaaaatataattatataagagcttttaagcgtgcctcgtcaatgatgaggatacggcctttttcttttttgatgatccccgattttttcagggcagatgacagtttggagacggtgaccggatgcattcccaggtatttggcaatctcggcgtaggtaaagccgtggggaacggcgcggtactggccctcgcggctgctgaaggccaggaaccatttgtagagacgttttgaggcacattcctcctgggtatcgtggaatttgcggaccagggtgacgtagttgcaggtcaccgcctccatgatgtaggaaaggaagcaggcatcttcctccagcagggtttcaaaggttctctcatccagacggtagaagacacagtccgtctttgtgtcgatgccgaacggaattttttcctgtacgcagtcgtccccggacagtgtataatcctctccgcggacttttctgtagtggcgcatcagggccggagcaaaccccaggagatgatcgtgggggaaatagataaagtctttctcctctccgtccatggtgagagaggtcaggctggcgatgccttccaccagataatagatataggagtcggacagtctggggttgcagatcgatgtctccctcttcacttcaattctcatgccgtagcgttcaaaatattgttttactccgttttgatccataccgccgaagccctcccgtcaatttgtcgcttttctgtatgatgatttcctaattatatctttttacaaatattggaataaaaatataaccaagactatattttactgtttgttaatatattatcatatttttaagaaatataaaacaataaagtataacactagggggtccattatggcacaaacgaaaaaaaaggatttttattccattcatctggtaatcggaatcggcatcatgctgctgttccgttttcttccgatccagctgccctgtattacgccgatcggcatggagattctgggtatcttcatcggcaccctgtatttatggacgacgtctgacccgattatctccagtattctctctatctttttggtggggcttaccgggtacagtaccatgaacgaagtgctgaccgctacattcggcaatccgattctcgttcaggtcctcttcctgctgacagcgatcaactgtctcatcgaaaacaacttgacagaatactgcggccgttttttcctgaccaggaagatctgtctcggacgtccctgggtgctggcgttctttatcatgctgggctccatgctcatgggcgcgttcatgggcggttttaccccgatcttcttattctgccccatcctttatgatatttttgaaaccgttggactcaagaaacacgacaagttcccgactattatgctgattcttgtcacggtagcgactctgctgggcttcccgatcccgccgttcatgggcaacggactcgccctcatcagcaattatgcttccgtaaccggcaacatgggggcggtaatcgagatcaataacgcaggctatctgcttaccggtctgatccacgcaaccgtctgtatcatcgtactggtcctgttctgcaagtttgtactgagaccggataccagcaagctgaaagaattaaagatggaaacgttaaacaagaatccgcttccgccaatgagcctgcgtcagaaattcattgcagtctccttcaccgtgttcatcctgatccttttaattccaagcgtaattcccgctcatccggtgggacgcttcgtaaaagcaaatacatacggcatcgccgctttctacgtgttcctgttatgcgcgatccggatttcaaaaaaaccgctgatggatttctccagcaccatgaaaagattctcctggagtacctacttccttatcgcttccgcaatcctgctgggaaatgcgctgaccaatgaaagcaccggcgtatccgcgttcttaaacaccgtgctgatgcctgtgctccagaacgttccggcttccgccttcgccgtgattatcatgattcttaccgtggtcttaaccaatgtgtgcaacagcttcgtaatcggcctcttaatgcagccggttatcgcaaccttctgtatggcgacgggaatgaactccgctccggtggtgtccatgatgatattattcgtactctcctccgcggccgtcacgccggcagcatctccgttcgccgcactgcttttcggcaacaaggactggctgaaatccggggaaatttataaatatacaaccatatttgtggcgatagaactggcaattgtgctgcttgtcagcatgccggtggctaatatgctgattcggtaatgacagctgacgaatccggcactgtgcagtacagtacagtgccggaattatgagaaagacgggaatcctgcggctctgcagcgcctcccgtctttcttttttttcactacatctggtattttccaccgatctgtgataatattaggcgttcaccattatcagtcatagaagaaaaggaaactataaatacatgacatttaaagacttacaactatcagcaccactgttaaaagcactggaggagaagggctataccaccccgtcccccattcaggaaaaagcaattccacacgttctggccgggaaggatgttctgggctgcgcccagacaggtacaggaaagaccgccgcatttgcccttccgattatccagaacctgatgaagccatttgacaaaaaatattcaaaacgggtgatccgctcactgattctcaccccgacgcgggaactggctctgcagattgcagaaaatttcaaagaatacggttcccatactccggtaagatgcgccgtcatattcggcggagtctccgcagttccccagatcaaagagctgcagcgcggcattgacatcctggtagccacccccggacgtctgaatgatctgattcaccagggcgagatcagcctgtctcatgtggaaatgttcgttttggacgaggcggaccgcatgctggatatgggctttatccatgacgttaaaaaaattatttcactgcttccggtcaaaaagcagactctgctgttctcggcaaccatgccccccgagattcaggcactgaccgaaaagctcctgcacaatccggccgtcgtggaggtgactcccgtctcctccatcgtggacctgatagaagattccctctactatgtggataaagagaataagcgtgcactgttggtccacctgctgaaacgcgaagccatcacctcgacccttgtcttcacccgcaccaaacacggtgctgaccgaatagctaaatttttaacaaaaaaccggatcaatgccgccgccattcacggcaataaatctcagggcgcacgccaaaaagcgctcagccagtttaaggcgggaacggtacgggtgctggccgcaactgatatcgccgccaggggtattgacatcgaagagctttcctgcgtgatcaactttgatctgcctaatgttcccgaaacttatgtccatcggatcggcagaaccggacgggcaggtctcggcggacgggccatctccttcagcgacatcgaagaaaaagcatacgtggaggatatcgaaaagctgattggaaaaaagattccagtcgtaaaagaccatccgttccccatgaccgtattcaccgttccccagaaagagacgaagccccggccggtaaagaacaccggaagaaacgatgcaaaacgtccgcaaaaaagcaaggttgcccagacggccaggccccgaacgagagtttccgtgaacgcctccgccggcaaacgaaccgctgctaaatgagtcccgtattgaagttccagaataaaacaacagagaccggacagaaggcattcgccatctgtccggtctctgttttatcggttcctggccgttccgtctattcaatcagccgttccacatcaagcattccccagccctgctgattcatgggcagtcctaagtctaccgccctctctctcagcctgagttttacgtcccggttgctcatataaggatatttctgcagtaaaagtgcaatcgcccctgataccagaggcgtggacatggaggtaccgcttttggactggtaggcccccgtttccggggcacagctgatgattccggctccgggagcaatgatttccggcttacagatacaggctcctgtggggcctctgccggaatagtcgatcatacggtttcccattacatttacttctttatagtcgtcggagcagcccaccgtaatcaccttccggctgattcccggagtggttatggtgttctttcccggccccatgttgccggcggccacacagaccaccagaccgtcatcccaggcggcattgacgccccgcaccaggacagagttttcgctcatgcccttcttcgtaaaagagccgaccgatatattcacaatccggattcccagccgttcccggttctcccggatccatttgatccccgccaggacatcggaggcgtatccgtttcccttctgatccagcaccttgaccataatgatatggcactccggcgccaccccctgatatcttccatcggaggaagtcccgcttccgccgataattcccgaaatatgcgttccatgaccgttgtcgtcatatggctcccgtctccggtgtaccatatccgcaaacgcagctactctatgttcaaaatcttcatgaagataaattcccgtatccagcacggccacaccgattccgcggcccgtcaggcccatacggtaggccgcttcacatcggattacttctctcgcatggttcacagtccatttacctgattccttttttattagcatattccatttacattcccatgtttcacccctataatggaaataactgaaaaaaaggagaatcgtattatggataaccacaattttgacgccatggagctgaccatgaagctggtccgcatcgacagcaccgatcccggcgcctgtgaaggtgagatcggaacctttatcttccagtacctgaaagatctgggcgtccccgtcataaaaaaagaggtccttccgggccgttttaacatcatggcgaaggtggagggagaggaggacgctcccgctctcgtctacatctgccacatggacaccgtcaccacgggagagggctggaccgtctcccccttcggcgccgaagtcatcaggggccgcatctacggccggggcgcgtgcgacatgaaatccggccttgcctgtgcactgtccgcctttacctccatggccctcaaagcccgaaacgggaaaaagcccggacgttctctcgtcttcatcggaaccgtggatgaggaagacttcatgcgcggggccgaggccgccattgcagacggctgggtctccaaagactcctgggttctggataccgaacccacaaacggacagatcgaagtcgcccacaagggccgcacctggtttgaaattaccgtgaacggaatcacggctcacgccagtaccccatggaaaggcgcagacgccatagctgccatggcagagatcattgccgccatacgccgccggatcgccgcctgcccggttcatccggatctcggtgcttccaccgtgaccttcggacagattgagggcggctaccgcccctatgtggttcccgattcctgccgtgtctggattgatatgcgtctcgttccaccgacagacacggcaggtgcggcagcgatcgtggaagacgccatcgctgccgccacaaaggagattccgggcatcaccgcagcgtatcagatcaccggcaaccgcccctatgtcgaaaaagacgagcagtctcctcttttaaatgcactgtccagagcctgtgaagaggttaccggcgaaccggcaccggtaagctttttccccggctacacggataccgcagtcatcgccggaacactcggcaatcacaactgcatgtcctacggccccggcgatctggagctggcacataaaccggatgaatacgtaccgtgtgaggatattctgcgctgcgaggaggtccttacgaggctggctgataacctgctgttctgatatccgagcggcatcagactgttttcacgccaagggcccgctgaaatcccctgttttcatcaggatttcagcgggcccgtttctcttttattcaacgaccagaactccgcttctgccattcttcttaatctgatacagcgcctggtccgccttccggtaaagcacgtcataatccgtctcaccgcctgccatggccgctccgatactcagcgtcacttcctgcccgtgtttctccatcgtcacgttcttcacacggtcaagcacctcggtacagcgctgcttcaccagatccgggtcgttcacttccatcaggaagaccacaaattcgtcgcctcccagccttccgacgatatcatccgcccggaaacaggcctttagaatcccggccgtctccttcagtacctgatcccccgtataatgccccagatagtcgttaatctgcttgaaatagtcgatgtccatgatgatcatggctcccgaaccatcccgtccttccgccatcagcgcctgcctcatccgctgatggctggtggccgaattgtatactcccgtcaggctgtccgtctgcgccttcgcttccagctgttccttgatttcccgctccgtctgaatatcgaccagcttccctaccgcgtaccacggccttccagaagtatcggtaaccattttggagatcaccttcagccagcgcacatttcctcccggaagcaggcattcatgctccgtatggttctcctcctgcgatatcatatagccaaagaccggatacttctgcttcaacgcctcaggacgacgtatcttcttctcacaccctaaaaatccggccgtctgttccgtcaggtttaaacagccttccctgatattatactcgtacagaaactcgttggacagctggctgagctgttcatacctctggttctccagcgctttcctggccatatttcttcttctcaggatctcggcggttatgagcaccgcggtgacaaccagcagccagaaaagcaccagatagaggatgctctgctccggatttctcatcacatactcggaaaaggtcagatttcccgcatcatacgcattctgatacaggaaacggtttacctgttcctccggaagtgcccggatcactttgttcatgattgaaagcagcgtaatatccaccggtctcctgattccgaaacagtatttctgcgtccagttttccgattgtgcaaacgtgaataaatttttataattgtggtcagccatataatactgaaccgcatagctgttgccgtaacagtaatccgcttcccccttatggactgcctccatgcattcttctacgttgtcataataatgcagttctccctgaaggctctgctccgtcagcagtgatttctgaagcgccagcttctttcccgataagtccgtaagcgcctttacattttcattcataatcagctgcagagggacagacagataggaaagcgtaagcgcgcagctttcggctccggttacctcatagtcacccgcgatgccgaccaccagatcgacggcaccgtcctccattgctctggaatactcctcccagttatgaaaaggaacgatctcataagacaatccggtctgctcctcgatgtacttaagcacttcgatggaaatccccctgatctccccgttttttgcctggtactgaagcggtgcccgtcccagcattacgcctgccctgacggtccccctccggctgatgtactccctttccgagttcgaaagtaccagcccatcctctccggtaaaatattttctgttaagctccgcggtcaaaaacggattggtggcggtgataatctccatggccttattcagttctcccgccaccgcctgatttcccttcgtcaccccgaagtaaaaaggacgggaatcaaaccgggaaatcacacggagctcacggtcacttaagctgacatccatactcagaaccgcatccgctttccccgtcttaagcagctccatctgttcttccccggtactgcacagcacctgattcacacgaaagccgttcatgttcgcaaaaccatttaacttttcatcttcctgaccgtcaaagctgaccaccgcaacccggatgtcattaaatgagtcgtaatcaaattccgtgtactccagattatccttcaggacggatatcgtcttatgagccgttccatagctgtattcgggatagtcaaagagctctgcaagcctttccgaataattcatggcccccagcaaatcaatttccccgtccctgagcatggtgagcagtccggacagctgctcatccagcgtcccctccgctgtaacaaattcatattcccaattggtatagcgcgctatctcctgcaggtactcatacgtatatccgctgtaagtcccatcttcactgatctccgtaaatccctgctggaccggataccctacccgcacaaccctggagccgttctccgcagctctggctgtaaaggaaaacaggagcaggcagaacaggaccgtaaacagtattcctatcctgccgcgccatcttctgccacccatgtcttttccccctgcacatcaaacgttattcttatatccaatcataagtcagaattgccggatcgtcaaacacttccggcattttccctccgtctaagccgaaaaacaggcaaaatacgaaaacaggcggccctcacaggaccgcctgactgatacaattcttatttacgtctgcctactattcttatgatatacaggaacaggttcacaaaatccagatataactggagtgcggaaaagatagacgcctttgccgccatctccggatcctgcgcgtaatactggtggtaagccctgatcttctgtgtgtcatacgcggtaaatccaaggaaaatgaagataccgatgtagcatacgatcatctcaaactgtcccagattgatgaacatggacagcagccagaatacaaccaggaaaatcagtccgcccatcaggaagttgcggatacggctgaaatccgcattggttacgtatccaatcacagccataacaccgaagaaaatggaggttgcgccaaataccagaatcagatcaaccatatcgtacatgagaaagtaagccgaaaaaacaacgccgtttaaaaccgcatacgtgaagaacagcgctctcgccgtgccgacagacatcttatggattcgcgcagataagaataaaacgaccgcgatctccgccacacccagaagcagatacgcgtaaggaaccgcaaatacatagatgatcgttccagtcgtatatccaaacgcggccaccaggaatgtgatgagaagtccggcaaacatccagccgaaggtctttgcagtgtacttacccagcggttctgcgctggtgctgtcggaataaacgtaaggctgatttgttgaattataatccatatgtataatcccctctcttttttttatagtttactatatttcataggaaatgtctatgaattgtaaaaaaaccgttatcttttttaacttttcatttttaatgcgatgggagatgccgcactcccgggtatccgggatttatggaaatgggatgggaattaagaaaatcttcataatctattcaaacaatatacaaacatttccagggtcagtatgctatactaagtacataagaaatgcacaaagtaacaaattatcctttcaccctttttgaaaatccgaaaatcctaaagaaaaatcaaccctgtgtcgtaagacacagggatttttctgttttcagtcaaactctgttcccaaatccaaaaccaccccgaagccaggaccggcacacggggtggttttatcaattaaagtaaatcctttaaaatatcacagaaatcaaatgtcgcaaagtagtccttcggagtctccgccctgcggatcatctccacggaaccgtcctccttcagaagaagctcggctgattttaattttccgttgtaattatatcccatggcaaacccgtgagctcccgtgtcgtgaatgtagagtaagtctcctttgtgaatctccggcagcatccggtcaatggcgaacttgtcattattctcacagagcgagccgaccacgtcatacttatggtcgcacggatcgttctcacgccccatgaccgtcacatggtggtacgccccgtacatggccggccgcattaagttcactgcgcaggcatccacgcccacgtactccttgtgcgtatgtttctcatgaatggcccttgtcaccagcgcgccgtaggggcccagcatgtagcggcccagctccgtatagatcgccacatcatccatgcccgcaggcaccagaatctcctcgtacgcttttctaacgccctcgccgatggccatgatatcattcggctcctgatccggacggtacgggattccgattccgcccgataagttaataaactgaatatgggccccggtctcctccttgagcttcaccgccagctcaaataagattttggcaagcagcgggtaatactcgttcgtcactgtgttgctggctaaaaacgcatgaattccaaaatgcttcgcgcctttttcctttaacacctgatacgcctcgaacatctgctccgtcgtcataccgtacttggaatctccgggattatccataatatcgttgctgatcttgaacacgccgcccggattataacggcagctgatggtctccggaatctccccgatggcattctccagatactcgatatgggtgatatcatcgagattgatgatcgctccgatcttatgggcaaaccgaaactcttccgcaggcgtgtcattggacgaaaacatgatatcagagccggaaaatcccagagcatccgccatcattaactccgtctcggaagaacagtctgttccgcagccgaattccttcagaatatttaatatgaacggattcggggttgccttcaccgcaaagtactctttatagccagggttccatgcaaacgcctccttcagcttcttcgcattctccctgattcccttttcatcataaatatgaaatggggttggatactgttttacaatctcttccagtttctctttcgttacaaatggtcttttctccaaagcctcgttacctccttctgctgcctgtaaccggattagtctaccgttaccacccgcagaatattggtatgcgctgcaggctcatgcttgctcgtcgggcttacaaccccggctgtaacaacgaccagatcgtcttccttcacgatattcttagcctttaacagctcgatagaggagtagatcagaacgtcggtggactctgcacgtttcgcatggaacggcttaacgccccagtagagctgcatctgacgcactgcggaagcactcggtgacaggccgattactaacgcctccggcctccatttggaaagcattctcgtcgtaaagccggtgatactcggtgcaacgatggcttttgcatttaaatcgtgggcggttcccacggaagaagaacagacggcattggaaatattgtgtacattggcggctgaaacgcggcgctgccggtatgcggagtaatcgagatgtttctccgtctcctccacgattgacgccatcatggacagcgcttccaccggatacttgcccatggcggtctcgccggacagcataaccgcgtcggttccgtcgtatacggcattggccacatcggtaacctcggctctcgtcggacgcggattgcggatcatggaatccagcatctgggttgcggtgataaccggcttgcaggccacgttgcatttttcaatgatcatcttctggatatacggtacttcctgtgccggaatctccacgcccatgtcgccgcgggctaccatgatgccgtcgctggcctctatgatggcgtccagattctcaatgccttccgcgttctcgatcttcgcgatgacagccatgttggaaccatgctcggaaaggatttccttaatttcaagaatagcggctgcggttctgacgaatgacgccgcgatgaaatcaaagccctgctcgattccgaataagatatcggctttatccttctcggtcagcgccggaagctttacctttacatttggtacattcacgccctttttctcgcccagctcgccgccgttgacaacggtgcagacgatgttgtttccattcacttctactacgtccagttcgatcagtccgtcgtcgatcaggatcttgttgcctgcctttacatcctcatgaagacgctcataggtgatatgtcccatcgtctcatctccgatgatgtcgtcggtagtaagcgtatacgtctggccttccttcagggttaccttctttccgtcctttaagacgccggtacggatctccggtccctttgtatccagcagggctgcgatcggtaaatccagctcttccctgacactctttaacatatcaaggcgcattttctgctcctcataatctccatgggaaaaattaaatcttgcaacatccatgccattctcggcaagtgccttcattaaattgcggtcattggtattcggtcccatggtacagataattttcgtttttttcattgatttcctccaaactgatcaattcatggttttccgggcttcgtcttcctcccgggtaacgtgtttatgtgtatataaatgttcggaacagtattcatagctgccctcacatttggaacagtaacggaattctaaattcggatcgtccttctccgttcttccgcagaccgcgcatttgtgatgggtgcttccctggggcatgatcttcgtctgcctctggaaatcccgtttgcgcttgatctctttcggattcacccggttaaagttcctcgtcatgaagaagaacaggatgaagtttaacagagacagtacgatggtcacacgaatgctcgttccacctttgacaaagccgtacaggaaatagattccattaaacagggccagccatttggccttgatcgggatcacgaaaaacagcagaaattccagatccgggaaggtcgcggcaaacgcgaaaaacagggaaaagtttaagaattcagttgtcagatacaccggcgtgccaaagaacacataaagaatcagcgacgccgccacatggccgataattcccatgaagaaatacacattaaaccggaatgccccccatacacgttccagagtatttcctaccatatagtacagatacatggcaatcaggcttccaaatatcccgccgcccggcgggtaaatcataaatgtcacaattctccagatctgaccgtgcagaattgcctgcgcatccagcgacaaaaaccgccagtagaatcccggggcaaacatctccattaagagacccacgccatacatcaggataatataatacatcagattgggaattgcgtaacgtttaaacttccgctcaaaattgtaaaaaaatttcattcttccatccttctcacatacattgataacagatcagaacagatcttttttggaaaagatccaggctacgatcagcgtcagcaccagcgtaaatcccatgacaatgacaaatccgtaaggactgtccgcaaacggcattccccttgagttcacgttcattccgtagaagctggccaccatggtcggtatggacatgacgatggtgatggtcgccaggaatttcatgacgatatttaagttgttggaaatgacggaagcaaatgcatccatggtgccgcttaaaattccgctgtaaatgttggccatctcgatggcctgcttgttctcgatgataacgtcctccagaagatccgtgtcctccggatacttcttgattttctcgtttctcatcagtttttccaggacgacttcattggaccgtaaggaggtcgtgaagtatacaaggctcttctccagctccagaagctcgatgagttcccggtttttcgtggactgatgcagcttttcctcgatcacgccgctcttcttatcaataatccttaaatattgaaggaaaagcgatgcgtttttatacagtacctgcagaatgaacctggtcttcatatacgtatggaaatctctcacacggccgtccataaacgcccccagtaccggtgtctcttccaggcagaccgtgatgatgacctcttccgttgtgatgatgcccatggggatcgtcacataccagtccttgtcgtttcgttcctcaatgctgggaatatccaccagaatcagggtgtaattatcctcagtttcaatacgggaacgctcttcctcatccagaggcgcccttaaatcatcgggatcgatcccgtacgtattggcaatctccagaatctccgttgccgtcgggttggtaagcgcgatccaggatcctggtgacagttcatccttctggtgaatcagaccgttctctgttttaaaaatacgaatcatgagctacttccccctttatttggcatacttagacttatacattatagagtccgatcccttttttgtcaaacgaactttaaacagatttggcgatcttacacaaattttactatattttaacactttttaacacagagctgcgattgtattatttcttattttatgttaaactgggtgcggtgagcccgacaattgttactgtttactccgtgaacagtgaccgacaacttacttatacacaaaggaggcaggggagaatccccgcgcatatgaatacatataacacgctaggaatcgatatcggttctaccaccgttaagattgcaatactggacggtgatcatcacatattgttcgctgattacgaacggcattttgccaatatacaggaaactctggcagccctcttgaaaaaagcctgcgatttactcggtcccatggacttgcggcctgccattaccggctccggcggccttactctgtcgaagcacctggagattccattcattcaggaagtcgttgcggtagccgcttctcttactgattatgccccacagaccgatgttgcaatcgaacttggcggagaagatgcaaaaatcatctattttaccggaggcattgaccagcgtatgaacggaatctgcgcaggcggcaccggttcttttattgaccagatggctgcgctcctgcagacggatgctgccggactgaatgaatacgcggcggattacaaagcgatctacccgattgcggcccgctgcggcgttttcgcaaagtctgatatccagcctctcatcaacgagggcgctaccagggaagacttggccgcctcgatctttcaggcggtggtgaatcagaccatcagcggtctggcctgcggaaagcccatccgaggcaatgtggcatttttaggaggtccgcttcatttcctgccggagctccggaaggcatttatccgcacgctgcacttaagcggagatgcgattatcgcccctgagaattcccatctatttgccgccatcggcgcggccttaaacgcagaagagcgcggcgcgcttctctccatggaagaactgattacccgtttatcctccggaatccggatggaattcgaggtaaagcgcatggagccgctgtttgcggaccaggcggactacgatgaattcacaaagcgtcacgagaaccactgcgtgacaaagagtgatctgtcctcctaccacgggaaatgcttcctgggaatcgacgccggttccaccactaccaaggtggctttagtcggagaggatggaacactcctctacagcttttacagcagcaacaacggaagcccgctggccacggcaattcgcgccatgggtgagataaacagccgtcttcccgcagacagccagatcgtatactcctgttctaccgggtacggcgaggcgctgttaaaggccgcattcctgttagacgagggggaagtggagaccatctcccactactacgccgcggcatttttcgagccggacgtagactgcattctggatatcggcggccaggatatgaagtgcatccgcatcaaaaacggcaccgtggacagcgtccagttaaatgaggcctgctcctccggctgcggctccttcatcgagacatttgccaattccctgaatttcagtgtggaagactttgcaaaggaagcgcttttcgcaaagaatcccacggatcttggaacccgctgtaccgtgttcatgaactccaacgtaaagcaggcgcagaaggaaggggcgtccgtggccgacatttctgccggtctcgcctactctgtcatcaagaacgccttatttaaggtaatcaagatcaccagcgcctccgatttaggagaacacgtcgtcgttcagggcggcaccttttacaatgacgcagtattacgaagttttgagaagatcgctgagtgcaacgcggtacgccccgacattgcgggcatcatgggcgccttcggagctgcgctgattgccagggaacggtacgatgagacgaaagccacgtccatgcttagtatggaaaagattttaagtctccactacgagacctccatgacgcgctgcaagggctgcaccaacagctgcgttctgacgatcaaccggttcgacggcgggcggcagttcatcaccggcaaccgctgtgaaagagggttaggcaaggagcgcgccaagagggaaatccccaacttgtttgattacaagaatcaccgcatgttcgactacgagccgctgagcgcggatttagcctccagaggcgtcctgggaatcccccgggtactcaacatgtatgaaaactaccccttctgggctgtctttttaaaagaactgaagttccgcacggtcctttctccgcagtccaccaggaaaatatacgagctgggaatcgaatctatccccagcgaatcggaatgctatccggccaagatcacccacggccatatcgaatggctgatcaagcaggggattaagacgattttttatccctgcattccttacgagcgcaatgagacgcctgacgccggcaaccatttcaactgtccgatcgtcacgtcctacgccgagaatatcaaaaacaacgtggaggagctggatacggaaaacgttcgtttcctcaatccttttatggcgtttaccaacgaagaggtgctgacgaagcggctgatcgaagtctttaacgaagagttccagattcctgccgatgaggtgaaggaagccgctcacaaggcgtgggaggagcttcttgcttcccgccgggacatggagaaaaagggcgaggaaacacttcagtggatgaaagaaaacgaccgccgcggcatcgtactggcgggccgtccctaccatgtggacccggagatcaaccacggtatcccggaactgatcacctcctacggatttgcggttctgacagaagactccatctcccaattgggtgagatcgaacggcctttggtggtcactgaccagtggatgtaccataccagactctaccgcgccgcaagctacgtaaaatcgcagaataacctggatttgatccagttaaactccttcggatgcggcctcgatgccgtcaccacggaccaggtaaatgatatcttaaccggctccggaaagatctatacagtgctcaagatcgacgaggtcaacaacctgggggccgccagaatccgtatccgctctctcattgccgccctgcgcgtacgcgataagaagcactatgagcggaaggtggtttccagcgcctaccaccgcatcacgtttacgaaggacatgaagaaggactacaccatcctctgcccgcagatgtcgccgattcattttgacttaatcgaaccagccatccgctccttcggctatcaagtggaggtcctgcagaatgacaaccgttccgccatcgacacaggattaaagtacgtcaacaacgacgcctgctacccgtccttaatcgtggtcggccagatcatggacgccctgctgtccggcaaatacgatttagaccatacggccattttcatgagccagaccggaggcggctgccgcgcgtccaactatatcggctttatccgccgcgccttagagcgcgccggaatgggacagattccggtcatctccgtcaatgccaacggcatggagacgaaccccggcttttccatcacgctgccgctgcttactaaagccatgcaggctgtggtctacggcgacattttcatgagggtgctctatgccacaaggccatacgagaaggagcccggctccgccaatgcgcttcaccagaaatggaaggcgcggtgcatcaaatccttatcaaagcgcgttccgaacatgatggaattttcccgcaatatttcgggaatcgtacgggatttcgatgagctgcccagaatatcaggacttcagaagccgaaggtgggaatcgtcggggaaatcctcgtgaagttctcaccgctggccaacaaccacatcgtggagctgctggaatccgagggtgccgaggccgtaatgcccgatctgatggacttcctgttatactgcttctacaacagcaactttaaggcagccaacttaggcggaaaaaaatcgagcgccagcctctgcaacatgggcatctcccttctggagtatttccgcaaggccgcccgcagggagctgatgaagagcaaacactttaccgcccccgcccggattgcgaacctggcggaaatggccaaagacttcgtctccatcggcaaccagaccggcgaaggctggttcttaaccggagagatgctggagcttattcacagcggcgtcggcaacatcgtctgcacgcagccatttgggtgcctcccgaaccatattgtcggtaagggcgtcatcaaagagctcagaaaggcatatccgaattccaacatcatcgctgtggactacgaccccggcgcgagtgaagtgaatcagttaaacagaattaaattgatgctgtctactgcgcagaagaatatgcgggtgcaggatacgaaataaaaagaaggccgcagcagagtttttaatccctgctgcagcctttttttcgatgctacacatcttattctttattgcccggtaatcagatccgctgctttcgcggcaaactcctcaaacatgcggtcccccttatccttggccgctgccgtgggatcgccgtatgtaccggacacactcaagtcgccgatggaggtattgtccatcccgtaaaggggcggcctgtccggatactcggcctgagctaagtccatgtggaccagctcctccctggcagacagcatgagtgacgtctcaaattcgcaggcatggaacatgcctccccaggtgggactctccatatatttgtcgtaaatggcctgcagtccaggataaaacattcccagaacttttaccggggtatcatcctgaatatcgcggatcgcatacttcatggaagcgccgttggcctcgtggccgtttaaaaagacgagtttcgtcacgccgtaccgctccacggatttcacgatgtcctttaaaacaagctgcaaatggtcctgaggaagggatacggtgccaatccggtcgcgccatacccaggagtagccgaaattgagtgttggaaataccagcgccccggtacggtcggatatgagccgtgccagatgttccgccaggaaaacgtcggttcccagagggaggtgatagccgtgctgttccgtggagcctatgggtacgatggcggtggaacacacctccagccgttctttcaccatgggccaggtcatgttctggacgataaatgccatcgctttatacctcccttttcattgcctggacgtacagccgggctttctgccggatcagctccagatccccatctgccgctcctcttggcaccagattgctgccggcggccgcgccgacaaaacctgccttcagaaactgggacacattagtctcattcacacctcctacagccacaaactctgcctgcggaaaaggtcccttcagacttttaatataagacattccaaaggcatcggctggaaacagcttgagacgcctgacgcctctgttaagcgccttctggacgtctcccggcgtcagtacaccgggcagaacctccagcccctttgaaaggccgtaagccaccagatcgtcatcgtagcccggcgttaaaaagaacgggattttcatggccgccagccggtccacctcctctttctttgtaaccgtccctgcccctaagcagattccgcccggtgaatacttcttctgaagctgctcgatgcagccaaatcccttttccgggtcgcttaaggatacttcaataccggtgattccttcacttaacagcgtctctgcaatcggagccgcataaacgggctccacatcccggataattgccatgagccttatagattcaatcatgtgcgtcctccttaaaatacggccagccaccgtttcgggttctcgataaagatcgtgtcaatatcctgctggctgattccctcgtccagaagacgggcgataaattttgtcctgataaagcggaatcccgggcctccgccgtaagcctctaaataggaggcgcgtcccatatctccggatatcagcagctgcctgccgtaaccatgcccgatcagggagcggatgagggctactctcgtggaatcgggatggtatttcacctttccgggtccgtcaaactgaatatagattccccggtcggccagcttaagaagatagtactcgtccggattgcggtccagatggcccagggccacagtggttaaatccacgccctcattttccaggatgtccagcacctccattcccatggtgccggcctccgtatggccccagatcggtgcattgcagagtttctgggcggttgccgccgcaattgccgtcttcttctccagcggatgaatcatattgtaataagtgccgattttgatgaagccggctctcgcatccgatccgtcgccaccttccatcacatcctttgccagcatgcccgcgatctcttccatagacgtttccgccacccacggcgggtagtagatatgcttattgaaaccagtggttgcgataatatggacccctgtctcctgtgccatccgtttcagaacctttaagtctctgccatagtccagcgtagaggcctccaccagggtgcgtcccccgacttccttgaaatgaaacagctcctgcacgctgttctcgtagctgctcagttccaaatccctgtccttctgacatggcggaggaaccgcatggagatgctcatggggataagtaaatcccatatcctctccctttatgtcacctaaaactgttcttgcaaatttttccattctgcgaccttctttccaagtcctttttccaaatttaagttctttccatacagcagtactgcgttctaaattacagcgggactccaaacaccatgcccacaaggcgcatcagcaccgacacaataatggcatccgtcgaagcaaaccataagccttccactccgtaagcacctacattgacgaaggggtatgcagccgccacaatcagcgtgaagaaaacaccgaggaagaggcctgctgccacagcgccctttttgccgcctaatttatcgccgaacacgcctgccgcgccgcccatgaagaagaggccgatcactcccggaagcacgactacgttcatcctggtcgtaatcatggtgctgatgataccgcccaccatcgccgccaggaaaccaaccgtggtcgccatcggtccgacgctgtagaaaatcgggatgtcgagagccggtctggctccgggaaccagcttctcactgatgcccttaaatgcgggaataatttcgcctaagaacatgcggaccccctgtaagaggacgagtacgcccgccacaaaggtgagggcctggatcagggtatagatgatgtagttctgtccgccggacagcgccgtcaccgtctcgcggcctgcaatcagtgcggtcaggatgtacacgacaatcatgacaatagccataagaattgacatgtccttcagaaaattaaatttttcggatacatggaccttttcccaagtatcctgctccgggtcacggtcttttttcccgaacaggccgccgacaaatccactgagacagacaagggagcttccccagaagccaaacgccacttcatccgtctttaaaatctttctgacaaatggctgggcaatagccggaaatacaatcatggaaattccctggacgaccgagccgatggccacagcctcccagccccggatccccatctggtccagaacgattgccatagttcccgcaaaggaaaacatcatgtggccagtcaggaaaatgtacttaaagggcgtaatacgcgccagcagcaggttgattaagaatgagaacaacatgatgagaggagtctcaaatcccaatactgtctgtactgctgctaccagggaattgtcctcgggcacgatccccgccatgccgaaagcactgttaaacatggaactgaacggaaccagggcccccacaatgacatttgatcccgcgctcagtatcagaaatcccaaaattgtcttaaaggttcctgaaataacgtctgatacgctgtttttcatggcgatcagaccgatcatcgctacaaggcctaatacaaccgtaggctggcttaagaaatcaactaaaaattttatcatactgttcttctccttttatctttccgcagtcatttcacaggttatttcatataaggaagaatcaattcctcaatcccctttttatcaagtaaatttgtaaccggcagaacgggcacatcggccacgatctgtttcgcgatctccgaggaagccgcaatcagatcacaggtctttcctttataagagcctaaatccactgcttccccttccactgtcacatgatgcttcttcccgatatcctttatggtcatcagaagcataaggctggttccaaatcccattccacacactgttataactctcataaactctccttttcggttaatttttccagttcctcataggaagtgattgttaaaagacgttctctgaccttatcatcctccagaaatctccccagttcctgaagtaacgccagatggctgtcattttccacaccgcccagtgtaaatacaagttttaccggatcattaaaggggtgatgaaacgatacaggatctttgagcctgatgaagctgatgcagggctcagacacatctcccgatggtctcgcatgaggcattgcaatgcccggtgccataaccatatatggacccaggtcatggaatgcctcttccatttttacaatataagtttccttcactttcccgctgttcactaatagctgaccgctaaaatgaattacttcctccggtgttgtaagtccttccacatccagccggactacgtcctttgtcaatatgtctgtcagcataagtaccctccatcaaattcctttaaatatgtaacaaattcttcatagcatttactgccggccagtttattgatccactcttcatccgataccatcaggaacaaccgttccagcacttccttgattttttcatcccctcttttaaagcagcccagaatcacaagcttcacattggcctttccccatggaacagggtttttcatcagtacgaatacaaaaaagctctctccgtcaatcaggcagtgaggcagcgccgcaaacggcgatatctctgtcgataccagactttcccgcttcataacggcattcttttcttcttccttaagcctcccctgctcaatcatcagatcacagattctcgtaagcactcctttttttcttacaggcttatcccacagaaaaaagctgtccctcccgcacagggattccagactaccgctccttttcaaccgcgtcagggccgcattgatcctcatctggtccttttcattcagaaacgggctgacggtaaccacttcctttcccaggccgttctccctgccggtgggaagcatcgtgatataaaaatccgcctcctccggcagcgcatttccttcccctgcctctccgatgtccaggacttccagtccggcatagatctgttccagccggctctttaagaggcgtgccgctcccggcatggtttcactgatgaaagcggtcttaaacttacggattttattctcctgctccagggaagacgcaaaatacatggtgagaaatcccagttctccaacagagagattctgttttgtatactccgtaatacattccgccagttcaatggcatagtagtaagcagtggggtatattttctgaagttcctcatagaacggattctccgtctccatatgtaccagatacttcccgtagctggatgccacatggaggatcagaccgttgaccagcgcttcatcgccgctcaaatccacaccgtagttattccggatttttttcatccccttcataaccaggccatggaaaaacatgagattgtgttcatcaatctggttgaaccggcagtttccgccaagggtctgcatccagatcagggttaaatacatgcactccccttccagcctgtttttcggaaagtacttcttcagcagaaatcgtgtcgtcttcatttgctccttaaacggttcttttccgtccagatgagccagatagccgaaataaatctcctttccgagagagattcgcttgatggtgatggccaggtatttgaaaaactgttgttcttccttttcctttgcggatattccgtatttttttaggcatctgccgatccattttctgatgtctttctccggtacttcccggatgtccagagagtcccagatcttttcatcccctgccttctccagcagatgatacatgcagtcccggatgctgatttcatttccgctgatgtagagtcccgtataggctttactgaacagctccaggccgaaattctccagataggaattcgacagcgttgtaattctggacatactggaccggctgtaatgaaacagctcttccagctcctccatcttgcatccgtcactgatcaggatacgtctcaccatttcacgaatcagctcatccccctgactgcctgcatggcttcccatatccttaaaaaatgtccggcagcgcgcctgatctgtaatttttatctgatacccccttcccttataggaacggatttcaaaaccgttttcctttcccagagcttctgcttctttgatatagcgaagaatcatcctgctgctgactccaagatgggctcccagctgtccggaggtgacataactctccagagtgtctgccaggtattggacaacctgaaatgtttttgtgtacatattattttcctctctgttgcagccctgcctgtctcctgtatcattattataataatctgacaataagatgtcgatttcaacaaatgacggttagtaagtgacatcatgattataaagctatcttaacacaaagaaactggaattttatggagagaattctggaaccagaccggcaggaagaaagaaaaaacatttattttaaacgatggagcagctccagtgtcaagcttcatttcccttaattttctcttattttcttacgcattcttacgccttttttactccgcttgaccttggagtaagtccatggtttaaagtcgtgttatcagcaggagcgctgatgaaaggatatgattttcatttgaaaggggaaattaatttatgaagagacagatgaaaaaatggattattccatgcgctgccgcgctcttaaccataggcgcatctatgacagcattcgcagcccagggctggtccatggaaggcgacaactgggtctatttagattccagcggaaacagagttaccgattcctggaagaagtcgggtgacaactggttttatctcgactccaacggagacatggcaaaaagcagcctgattgaggatgacgacaactattactacgtcaactccgtaggcgccatggtttccaacgaatggcgtgaaatcgcttctgattatgaagaggaagattcaccggatacctactggtattacttccagaacaatggaaaagcctacaaggcctccagttccggaaagacctcgtttaagtcgatccgcaaggccaatggagaatggaaaaaatatgcatttgactcagaaggaagaatgctcttcggctgggtcggcgaggattccgaacgaatcaccggtgatgatgcatggagagagggcgtatactactgcggcaactctgacgacggtgcgcaggtcatcaacgcatggagcctgcaggaagtagaggatcccgacacggaagacgataatttcaacgggacctactggttctacttcggctctaacggcaagaaaacaaaagagaccacaaaaaccatcaacggtctcaagtaccgcttcaacgaaaacggtgcggcagaatctgaatggtacgccaaggcttctacctcagctgcaagcggaagcaacttatattacaacctgcctgagcagtgctggctggcaaagggctggtttaagactatcccaggcgtcgaagtagatcctgaagcttacgacgacggcaccgaatactggttctacgcccagaataacggcgaactcgttaagagccagattaagacaatcaacaattaccgctacgcattcaacgaaaagggcgaaatgcttcacggcctctatatgctgaccttcgatgacaacaagaagatcgagacctacgaagagatcgagtcagaaagcgaccttccggataccgacgacgagcgtgacgtttactacttcggagattctcctaaggaaggcgttatggctaccggcaagaccacgatcgatatcgacggtgagaaatacacctacaacttccgcaagtccggcagtgacaagggcgccggctacaacggtatctacgacgattccatctacatcaagggccgcctgctgaaggctgaccgtgacgcaaaatacgaagttgtcgaatatgacggcaaggattacttaatcggtacctccggaaaacttgccaaaggcaaaaagaacttaaagaacggtgacgacaagtacttcagcaccaataagcagggtattgtcacctatgaaggttatgaaaaagaataacgaaattccgccatcacaagcactcttttctaaatagaaacggggtctgccaatccggcagacctcatttttcatcctgttattttttccagaatctggttgcttccccaccacttttgtagtataatacttagaacgtgtgttctgctgcatacaggactcataccaacgacaaacggaggtctatctcatgattcacggaattttttctctctatgtggaacgctggccgttcttccaggagctgattctccagcatataaagattgcatcgacagcgattcttatttcgggtaccatcggcctgtttctcggtattttaatcagtgaacacaggaaattcgccacatggatcatcgggatcatcaacgtggcctatacgattccctccatctccatgctgggctttttaatcccgtttaccggcatcggcaataagacggccaccatcgcacttaccatctacgggctgctgcccatggtccggaacacctacaccggcatcaccactattgaagcctccaccatcgaggtggcaaagggcatgggaagcacgccctggcagattctttacaaggtcaagcttccgctggcgcttcctgtcatcgtagcgggactccgcagtatggtagtcatgacgatttcactcagcggtatcgcctcctacatcggggcaggcggcttaggggtggccatctaccgcggcatcaccacgaacaacgccgccatgacgtatgccggcagtatcttaatcgccatcgtggcactggcctccgatcagctggtggcttatattgaacgtcatattcggaagaagtggcatctggctccataaaggagacggccgtaaggaggattatcgtatgaacgtcatcgaattaaaggatatcaccatgtcctatggacccaacaggatcctggaacattttaacttaagtgtggaacagggcacatttttaaccatgatcggcagctccggctgcggcaagaccactgcgctgaagctgatgaacggcctgctgacaccggagcagggaaccgtgaccatcaacggcacggatatatcccggacggatatcaatgaactccgtcgcggcatcggctacgtcatccaggagatcggcctcttcccccacatgacgattgaaaagaatatcagctacgtaccgaatctctataagtctccggacaaagcagccatcgccgcccgtgcccggcagcttgccgggacggttggtctggatacggatatgctgaagcgctatcccagcgaactgtccggcggtcagcgtcagagagtgggcatcgccagggcgctgatgaattcaccgaagatcatcctgatggacgagcccttcggcgcagtcgatgagatcacccgcaggcgtcttcaggaggagatccttcgaatccacgaggaactgggcggaaccatcgtctttgtcacacacgatatcaaggaagcattaaagcttggcagccgtgtcctcgtcatggatcacggaaacatcattcaggacgggtctcccaccgaacttttagaacatcctgcaacggactttgtccgccggctggtagccggttagggaaaggccgctgcgtttatatagagcccctgtgagtcttgaggggcagaaatgacagaacgatcacaggaggatccagaaatgaaaaaatggaaaaaaatagctgctgcagcagtcataggtaccgcagccatcgcggcgctgtctctcggcggatgcgcaaaaaaggaacaggggaccataaagatcgcatccaagcccatgacggagcagtatgttctgaccgagattatcggccagttaatcgagcatgatctcggtgtaaaagtagagattaccaaaggggtcggcggcggaaccaccaacattcagccggcgctgttaaagggtgattttgatttatatccggaatacacgggaaccggctggctcaccgtattaaagaaggaacaggagaacgatcccgatgttctttacgcgaatctccagaagggctatgaagagatggggcttcactggaccggcctctacggcttccagaattcctacgttctggctgtcagaaaggaagctgccgaccagtattcccttaagaccttctcggatctggctgctgcatccgatcagctggtattcggcgggaatcccgactacatggaacgggaagatggatttaactatctcgcttccgcctataacatgaattttaaggatgtcagggatatcgatatcgccttaaagtacacggccatggccgacaagcagatcgatgtcaccaacgcgtacaccaccgatgcccagttaagtgtggctgatgtatccctgcttgaagatgaccagcatattttcgccacttattacggcgccactgtagtccgccaggataccttaaagaaatatccaaaactgagcgaaaccctggaaaagctgaccggccagatctccgacgatgagatgcgcgccatgaactatgctgtggaagtagaacagaaggatgaaaaagaggttgcgaaagactttttaacagaaaaaggacttttaaactagactcaggaattcacaatcatcagtcaaaaaccccgccgttaacggcggggtttttgacactgaagctgccttttgccacataccagattttatgataccggaaaatttccatgccatacttttcaaaaataaaatcaaaaaaccgggtggaacatggaaaacctctcatattccgccccggcttctcttttattttacaattcacgcattcctttatacaccttttcagcagtaatcggcagctcccgtatctgcacgcccaccgcattcgccaccgcgcctgcgatggccggtgacggagtattaatcacaatctcaccaatggacttcgctccaaacgggccggtcggctcatagctgctctcaaattccacccggacattccccacatcgagtctggtcggaagcttatactgcatgagagaattctcaatcagtcttcccttctctgtataggtaatatcctcatagagcgccatgccgattccctgggcgattccgccctccgtctgaactctggccagattcggattaatcacggttccgcagtcaacgacggctgcataatcaatcagcctgacgtctcccgtctccgtatcgacttccacctcggccattcccaccatgaacggaggcggggataccggagatgtgtgtgtgtaaccggctgacagcattttctcattaaagcacataacgcggtttccgatatcttttaaggatatttccaactctccatccggctgataaacccgtttaccgtcaaattccagtgtttctccacagcagttcaaatattccgcgcctttatccacaattttccgtctcaattcctcacaggcccgcaccaccgccataccagtcagatacgtagtactggaggcataagagccggaatcatagggggatacgtctgtatcagtaccgtgcacgacgatctgatccatatcacattccagacagtctgctgccatctgcgcaagaatcgtgtcacaaccggtccccatatcggaagccccgatcatcagggtatagaaaccgtcatcattcacgcggatttctacagagcccacatcgacattggaaatggatgagccctgcatggccatggcgacgccgactccgcgaaccttaccatttcccatgtccacacgcgggaatttctgatcccatccgatcatttccttcgctctcgccatacagcggtccaacgcacagctgtttaacttctctccgtagtaggcaggcattacgtcgccttccttcaccatgttcttctcccgcagtgccaccgggtccatgtgaagcgcggcagcgagttcattaaccgctgattccactgcaaatattccctgtgtcgctccatatccgcggtaagcaccggaggacatgacattcgtatagaccacatcgtaacggaaccggaacgcttccggagtccggtaaagcggaatggatttatggccggaaaggcctaccgttgtcggaccgtgttctccatacgcgcccgtattggataaagtgtagacatcaatcgccttgatcgttccttccgcgtccgcccccagacgtacatgaatctccatctcatggcgcggagatgaggcgatctgcgattcatagcgggtatagaccatcttcgccgcccttcccgtcttcatcgtcacgatcgccgggtaaacttccgccaccacggtctgcttcgctccgaatccgcctccgattctcggcttgatcacacgcaccatgggtttgggaatatcgagcgcatgggcaagtattcttctcacatgaaacggaatctgggtggaggccaccacatttaagcggccgtatgtatccagatacgtatatgcacggaacgtctccatcatcgcctgctgattcgccttggtatgatagacgcggtcgatcacaacctcgcatttctccagggtgccgtccacatcgccgttttcctcgccgccgcaggcacacagattgcgtctgttatccgcgcctaccgggcagagactcttccagttatcctccggatgaaccagaatctcactgtcctttgcctgccggaagtcgagaacaggttccagcacctcatattccaccttaatcaggcggagagcgcggtccaccgcctcctctgtctctcccgccacgatcgcagccgcatcgcctgcaaaacgcagcctctgatccagaatcagcctgtcataggggctgggctccggatacgtctgccccgccatggtaaaacgctgatccggcacatccttataagtcagtacacaggcgatcccgtccacctcggaggcagccttcacatcgatttcccgaatcagcgcatgagcgtgaggactccgaagcaccttgacaatcaggctgtccttcggcgctaaatcatccgtatagacaggcttacctgttaccagcgcctttgcatccaccttgataacgggggaatttaccgcatgcatttccatattcatctcgcttctcctcccctcgccagatactttctgatggccctcatctgccccatataaccactgcaccggcagagattgcctgccagatactctttgatctcgtcctctcccggatggttcagttccttttccattgcaagcacattcatgatcaggcccgggctgcagaatccacactgttctgctccctctccggccagaaacattccaaactcttccgcttccttctgaacgccttccagagtcaccacatcccggtcattcacgcgggctgccagcatggagcaggagagcaccgatttcccatcgaccagaacggtgcacaggccgcagttttccgtctcacagccgcattttacactgtagcaccctttggccctgagtaaatcgaagagggacgtatcgtccttaatctccgcataagtcacttttccatttaacgtaaattctatctccacggtctatacctcccctccgagcagcttgatcagccgccctgtgtaaacttccgtcagatgcttccggtattcggcgcttcctcgcgtattgtctccaaaccggaaacgctccgccacagcgcggcagtccactcttccgtccactgccgcggcttccaccacctccgctctggaaggcctggctcctgccgatacgtaccatgtcccctctttttccgccacacagcaggcaatcagcggaaaatcagtcccagaccgcctctgagccgcgtaagcagcccttctgccgtctttctttatgataatgcgcaccagaatatcgcggtcgtatttcatgtggttaaactctttcagggacacgacaccgccctgataaagctccacatacgtatcgagtgccatcagacaggtcatgatatcggaaaagccaaatcttccgaacacactgcctccgacagtcgccccgttccgaaactgaacgcccacgatcgcccgcgtgcactccttaaaaactccctgaaaatatgtattcagtccttcatgtgtctccagcatgcgcagagtgcacatgcagccgatccggaattcctcttccgtctcctcgatcgtatcgagccccagtcccgacaaatcgatcagtgtcattttcacgcggttctgaagcttaagccacatcataccgccgcctacaatactgctctttttctgattcagttcgtaggcctctgaaaggcttcctgcctttacgtaatttttaaaccttaccaccagaatttcctcctgactccaaagctttccctcttttgcagcttcacaatgcaatattccgcatccggcttcgcgctgtcttacgccccacagacacaaagccgcaaaaagtatatcatactctctccggctttgacaatcaattcttctgttttccgctgtttttctacattttttgacttttccatgaggattcaccgcgatgttcagtcacttttccgccatcgcctgccctcatcgccgtcctgctgtctttttcccgcacaaagccattgtcctgctaccggatcagccccagcatatattccggactctcctcaaaacatctctgaaatccttccaccgtatctggaaatataatcccgaagccacgtattttttccgtatccatcagaagattcctgggctgtccggcataccgttcccggtccggaataagaagtccgcttctgtcctccccctctgtcaccatcgccagcacctttcccgccgtctcatacgtggaaagcgtattgcctcctccaaaattatagacaccgccgggcagcgctcccgccgcttccacatgcttcacgacctccatggcccaggtaattccccggtagtcataaacaggaagcgtcagtggacggttatgaatcagcgacttcagcagatttcccagaagattgctgttgctctttaacccccgccacgggaaatcatacatccacggcaggcggagacacactgcctccgggagtattgccatgatttcgtcctcagcctgccgcttgtgaaggccgtatacattgaccggttccggagtattctcctctttccccggttccatggtccggtttcccgcatagatctgatccgaactcatgaaaatcagacagcttcccgtctcccggcatgctctggccagattcacggcccctttcacgttgacagcctccgataaccccggattttcctggcacgttccggtattggatatggccgcgcaatgaatgaccagccgcggcctggccttcttcacaaatgacgtcaccgccccctcgtccgtgatatccagatttccgtggtttgcccctgttatttcgtatttatcctgataatattccgtaatcctggagcctaaaaatccgtttgctcctgtcaccatccatctctccatgttgtctccttcttcattctccatccatgacttccagatatctgctgtccaccggtccggtcagccacaccccgttttcagacagataaaataccgctccgtctctcgccattctttccgcatcgacgctcagtaccaccggttttccatgccttttcccaatctttaccgcggtatcataatccgccgacaaatggacatacagccggctcatggattttaatccctgtgtcataatggagggaagaaatcgctctgctgtcccatgatacagcactttgggcggtttggtttccttaagctccacatccaccggaatactgtgtccctgatttgcccggatcagtgttccatcctcactcatactgtaacgccccttttcatccgtcctcacaatctccttcagcatctccagatccagaggccttcccgtcttctgaaatccctcgatcagtgcctccacatcagcccatccgtgttcatccagcgtaatgccggccgcatcgggctgatgacgaagaaccagacttaaaaatacactcattttcttcattttatcgtttttcttatccattgtttactctctcctgtacttccagaaccgtctgatagcggccgtcgctgccggactgcggctcatagcggaaacattcacagcctagtcctgtaaatttcactccattttaaaattccctgaccagagctcccaatcgtcccggctgccgcaaaacacattgacatcgatatacgtctcatctccctcgtatccatccagccgcttccggttcgtatactgccagaacagccagtcgcggttaccggtatccggcttctttaccacgtttctgatccagaggggatactcctcaaatctcccttccagataaaactgcaaagtatcttccgtcgcatagatcaccggttttacgccataatacgcttcaagcccttgcagcatcacttccagctgtgtacaaaccgactcttgatcaggcggattaactttcttatcgccataaaattcgaagtcgaccactggaggcagcattttatcaaaggccggtactgtctcagtaaaatgtttcagctgactctctccggggctgtcaaaactgaaaaaatggtatgcgccgatcctcagttccgtctttttcgccgcttcccagttctccgcaaaccgctcatccgtgtgggagcttccctctgtcgcctttatgtatgcaaaatccagatcctgtgccgccagaaccggccaatcgatggttccctgatagtgggagacatccacaccgcggaccggataccgttgttttgaaggattatttaactgaaccaggccgcagaagaccgcatatccgcagactgccagcagtacccccgcgatcacacagaccgcgcctgcaagttttaaccgtttttttattcttccgctcttaaccattccattttccatctctgctgtgtcggatttttctgatcccacttccatcctcctcttttgcccttagtgggaatgagccgtccgtgccggccggaacttaaggcctgttttcctgttaacctcgtccgccatggctccggaggcatataaatacaatggcgcttcatggctgttatccagataaaacctcctgtctccaaaacagttctgccggtccagaatccggtttaaatatcctgctattccggtatccatccagtcaccgttcttcctggccttccatctgtaatcacgtccgtttagccggaatgtaaccgcataacgctccattccgctgatttcctcaaacggcagttcggaaactgccttaagcccctttaaaatctttccataagaatcccactggtagatgcattccctgtctccggtcgagaagacacagttcagagcgttcctgcttccggccagaatacagaagccgtagtacggatgactggccagatactcattttcagaaggtgtcagcccaaggataaactcctgttccccctcttccggaacaatggatatccccaattctttcagaagccgtacctgttccagtttggggacacattcaccttcctccactcccataatatcatcaatcgccgcagctgcgcgccgtttcacaagctgtatcaagacaaacaacacagcggcagacagaatcagaaaacagagtgttaccgtaagcatgaaacctgctgccatatccgtttcctttcccgggagtattcaccttcccgccgcatcaatcccattttcattccacttcaatcgttttcagtgattccagatatccgcaaccgcctatccaaacgccgtcaacagtatcatcgccggcattcacagaaacatacagttccgatatacgatttaagctgcgtccctgttcaaacacatactgatttcgcttcaccccgtattgatacagataacaggccagcgcacaacaggaagttccggttgcagattcctcatcaattccatacaggggtgcaaaatttctgcatacagcagttagttttccatcttccacaagagaaaatgcatgaatcccaacgcagttccatttctggctgagttttgatacagcagcaaaatcaggaaccatagtctccaataccaacggattctcaaccggaacgatgatatcccttaaacctgttgatacaatctgaacaggcagattcccgggagcggtgtctgcgttgaaaccgagacagtccacaacgtcagccaattccagcgtttcgtaaaattccggggtattctgctgcataaaaattaccccgccgtctttaactgctatgctcaatattcctgacttcgtctctatcgtatactcacactttttcaactgtccgaaataatttaaaacaacaaacgctgcaattgtcgcatgtccacacaatggaacttcccccgtcggtgtaaaatattccaatttgtaatctgccagctctgactgagaaaggaaggcggtttcagagtatcccagctgatgtgctgtcctcattttttctttcctgtttaaactggctccctgtaatactacaccggcctgattgcctcccctgttgtttttgctgaatgcacttgcaacgcagacatctatgaaatgcataatcctttccctctcgttaaaacactgtgctgaatacgcagcctgatccggcctgctgagcgttccgccagccatattccttccggcttctgtcattccgcagaaatacgtccggcttccggcagaaaacatgaaaaatcatattttttcattatgactctggacagccatgtaaacgacgactgctgcactgatcagcatgacaatcccatccactctcacaagccagtccgagagaggcctgataaacatgtttatccccataattaacagtgtaacaataaaaacagctatgctcattatctccacttttttcatttgtttcactcctcaccaggtatattgtcgaagtacgaccgcacattatgtttgcgcttaatcgacctcatggcagtggaggatagtgatttctctccccccaccactgtcgtttcatttgtttctggcaattcatctcaccaccctagaggataggaaaatccttgcttactttgttaaaatgtgctttcgcttaaaacggagtgaggcaggctgattttctcaaaaaataacggtctgctccgtatacatatttccatactgcatgatatcttcccatctcgtctcacttctttgcaaacgccggttataccgatttcactgcatcgcggcatcattggttgttataaatccattctaccgtaatttttaatatattactaccacgtttgatgcaaaactagttattgttaatctgcacagagtaccggcatctcaatccgctgcagcagataaccacagctgctccgccccgccctctattgtcctttctgatgatccttttccttcagatcgccgctcacaatccatattaacgcgtccacctgttcatatctgacatcaaatcccatcgcctccatcatgacctccagccggtccacgcatgcgaaatactcatcctccaaatcttcccgttccgcgtcagaacagcgctccgcaaatttctgcatcgcctcctgatcggcaaacatcagatccgctatcacgacacgcccttccggtttcaaaacccggaccatctccctgaccgccaggaatttctcctcctcattgcaatggtggaacgcataggacgataccacggtatccacactcccggaatccaatggaagctgcaaaaatgttcccagcttcaccttcagttttggaaacttcttttttgcttccttaagcatattcaccgactgatcgatccccgtaatatcacaatcagaaagccgccgtcctgccagttctcccgtgccgactccgatttccgccatgatacctccgtgttccttagccagacgtgcagtcgcatttaataccgtttcataattttcgtaaaacgcaagcccatttcccccacgccttaccatatcgtcataatggcaggcggagctgtcaaaattccagcggtcctcccacttccccatgctggccagcagcgccgcggttttctccaattccgcaactgcgcctgcagaaactaaggtgtcagcacccgtacattccgcttccggttggctcatctcctccagcatccggtcgatgcagcctgccagggaatcccggatcaggctcatggaatgaacatggcggtttaaaatatcatactgccggaagaatagatcgaccgggctttcctcctgctccagcagcttcaggatcatttctatggaaaatcccatacgccggtacagcagtatcatctggatccttgcaatatcatccattgtatacattcgataattattttcatccctgtgcggtgcgataattcccttcttttcataaaaacgcagtgcgttcggattcacatgcagcatatcagccgcctcgttgattttaaacatcgttttatcctccttaacaaccgttttcccggtgacaacgtaagtatagagcttcgcccagggtgaatgtcaagcgggcagttaaccagatgcccataatacaacaggccggagccacacagatccccgttccaggaacccgcacgcctccggcctgcctctctctcatttatctgtcatttttcatcagataccgattattcataaatcgggtatttctcacagattttcgtcacttccgctctgatatagtctgccttgttctcaaaatcagtcgcagccagccagatgcattccgcaatcttctccatgtcctcttccttcagtcctctggacgttacagccggagttccgacgcggacgccggaggtcacgaatgggcttctcggatcgttcggaaccgcgttcttgttcagagtcagataaacctcgtcacagcggttctgaagctctttaccggttacttccataccgcgcaagtcgattaacatcagatgattatccgtaccgccggtcagaatgttgaagccctgcttcacaagagccgcggccagcgctttcgcgttcttcactacctgctcctgatactctttaaattccggtttaagtgcctccccgaagcatactgccttgcctgcaatgacatgctctaaaggaccgccctgggtacctgggaaaatggccttgttgaaattaaatttctcagcagcttccttattcgccagaatcattccgcctctcggtccgcgaagagtcttatgggtcgtagtcgtcacgacatccgcgtacgggatcggactcggatgaagtcctgctgccaccaggcccgcgatatgagccatatcgaccattaaataagcgcccaccttatcggcaacctcacggaaccgcttaaaatcaatcgttcttccgtaagcacttgcgcctgcgatgatcagtttcggcttgttttcaatggcgatccgctccatctcgtcataatcgatgaatccctcgtcattaacaccataaggaacaatattaaaatagagaccggaaaagttgactggacttccatgtgttaaatgaccgccgtggttcaaattcatgcccatcacggtatcgcccggctgtaccatggctacaaacgccgccatattggcctgcgcgcccgaatgcggctgtacattggcgtaatcacagccgaacagcttcttcgcacgctcgatggcgatattctccacgatgtccacatcctcgcagccgccatagtaacgctttcccggataaccttccgcatacttgttggtgagaacggttcccatcgccatcatgactggctcggatacaatattctccgacgcgatcagctctaagtttcttctctggcgcgcacactccagttcaatggcctcgcccacttccttgtcatagctggtgataaacttcattacttcattgaccatgtccactttccctctcttttccctttcaatttaacagttgcacaaagacgctggcagagggactcttccctgcaccagcgcctctttccgttgaggttgattataaaacatttttaatggggctgtcaagttctttccgggccgttatcatctttgaagatcgtaactcctctaatcccatataccgtgaaacgatattacctccagatgttcgagcaccgcgcatcgatacggtgttcttataaaacagcctgtctgctcctgatccggatatacattcgtggtcatacagcagcagccctcatccgtaatcagctctaccgagctgtgatcaaccagaattctcatctcaaataccggacgtgccgcatgaaaaggcgcatgaatacggcctgcgtcccacgatcccatcctgctcttatcaattgtaatcactcctgcaataaaatctacatcaatgataagcacatgctcaccgtcatcaaacagcccaatctcaatggtccgcgatgcgatacacgtgatatctgcccgcagcgataattcaaagcaaaagggatcccccggatagagaaaccgttttttcggtgtcagttcgcaccgttttgcaatcgaccggtccctctgtatggtatccagagaaagcggcgccgaacagagacttccctccgtactcagcgtaattctccttggaagcgtcagcacacaccgccagccttcttttccggatggcccctgcccagtacaccatggcatccactcccagccattctgccacgctatcataatgcgtttcccatactgatcgagacaggactgtgcggcataaaaatcaggaccataatccagaaatcctgtcttctctgtctcataacggcatttttcaaaatccatgcttcctacgcagtagagtgccttattacctccgggatgatacatgggcgaacaggtgacaatccattttccgtccatttcatacatatcaggacactcaaacatggtgccaagctttccatccgatgcaagcacggtaccagcaaactcccattttaaaagatcctctgagcggtaaagatagattcttccatctcccccgtttcctgctcctcctatggaacctcccaccaccatattccagcatccttctgcaaaaaacacctttggatctctaaaatcttcagaattgccttccggaggttctgctatcactggatttaaagcatacttatgaaatattaccccatcatccgaatacgccatacactgtgtctgaacagcttttccgccccgtttcactgcacctgtatagaaaagccacagccggccgtctttttccactgcacttcccgaaaaacagcctccttccggatcatcatcatagggctggtccggtttcagtgcaacaggtaaatctttccagtgaaggaaatctctgctgaccgcatgtccccagtgcatagggccccattcgcagccggccggattatactgataaaacatatggtaccagcctttatagtaaataagtccattcggatcatttaaccatcctgacggcgccgaaaaatgatacgacggccgccagaattccttcttctcccttttaaaccgcccagagggaaggaactcatcctcgatcatgatactcctcctcactgatgctgcggacggaactgcggataatcagctttggactgatcaaaatctgctccgcctcgaacggatacttgtgacggaataagtaactcaccgcctgatctcccatctcataatgaggcagctcgattgtcgtcaaaaatggtaccagaaattctgcaataaccgtctgattatcatagccaatcacggataaatcctccggtattttaagtcccagcgcattggcagcagaatagacgcccatcgccatccggtcgttatagcacataaccgcagtcggacggttcactgaagataaaatatccgtcgccgcctcaaaaacatcatgccctgtaatcggaatcggaataatcgaaaccgtttctgacgggataccgtgctctacaaacgccgccttaaatccacgttcccttaacagagtggccggcagccgctcaccgctcaccgtctcccgcttctcattgcttaagtaaactacatttctatgaccgcattcaatcaaataggcagccgcctgataagcccccgaatagtcatccggcaggattgccggataccggttctcagagtcgaagcagttgaccagcaccgtaggtatatccttcaagtttgacggcagttcaattcttctgtggtacatggaagcataaagaatactgtccacacggtatccgatcatcatatcgaccgacttttccaccagccgcccctcattctccagagccgcaagcatcagtattttattttttcccagggcacgttcctgggcgccctttacaattgcgccggcaaagttcgtcgtaatcagctcgtctgtcagcataccgatgattccgcttcccgtgctgtttagtgcactggccagcttattcacccggtatcccagttcgctgctggcctggaatatccggtccctggtagcctccggtatgttctctcccgcttttccccgaagcacaagagagacagtggattgtgaaactcctgctaacctggcgacatctgtcatagtaggcaattttctattggcacccattttaaccctcacattctattgttcttatctttctaatattctaacaccgtccagacttccgtacaatacttgaataccagattttacctttccctccccgtcgacagactgttcataggtgccccatgcattcccgttgatccagaaggacttaaagtgattctggttgattaccggccggaaagacatggtcttctccaccatattgcactcatagccggacagggccggaatcagggaaaagctggacattggccggacataatgatggcctgcttcagtctcactccatgggcatcttttatagccgtcataccggtcacgaaccgcctttataatcgtaaacgcctcctccagcatcccctccttaatcatacatactgccacctgatattccacacctgtccacacttcgtcacaatatgcgaacgggaatctcgggcggccgcctttcggccaggaacagagaaccagccctgcctcgtcgtttaaagcgtaggtccgctgaacattgggtacctcttccatacaatcacggaaattatagcggtagatggcttccagagtcttttttacatgctctctcgggagaacatatcccagtcctgcggcgtgtgccatgaactgtcccaggagctggtccgtcagacaaccggtgccatactgataacggtatgcatccacatcctccagcttctgcacataatactcaccgttaaacagcatttcatccaccagcggctccgctttctcatacaaagcccggtatttttccgcttcctctgtttttcccagatactccgccatttcagccacgcctttcacagcgcctaaatagatcgtgtttgtcatcgtgttcggtccatagaattcaatgtcgtaggttacatgcattttcccgtccagaactccgtctccgtccgtatcccactcatgaatcgcatattcaagcgcttttatcataggctcccatatctctttcaggaaatcgtcatctccggtatacttccattcgcgatacacccttaagacagagccaaactgaccgtcgcatgcgggaatcatatcccagcggctctccccaagcacctttctcgccctgaacggcatacctccgtcttcatccagttccttcttaaattccacattacgcatggtaatttcaagatccggaaacagagccgccacagcggtggcataattccatacatggttaacatttccctgaccacagcctacataatccctgattccttcccagccgaggaactctcccgtttcaatccggaagcagcagtggctcttcatggacatgatattggcagccaccgcatcgatcacataggccggaactgtagtgtcaaacaacgcctcttcaaacgccctggaggggttttccagttcctccatctttcctgccacatactctgttacattccatgcgtctgtaaattttgttgcatagtaattgcgtatcgtatcatatccgccatttctaaatctctctaagtcttcatcatactcgatccagccctttggccggtttggaaaataccaggaaatcacgaattcaaatgttttttcctcgtttggtcccaccatctcaaggcttccgacagaactgatgcgttccttaagatttaagaaactgaaatcgtagtgagacagaaggtcgcagcctttagactcaatagtctgcatatcgtccagaatgccatcctccgtaaaatcatcccaaaagtcctgcgcattatccgtccactggccatgcagccactgtttcttataagtattttttgctcccacagctgcgatggacatgcttccaaatttcatatccgtctcttttaaatgttttgccgtataataccagcccttgatttctccgctttcacgatactcattctgtacttcatcagccagttttacattattgaacacatcgtatccctgaaatccaaccacattagccatggttcccgccacagatacctctacagctttatcggtaggattcttcacacggtagcggataaccgctgtcggaatcccggaatcgtcggaattaagcgggataaacggtgtaaacgcctccatcttcacctcgactggaaccttgctgtcctccagatcaatatacacgaaaggctgttttcctaccatcctggaagactcaaagcgtggaattccagccaactccccatttaaaaatccgtgagacttataatacggcggacatatctttgactccaaaattctgctgaccggttcctttccctcctccctggtacggattgcaaagaacgaaaacgggacgaattgtcctttccccggccagttaaagatctcccagtccctaagctcgcctctggctcctacggaaatattgcctgtgccaattccgcctaaaagaaatttcgcaactccggcatcccccttgtaggatatctccccgccggttttaaataattctgtctttgaatgcagtttttctctgtccatctcttaaaatactcctcttcttatcccttcactcccacatgcgtcatgctctgtacaatccatttctgtcccagaataaacacgaaaaggaccggcagtaccgcgagacaaaccgcggcaaataccacattatcgccagtggaaaatggttgtttgattgatagaattcctacgggcagtgtcagcttttccgtagagttaatcataataaacgtagtaaaataatcattccaggcgaatgtaaaaacaataatcgccagtgacgccagcgttgatttcgccataggcagcataatggaaaaaaatgttctgataatgcctgccccgtcaatcgtagccgcctcctccatctcagccggaaccgtcataaaaaactgtctcatcataaatattccaaatgctcccgcaaatcccggacacatggctccgaagacggacggcagcgttacggcggccgccgtgttaataactcccaacagattcataatcttaaataaaggtacgatcgtaacctgcaccggtaccatcattcccaccagcatgagcccaaacattacattctttcctttaaaggaaagacgggcataggcatatcctgccaaagcaccgtggcataccataccaatggttatgattgtgcttatcttcaggctgttccacataaaggtaaaaaatggaatctgtcccgaaaacagtttatcaaagtactttaagttccattcgctaaaggctggcggcagccacttgggcggcagcgccgtcgcagcgctgaaggttcgcagcgaggctgaaaatacccataaaaatggagcaatcatgagtatggcaacaagcatcatgccaacagccagaagaatctgtccagggcgtacccttttacctcttacacttattgtcttagtcataatgtacccaccacctgcttcccacgaattgaatcattgtaatgatcccgatcagaatcagaagaatcatggacaatgctgaagccattccgtaatcgaatgaggtaaatgccttttccgcaataagcatgacaagacttctgctggaatcccccggccctccgtttgtcagtacatagaccgattcatagatacgcagcgcccccgtcacattcatgaccagcacaaagaaaatagtcggagacgcgagggggagggtcatctttaagaacttctgcacaggcccggctccgtcaattccggcagcttccagaagacctctgtcgatattctgcagtcccgccagaataaggagcatggacattccgcagttcttccatacgtccagaataagaacagaaaacttagccatactcttgtcgctgagccaaccgattttactgattccaaccttaccaagataataattaatcacgccggcatccgtctgaaaaaagtactgccagataattgccacaaagaccagcccgattaaggatgggaaaaaatagatggaccggaagaacaccgtgattcttcccggaagcttattatccacagctaccgctaaaaggagtcccactgctgtattgccaactgtcgcgaaaatcgcataccacagcgtattgccaagtgtggtcacagatctggcatcctgtaaaatatgtatataattctttactccgttccatgcactggccccggtaaatacattgtatttttgaaatgaaataataagggcccagaataccggaatcagaacaaaggctatgaatccaaagaaggatggcagggtaaataaataccctgtcaaagcctcttttctctttctccggttgcctggtctttgttttatgcctgccatcgcttcctccaatctggcaccccgccgaaccggcctacttgttcgcaatcgttgtctccacctctgactgtgcctgattcatggcgtcttctacactcatggaacctgaaaatacattttccaatccgcggagcgtcgcctgttcgatatcaccaaagaacacgggagccgcaaccggcgaagcaattgtaactgctttccagagtcccagaatattatccggcaccgtccccataatttccgtatcacaagccagcttctctgtcggaggaatctgctgtccccctgctgctacggcagtcagtgtctcatccgccaccatctccttcaacagttcgacagccagttccttctccttagtcacagaaccaatacaccatgcggaaccgccatatacactgccttcttccgtcttcttcggccactgtacacagtcaaaatttttcattcccgcatcctgccatgtgttcagcacccatcttcctgctcccaccatagccagctgaccggacgaaaacatcgtatatacatcggaactgattgggtccggtgtcaccttcttatcaaccatggactttaaaaatgtaattgattccagcatggccggtgaatttaatgccggcttttcatagtcctcactgaccggataagcactgtttgtcgcccaccacggtgtcagctgaaagtaggaactggataatccatatccatatattgtctttccattttcctcatatgtgagtttttctgcggtctccataaactcatcccaggtccagccctccttcggatactcaactcccttttcgtcaaaaatatccttgttataatacattaccatagtctgtgttccgctcggaagcccgtaaaggatacctccctcactgaatccttccaacagcgactccgcatactgttccttcttgctctgtaattccgcatcccctgctacaatctcatcgagtggaagcagtaaatcgttggctactgccatcttcgcaccctccagtcccagattaatcacatctggcgcctcccccgaggtgctcatggtaatccacttctggataaagtcggaccaggaatcaaccggaacacaggtctgctcaacctccacccccggatgtttctccttaaatctgccgatggcatcgttggcaatggcttcctcctccgtatttccccaattcagcattcggagtgtcgccgtcttctcttcttcccccatggaagattcctttgaaacttcgccagacgtctgcgcctccttctgactgctttctgaagctgtgtctgccgtcttctgagagctgcagccagttgtctggaatactatgagcgcgccgagtgccagtgccgtaaaccgtttccattcttttttcattttaccttctccttttttcttaaagttagtaattcgaattagtaatacgtattactaactttaaattaacacattgcatggtctttgtcaagagcaaacactacaaattctaatgaatttaaacataacgcttccgacgaaatttgcatcaaacccggatggcattttgatctcatagggtccctttcctgtgatatcaaaaaaggcggatcatccatcacaggattttccgcctttttcttctcttaactggaaagcagccaccgtactatttcccagcccttcgttcttccgctgccttctcctccagcatcgctgcatagcgctcgtcatcgatcgggaagtccacctttttcttcagccaggaggagagatacgccccattcgcaatcatcaccccgcgcagtccatcctcccccgtcgcaagcagcggttccccatatctcaaatgatccgtaaaattccggaagatcttctgatacccttcagcgccccttttctccaccgtaatctcccttgcatggtgttccggcatcccgtagatttcctgattccggctgctgaattcatccgttggcaccacattttcatcaaaaagtatctggctgctgtcctcgatgcacagtcgtccctttgtcccccagatttccagccggttgactcccggatactctccgctggaggcaataaaggttccgtgaagcccattgtcatagaaaaactgaacatccatactgtcatctaccgtaatatcgctgtactttccgcattccaccgttgccaggacgtgatccggcatgccaaaaagccactgccagacatcgaggaaatgctgactctgattaatcagaagacctccgtgctcccctgcccacgtgctgcgccaggaagcagaattatgataggccggagtccggaaccagatattggaaatccacacggcacggttcagccgtcccagttctccacgctcaatcatctccttggcccggaaaaacacgcggttcatcctcgtattaaaaatcatacccagactgacccccgcgcgctctgccgcgaccaacagttccttcacttccttcgtcgatattcctgcgggtttatccagcaaaatatgttttcccgcagcggccgccatttttccgatctcgacatgggtggcgtgaggcgtcacaacaactgccgcgtcaaattcatctttacagccaaacatcgcctccacattcggatagaccgacactcccggataagctgtcctgatctcgttctgccccttttcattccggcagcatactccggcgagtaccatatcatcgatttcaccgttatcaagcatctgtacgtactggcggcccataccgccgaatccaaccactgcggccctgattttctccatcgtcctgcacccctgctccttttgactataccggtattttgtagtttttgattataacctgcagcgttctgctgccattgtattcattcaccgtcggataataaatcacatcaataaccctgcggcttcccagttcctctaaaaatgtatcgccgtcagtaaacagcatggcatccatcggggtccccttctcatcagccagtgagaacttcacggcgttccggttctttcccagcacacgcacacttctgatgtgaagccccttctgtgcaaacagcggtttttcattgccctgtccaaagggttctaaaagctccagctcctcaatcagaggctcgcttatgtagtcgaaaggcatgggaacatcaatccagatccttcggacaaaatcatcctctgtcagttctgcatcctcgttgagcctgcggcggaattcatcgatgttctccttttccagcgagagccctgccgccatgggatgacctccgaatttaagcagaagatccctgaccttcaccagtccttcaaacatatggtactgctcgatggaacgtccggagcccttcacacagccctccccatcggtcagcacaaaggccggtttctgatactgctcccgcagccgtccggcaataattcccgccagcgattcgtggcaggacggcaggtatgccaccagcaccttatcagcccggtaacactgttccacctgagcaatggcttcctcggttccctgtttcgtcatatcttttctctggtcatttaactccttcagttccatagccagccggtccgcctcttccccgtcctcacacagcagcagcgcaagcgcaagcttggctgtcagaagtcttcctccggcatttaaacagggaccgatcacaaacccgatgtgatacgcagaaatatggtctttatccaggtcgttccgctcaatcagctttaaaaggccgatactctttgtatccgcaattctttttaagccctctttgacaatgatacggttttcgtcccgcagcttcatcacatctcctaccgtggcgatcgccgcaaattccagcatggacagccactcttcctccggaacggaaaacgcctcgtagagagcctttacaagcttataggctaccattccgccgcatatctcagggtatggataactgcatccgctctgcttgggattgaccaccgcatccgcaggcggaagcacgtcgcgcccctcctcctgcatgatatcatggtggtccgtaatcagcacggtaagccccagttccttcgccagtctgacctgctctacagcggcgattccgttgtcacaggtcaggatggtatcgacgccgtcatcagccgcggcgcggatgatggattcattgattccataaccatccttaatccggtccggaatttcataatccacattggccccgattcttgtaagcgcccggtaaagcagataggtagagcatacaccgtctatgtcgtaatctccaacaatgcggattcgttttccctgcgctgtctttcccttcagaatctccaccgccagatccatatcctttaacagatgaggactgtacagatccttcagcgatccgcggagatacttttctaccgcttccgctcccacaatatccctgtttcggataattctcgctgttaccggtgtaatatgatggattcctgccatctcatgaaagtctgccttcttcgtctgaagcatccatcgttctgctgccatccttttttgtctcctcaccagcctgatctgcatcaggcgttttcttatcttctgccggtgtcttctcttccgccagcttctttccttcctccgccagcgttttctcttccttcagcttcttctctgccagcacctctgccgcgacctgttcttccagccgcttcttcagctcttccttcttctgtttcgcgatatccagtctgctcatcaggctggcaatcgaatacagaatgggggcaaaatcccccctgtaggcctgctcacaggtggatttcacttcaaagttctcacttccgatctcgcggaaaaggtatttctcatcgtcgataatattcttcagccgttcaatcagctggttcacggaatccgtcagaattccgatctcatcctcagaatcgtagggaaggtacacgtctaaatcgccgttggaaacccttctggtcccctcaacgatcgccttcaccggcttgtcaatcgcaataatgatatagatgacaagcagtgtaatcaccagagcaatcagacagatggacacgatcttcaccctggccagtctgacgtaaagctggtcgccccggacactggccgcctcggctccgagacggttaaattccgccatctttaaaaagttgctgctggcctcgtcaaataagagcctggactctccgataatcatcttaagcgattcctggttatcattgccccggctgacagggagaagcctgtcactgtattccagatacttatcccagtatgccctggcgttctccatcagcgttcggtccgtctcatccgtaatataaaactgctcgtactccgtaaatgccgcgtcgatctcatcacggacagccatcatctctttttccagatgatccatggtctcctggtcgtgggtaatggcatggtaaaattccttgatcctgtaatccgatgtctcggtgttcagttcctccgcgatgatgatcgccggaacccaggactgggaaatctccgtgctggcctcgttaatctgtctcgccgtgataatggactccgctccgataaacacgagtcccagaatgctgactcctcccagaaacaaaagctttgttttaatactgatatttctgattgatttcactttcataacccttaagtcttctccttctttgccggtaatccggcagttctctctcaacgattttccagaagtcctttgaatgattcatctccgtgcgatgagccagttcgtgcactaccacgtaatccgtcagttccactggaagaagcaccagcttccaattataattgatatttccccggacactgcagcttccccatcgggtggcctgatcccgtatggcgattcgcagatacgaaactcccatctgatccgcccaccaggcagttctctcctccaggaaacgcctcgcctgtttccgataccagctttccatggctgccttcacaagcggctcgtcatcatcccggcccgaaaaagggccggatattagaaatttatcgccggtatcgcatacccggaaccgttccgtctcataatcctgttcgaaatgaagtttttttaaagttccatgaaagagcagttccgccccctccgtccagtgaaactgctcccgtttctccaaatcttccctgattctggaagcgtgcgcaaagatccattcctgattccgctgcgcaaactcatggccggtcttccacgatagccgttccggtatccgcacgacaatctctcccgccctggttacggagaccgccatcgtgcgcctggcggatttcacgatcctgtaagggaaaaaatccccatcttcacagatgagtatcccctggtcaggcagcgcctgtttttcagttttcattttattttcacattcttttctgtcatgcttcagtcatgcattttccttcggtacataccgcattctcacggcctgtatgtcacattatagcggataatgtcaaaagaaacaagtgtgaatgtttccgccgtgcctggacagactataacatggtactatctgccaaaataacgaaaacatacggaggttccccttatgaaatattttcacggctatcagaaaaaacattccttcttcgaaggctggtacttaaaacatcagtctcctgacggcgtactcgcactgattccggcataccacatcgacaggcagggaaacccctccgcttctctccagattgtcaccaataccgaatcgtgggttatccgattctccgccggccagttccgggcggcctccagtcttttttatgtaaaccttggcacctcaaccttttccgaacagggcatccatctggatattgccgcaaaagaggtgacgctgaccggtcacctctcttacgggccgtttacaccacccggttacgatattatggggcctttctgcgccgttccgttcatgcagtgccgccacggcgtcttaagtctttcccaccgcctgtccggccagctggtcttaaacgggaaaaagctgaattttgacggaggtctcggctacatcgaaaaagactggggcagttccttcccctcccggtacgtatggacccagtgtacctggactgataaaaagacgaaagcgccctgctgcgtcatgctttccgttgctgatattccctttgccgggacacatttcaccggctctgtcggttcggtcttcttccgcggaaaagaataccgcctggccacctacaagggtctcaaaatcctggaattcaccgcacgcgagcttctggtcagccagggcggcctgatgcttcacgtcaacctgatcaaggaccagcctctgtccctggccgctccctccttcggaagcatgagccgcaccataaaagagagtgcggcctgccaggtccgctgccagttcttctgtcaggaaaaaaagatctttgatatcctgtgccaccatgcgggttttgagtcttacggctgaaaacggccttccagcgcaatgaactgatcaaacagcagccggctcactctggctccgaataccgtcgccggatgcgccggatagtacatggcgtcgctgaatttcctgttgaacatcaccagcacatacggaccgtacggagtgtatatgattccgccgtcatttcggcaggcattcatgctgccgctcttggaagccacagtcaccatcacgtcatccgtattgtcgctgtccatgtaaactgccgggaaatcctttgtaatcatgctgttgtaatgctgcttcttaaagatctccagcatttttgcgtccgattccgggctgattaaagtccccgccgccagcctcgtaaaaatgctggcgtaatccctgggagtcgaagttcccagcttgtcataccgctcaaaatgaagaggattatacagcacggtgtccctgcagtccagtccgcggatgcaggcgttgatcgtatccagccccagatagtcgatcatcatgttcgtcgccacattgtcgcttacaatgatcatcagggtggcggcgtccttcaccctcagtaccgctcccggctccagagcacacagaactccgcttccgtctactgtgtgttcctccttatattccaccatatcctctaagctggctttccccttttccacctgatcaaacagacatgccagaatatacgtctttatggtgctggccgtctcaaacgcctcatccgcgccgatggcaattatatttccatgtaaatcatcggcgtaaatgcccattgttccatcataactcatgagctccgcttcaatccgtttttctatcgtcagtctcttatccattctctttctcctcttccgtttctgtgccgcagacccgtgctgcgctgcttatccgctcccggaacgcatggtcctgtcagaaaatgcttcctgccgcatacaggctctccgccagatcggctctgaaatccgcgtcctccggattcaggctgttgatcaccactccgccgcttcccgcctttccggtggaatgaatataccttccatctcccatatacatggcaatgtgtcccggaaaatagagcagatcccccattttcatctcgtcctttgcgatctcgcggaccggatatccctccacgattttcgcatcccgccaggtcagaattccattcatcatataacttaccgaggtaagcccggaacagtcgatcccggcggtggaacggccgccccaccggtactgaatccccagatacgtctttgcagtctccaccacggcccggcgaaacgcctccttatccacaattttcttctgcggaagcatctctgtccacaaaccggcctgcgaaaactctttgttttccagaaattgctccctgatgtatccaaaacggccgtctgccagcttcaccttcccccagccttctatgccgcattcatacggtatcacactcaccagcgaaccacggaacaggctgacgagcctgactccctgcactttgggcactgacaccacatcgacgcagaaagccgtggtcaccatgagaccgccttcctcccatgccatcatttcctctaaagagaccagccgcaccgcttctttccgcacatagcccgtataaccataaaacgtgcgcaccggcagatatccacggttcatctccgtcctctgccccgtctcatcggtctccctcccgataaccgccatcccggcagcctccggaccgttaaccgccgccccggtaacctccggttcaataacctccgccccggtaatcgcaagccccgttccatacatcgcctcatccgcaatggcggacagcaccatcccatccttcactacggtctctgccggaatctcgtaaatagtcgcaaccggctgtatcacaattccatactgcatcgttccatctcctgttccggactccacggatttccccgggccgcaggaaaggcagcgccagggcctgtttggaaattcatttccgccatctgcacgccgccttcctgctgcctctcttctcgttccatatagtccttttctatgatttctgcgaaggtctcctccgcgcccggcagtccgttctccaggtctttgcacggatagcgggtgctatatgtgccaggacttgaagaatggactaccagtcccggtacagcttcttataagcttcatactcactgccgttagccagcacatagtgttccggcctcacctcccgccaggaaggcttatccgtctcatagtgatgcatggaggcgtcatagaccagaagcttcttttccttctcatgccgcggatccggcatggggatcgctgacagcagcgccctcgtatacgggtgaatggcgtgagtaatcagttcctccgtctcagccatttccacgatctccccttttctgatgaccgcaattctgtccgtgataaaccgcatgaccgacagatcgtgtgcgataaacaggtaggtgatccccctcttcttctgcatatccgccagaaggtttaacacctgcgcccggaccgacacgtcaagtgcagagataggctcatccgcaatgataaactccggattcataatcagtgccctggcaataccgattctctgccgctgaccgcctgaaaactcgtgggggaaccggctggcaaactccggcagcagacccacatcgaggagggcctggtccacccgtttcttccgttccttctcgctgatccccttctcaatgttcatcaggccttcgctgatgatgtaatccaccttggcccgctcattcagcgaagcctgagggtcctgaaagatcatctggatttcccccatgaccttcctgtccagctctctggagattctgccgttgatcttctcgcctttatagatgatatccccgccggaagacgggataattctcatgactgcccggccgatggtcgttttaccggaaccggattctcccaccagtccgaaggtctctcccttgtagatcttgaaattgaccttcttgaccgcctcataccgcttcttccgctcaccgaacgtgacgtccaaatcctttacatccaataatacttctcttttcatgaaaacagacctccgtttcggattttttcaaccacggaaggcggttccaccttcggtgcccgttgatcgagcagccaggtcttggccttatgggtcggtgacacgtcaaaatacggcggctgttttataaaatcgatctttaacgccttcggatttctcggtgcaaacgcgtccccctttatctccgtaaataagttgggcggcgtccccggtatcgagaagagagccgttcccttcactcccacctgcggaagcgacgagagcagcgcccacgtatacgggtgtctcgcgtcatagaaaatgtcctcgcccgtcccgatctcgataatgtctcccgcatacatcacggccacacggtccgcaatattggcgaccacgcccagatcgtgcgtaatcaggatgacggataagtggtatttgtggcgcagttccttgatcagatcgagaatctgtgcctggatcgtcacgtccagcgccgtcgtcggctcgtcacagattaaaatctgcggattgcaggcaatggcgatggcgattaccacacgctgcctcatgccgccggaaaactcatggggatactggccgaaccgtttctcaggctcgctgattcccacatccgccaggtattgcagtgttctggcctttgcctcggcgcggttcacattctggtgaagcagcaccgcctccatgatctgcacgccgatcgtttttaacggacttaagctggtcatggggtcctgcatgatcatggcgatctcacgtccccggatcttcagccattccttttcctttttcagtgaagtcagctccaccggctccctgttgtccgcaccgtagtacgtgacttttcccgccgtcacatggccgttctggtccagaagtcccatgaaggacttggtaaacacggatttcccgcttcccgactctcccacgatggccaggatctctcctctgtgtaattccatggaaattcctctgattgcatgcagagtctttcccctcagttcaaatttaatctctaaatcttctaccgtcagtatcttctctggcattccgttcctccttctgatcgatccgttctgtcctgtcttctatacatggttcttcgggtcagccgcgtcggaaaacgcgttgccgataatatagaacgaaatagtgacaaacgaaagaatgatggtgggatataccagctggtaacgaagcgccgggctggtgataagggcgcggccctcattgattaagttgccaaggcttggaatgttgaccggaagccccaaaccgatgtacgtgataaaaacctcatttccaatggcggacggaatcgtcagcgccatacgcagcataataaccgacaccagataaggaagcaggttttttatgataatcttcgccgtcggcgtgccgagacaacggctggccacattgtaatccctgtcgcggataatcagaatctggtttctgataaaacgcgccatctgaatccatcccgtaaggcacatggcgaagatcagtgtcttcacacccggcttcaaaatataggaaatcagaatcagaacgatggtattcggtatgttgtcgataatattataaatctcagtcagtataaaatcagccttccgcacatacccccagatgacgccgaccgtgatgccgatcagcgcttccgccagcgccaccgataagccgatcagcagggacgttctggttcccgcccagattctggcccacagatcctggccgatggaattggttcccagaataaactggtctccgggcggaatattgcgatactgcattcccgcctcatcattgacgatcgtattcgggtcatactggcccggaagatgcggctgaataaaggtaaaggccagaagaaggagcaggagaacgagaagaacaaccgcccccttattctttaagaaagcccggaacgtgctgctccagtaggagtagttgctgtagccggtccgctccacctccgcttcgttaaaaccggcgaaggagaacagctcttcatccgtctgtggcgcgccctttgccgcctgttccatgctgtccatcagctctgcctctttcgtatggcggtaagaaaactgcttcatcatctgtcacctccctttttgcttaagctgattctcgggtcaagcagaaccatcaggatatcgccgagaagcagacccataacaccgacgcaggcatagagaagcacaattccctgaaccatggtattgtcgtgcttcttaatcaccgtgacgagcaggccgcccattcccggaatgctgtacagggattcgatatagatggagccgatgaccgtatttaaaaatgcggtcggtatgtactgggccagcggaacaaaggcgtttcggaaaatatgcttaaacatgacgccgccctcggacatgccctttgccctggccagcttcacgtaatccttattgctctcatccaccatgtagcgcctcagccacatgccgtaaaatgcgatattatttaaagacatggagacgaccggaagaatccagtacttcggatcgtcgatctgaaacagcaggccgactcccagcgcctgcgttccgtacagctggatataaaggaagtagaccgccgcaggaaccgcctggatacagacgataaataacgtccccagcttgtcaaaccatctgtacttgtacctggccatcagcgctcccatgggaagcccgacaaacagcgaaacaatcatggacaggacgcccagcttaatagacaccggaaccttatcggccagaatctccgctaccggcacattcgcccggtaaattctggatacccctaagtctccgtgcaccaggtcgttaaagaagcgtaccacctgcaccggaagcggatccgtaagtcccatctcctgtaagcttacctggatctgctgtggggtcagcttatcaaaattggtgaaatagccttcaatcggcatcagacgcagcagacagaaaacgacagtcagaataatgatcagagtaagaaatgatcgggcaattcttttacctagatattttagcatcagcaacataactcctttgtaatttctttttctaaaaaccctctcggaagcagatgtcatcggcaaatgcgtaaactacatctatttccgagaacatttttacgtatttccgcagtgatgcggatgcctgccagaatgtaaaattccggcaagtatccgctctttctggttttactggcctgctttttccttattcgcctcaaactcttccattgagatgtaatgatcctgcagatgctggcccttatactttaagttggacacaccaaacggtgcatactggccttcaaacacattgatcttcgtcgcaagatacttgcttacgctgatgctgaaaggcacgacaagcgcatgattaatcagagcggcttccgctttggcgaatgcctcataacgggcgttgatatccaccttgatgtccttggcttcctcaatcgtcgtaaagtactctaacaccgcatccgcagatggtgttccatcctcgatggctttcgcaagattggcgtacttgtagcccggatcgtagccattttcacctttcgcctggtagaacggatcagtccaggtctccgggtccgcgtagtcggcgccccagttacactttaacattgcgtactttccgttgcggcggatctcagtcaggaatccgtcggttggacctgtctgcacgataatatcgataaaatcagttcccagcagtgattccatctgctgttccactacctgacactccttatcccagttgacctcggttggattgtacggcagaagaactttaacagggaaggtaacgccttcggccaccagttcactctttgctaagtcacggtactccacggctttcgcctcattaaaggtatctcccagagccgccatatcaccaatctcagtaaaatcagttccatctgcattataggtaaacttcgccggagtaatggtatggatcacgtaatcttccggaacgttcggctccagcacggctacttctttggtcttattcagcgcggaagaaagggccttccggaaattctcattattcacagcctttctccagttatccggctcatactccgcatcgaactgcggatcaaagttgaagcagtagaaataggagtagctgtttctcggccgctcacggctgatcaggttctttgtatcctcgttgctcatccagtcgtccagaatatcagctgtgatttccgcgtaatcgatctcgcctcgtttaatcatctccggtccaatggtatttgcttccgcattgtatatcttctgaatttcatcaatataaacgatatctgcatcgtagtttaacgtattctttttgtaaatccggcgctcctgaggaaaaaattccgacatatagtaagagccattgtagtacatcttatccgcatccgttgcaaacgtcttgccaagttcctccagctgaggcccataagcaggcatgtagacgatatatgccagagaagacaggaaatacggaacttctgtttccagcgtataggtaagcgtatggtcatccacagccttcactccgacctctgaaaaatcaatggcattccataccacaccgtcatcatcggctccgccgttataaacaagaccgttgtaatattctttggcatttgcaatcacaccgaacagattctgtacaataccgctctcatattccggtgtcagctggtatttgatggcgtcgacgtaatcctgtgccgtcacatcggctaccggtgctcccgtgttatccacccatttggcttctcttaagtgaaaggtccacgtcttagacggctcgtcatattcccactccgtcgcctggcccggccgaatcttgccttcactgtcatactcgatcagagtatcgatacagtaagctgccgttttaaaatcggcttctgacgcagagaccagataatttaatgtcgcaacctcccccgagtacaactccttatacacgaccggctttcccccgtcttcgcccttcccgttctcatttttcccggcttcatttccggcctgggcggtgcttccgccttccgtcgtctttttaccgccgcatccgctgagcacggtcgaagcagcaagaacggcacagagcagtgccgcagtcaatcttcttttcttcataagttatcctccatgttcctaatatttctaaccctttcgggattagttcttatacactttggccggttacggctcaaacccgggaactcctgtaatgccgatcccgtcattctcgttcattcggatcatcgcgccttcataaatcggccctcccgtataaggatccacggaacagagcgatgggccatccaaatccgcgcgggtaataatccccttccccgccgccagatgagccgccgcgctgaccgcgatcttactctccagcatacacccgatcatgcactccacaccatagctttccgctatggcgcagatcttcagtgcttcataaattccgccggtcttcatcagcttaatattaatgagatccgccgcccggttctggataatccgcaccgcatcctccggtgaaaacacactttcatccgccagaacaggcgtggccacattggccgtcacaaacttcatcccgtcaaaatcgtgggcattcaccggctgttccactaaatccatctcgattcccgaatcctccatggccctgataatgcgaacagcgtccttggccgtccagccctggttggcgtcgatgcgcagacggatctccgggcctacagccgcccgaatctcccggattctttcaatatcttttacgccttcttttcccaccttgattttcaggatccgaaagccctgtttaaccgcctttaaactgtcctccaccatctcgtccacaccgttgacgctgatggtcagatccgtctccacttctgtcctgctgcctcccagaacccgatacaacggtttcctgcaggactgggcatacagatcatagagcgccatatccacagccgccttggccgacgtattcttcacaatacagccgtgaagctttttcatcatgccgtccaggttatcgatctccattccaatcagattcggagcgataaattcctccacggcacaccggatcgatcctttcgtatccccggttatcacagctgtgggaggggcctctccgaagcccattctgccgtcatccgcggtcactctgaccacaatatcattcacgctgttcacggtccgcagagccgtcttaaacggtgtcacaagcggaatattcacctccgccgtctcgatcttcgctattctcatactcaaacctccgaatttctatgatacagccacagagccgtctccgccatcacacgctcgtaagccggcgtgtcggtatcgtttccacagtaacacacgataaatggctgttttgcatatataattccaacatcatgtgtaattccgcagtcctcccccgtcttgtgggcaatttccggttcctccggcagcgcctgtaaataaaacggtattttgctgcacagctgctggttcttcaaaatagaaatcattgcttcgctggccgtccggctcaccagccgtccctgatacatctcccgcagaagacgtcccgtctccgccgccgttatgtagttctggattccctgcttcgatttctccgtatcgtacatcttccgccggagcaccgtatcgcggtatcccagccgcctgatggtgcggttaatctcctcgattcccaaaagatcgatgagcacattcgtcgccgtattatcgctgaaaataatcatcagtgtcacgagatcaagaaccgtcacttcgattccgtcatggagatacgtaagtgccccgcaggacggcacacagtcctcccgcctcatgcggatgatcctgtccggactcagagtcccctcttcaaaccttgtaaatgcctctgtcatcacaaacagcttgatgacgctggctgccatcatccgttcctcctcgtgatacgccgcccgttcaccggtcacaagattttcataataaaatcccgtctttcccggaagagcttttatctgatctgccacattgagttctattgtatccagccctgacgcctctggctttatgccctctgtcataccgcttccagtcccctctcctgtctgttccggtccgcatccgcactgcgcgggccgcggccgcagtcaacatttcatatagaaaaaaagaggcactgcacctaccacctacagctacctcattgcacctgattttgcgaccgatccgtattctttatgaaatataatcttatgtataagtataataaatttcacaaaaaaagcaagcaatatttcccgttcttccggtaatttacagccattttccgcaggattctcctcctgcaccgctgtggggagactactcctgaagctgcgctttcaacagctgaaactgattcttgtgaaacgatatctgcccttccttctcaagccgccccagctccttcgacagggcgctcctgtccacggccagataatccgccatttcctgccggtttaaggggatagaaaaggattcccctcccgcctttcctgcctgctccgagagataggagagaatcttttccctggttgaacgttttcccatatggccgatcttctgtgtcagagccatattcttttccgccaggatcttaagcatattacggaccagacggttatggaactcacatgctgacggacataccgtaatcattcgctcacagtttataaagagcacctcagtcttctccgcagcagtcacgctgaccggcagggcttccacacgagcaaaggaaaacgcctccccaaacagaccgccccgctccacatgggccataatcgtccggtttccccagaaatcatcagaaaataccagaacactgcccgataagaccatgccaacctggtccgcccggccgcctgccataaaaatataatctccctcatcaaaccggactcttctgccgccgagacacggaagcagctgctccagttccccattttcaattccgtcaaacagtgaaaccatcgtactcctccacaccaatcttttttattcgattacttcccgtctgttttacaatttcttttctatttcgttgcaaaaacaacatacttttatgtttcagtatagtatgatacctctatcgagtcaaggaggaaaaaactatgataagaaaaatcattcacattgatacagatgcctgtaccggctgcgggctgtgtgccgaagcctgccacgagggcgcgattcagatgacagacggaaaagcagttttgacaagagaggattactgcgacggtctgggagactgtctgccggcctgtcctgcaggggccatctcctttacagagcgcgaagcgcctgcctacgaccacgcagctgtacagaaggccaaactggcccggaatcaggccggacaggcaggcccggaaagcagctgcgcctgtccctctgctgcctcccgctccttatccggcagcgccactcagaatccatcaggaataaaagaagtcccgggctgcctgtcccaatggcctgttcagatcaaactggcgcctgtacgcgctccctattttgacaatgccgacttattgatcgcggcggactgcaccgcttttacctacgggaattttcatcacgatttcatccggaaccacatcaccctgatcggctgccccaaattagacaacaccgattactccgataagctgacggaaatcctgcgtgaaaataccatccgctccataacggtaacccgcatggaagttccctgctgcggcggaataacgttcgcggtagaacgggcagtcgaaaacagcgggaaagatattccctgtaatgtgtttaccatagggattgatgggaatttgctgtaaagacagattaaagataccatagaaaaaagacacccgcaaccggatgtcttttttacttaaaacccttgattttattaatgcgccgaacatgattcgaacacgcggccttctggtccgtagccagacgctctatccagctgagctatcggcgcatattgctttcgcaacggtattaagtatagccgatagcaatcattttgtcaactggtttttgtttttttctttaattttttcgttacagtccacacctccagattctcatactccccaatcatgggagccagctggcggaaaccgatcttaccgccttccaaaagctttccgtacgtctctccatcgtcttcgaaccggaacagctccagcgcattgatataaaaacgcacttcatttcccctcttgagaaccgctatttcgtaaggtcctgccgcctcatccgcatccggtatcggatcgcctccctgggcggttaagtaaaagccataactctttcttaaattgcaggtatggaaggccctctcgtccggttcctttcttcggaaataagagatatgaaaggcatcgatgtcaccgtgatgatactgcacatactccccggttctgggcgccagggaaggcgaaaacaagtcttccccattccgtccctttgcagccaggaataccatacaaagccccggctcccgcaccggatagaactgccagcgcacgaatagatctgccggaaattcctccggacaccacagcacataattagccttctgcccattggccgcatccagctggttctccatgcgcagccttccgtcaggaaaagagaataccgcctttccttccagcacaaaattctttatatcctccggcccgttcagcggatttctgtaaatacatgaggcatttttcacagcctctattccataatctgataaatccatcatttcaattcctccatagcctgaccggctgtcctatagtcttaccgtctctccccccggcaccataaatatttctccatccacgctgatccagacagcctgtgccgccggattataaaccagatctccgtcaatcgtaaactttaaattctttgccgccttcgtataatccacgatctgaatgttggtggcataccaggtgtcctctctgcctccggccatacggcagaattcctccatcaattcccagttgccgtcccggtcgaactcaaagctgtggccccagacagccatcaggtaaagatactgggtcttgtaaagctcggtaaatgctttcccatcctctaaaagaccatgattgtggtgacaggtggctttccagaccaggaaatcctccggcatgccaaactggtgggtgtcccccaccacccggctgtattcaatgccaagacccggcagcagagagagtatctccctgctgtaggaaccgttggggtaggacagcccccgcacaggacagcctgccgcgcgctccagattcctcctgtcctccagcacctgaagggccgtctgttccaccggacagcgctcaatggtcggatgaagcaccgtatggcacgcaatctcgtggccctgatacagcttcgcccactcatgcgatggaatccgctcctcatcttccaggccggaattcagatgaaaggtaccctttattccatattggttaaagagctccaccagcttacggtccgagagccgtccatcatcatagctcatggtcagggctttatgctttcctcccggaaagcaggtatagatatttttcagtctcgtcatcataatgcaccgtctcccgctatattttcataattcagcacagctgcaaagaatgcgagggccattccctgtccccagccctgaatccatttttttgagatgttcaagtatccctcccggtccttcataacagccgtaccgccggatacatcagtcacccgtccatccggagcaatgtggttaaaaacccctgtgattgatttttgtatgtatttaatatgaagtggattcgccttaagcgtcatggctgcggcaattccggcggaagcagacagttcctcataggattcttcatcgtccaaaatcgtcctccacagcccattatccgtctgaagcaccttaagcgcggagagctgctcattcaaactgcccacaatctccagatactgaggatacaggtaacactccggcagagtccttcccaccatgctcatggtatacgccgcccagcaattggcgcgtccccagtaaaatcctgacatatggtcctttgtaatattgttgtagccgtgataccacagcccggtgtcctcatcctgtaaatactggatatgccagtaatattggttcagagcatcatcaatcagcgtctgatcccccgtcatcacacctgtgcgaagcaggaaaaacgccgccataaacagcgtatcggcccagcactgctccggaaaatcattcttggcggatacggtatgctgcagcacatggtctccaaaccgcagggcgtcatgacgcagataatccacatataaacggatgatatccatatatttctcatcctcaaaaacctggtacagcgtaatcaggcagtgccccatggcgcaggtatttaccgtgcaggcaggcagctccagatcaatcagctcatccacccgctcctttaacaaatcaatgtactcctttttcttcgtaacctcatacgcctctgcaatcccgtaataagccactccgcacggccagtcccaggacatatccatccgcatggtgcggcgcacgatacggtccatagcctcttccaatgctgctctgtcatacgtcagctttcccatttctttctcctcctgtcccgcccgttttatcttttgtcccgggctatcacttttttaagcgcctctgccgccagacacgaaaaaactccggcgccctcttctgttaaatgtaccttatcttctctatagtatcctgccgtttcctcccggctcaattccttaagcagattccccgtcaccgtcccgaaatcaatgtaaggaatgccttctctctccgccagcctcctcatttcctctgcgtatcgcggaagcgccgcggcaatcgcccctttctctccttcctcattctctctgcacggatacaggcagatggaagacagaagaaccggcaccgccttacagtccctcgccgcgcggacatacgattccagcatatcgccaaactgttccacaggcacataccgttctgccctggaggcagacgcatcgttatggccaaactgaatcaggagataatccccttcctttaaatgccttttgatgtcctccagacgcccttcctccagaaatgtcttagacgaccgtcccgccatggcgcagttgtccacgataaaatgtctcgtctcataccgcacctcctgtccaaagggacagtcctcccgatgccctctcttaaccgccgttcccggatctaagtaagaaagaagcagttctccccagcctgcctggggcctgtcaccgcagtcataggactgagcggtggaatctcccgccagatacagaaccggcttctgtttcatataaggaagcacccacccgaactccatgtcagaaccgtaatagaacgacggataccccggctggttgtagcagttattctgccacgccatactgcaacggtactgagtatcctgcatcagggtaaacagcttgtggtccgtcacctccgtgttgatatagatacggatggccgagctgtccgcagtccgcagcagcagctcctccctgaaatccccaaagatatccgctgtcagacagggattccccttcgttccgttattcgtcagcgtattctccggagtcagcataaccccatgaatccaatcccggatcacccctgtaggcttctgatgtaagtaatcgctcccgtcggtgatctgggtcgtcaaatccccggaccaacggatggacatattgcttcccggcgtgtcggtatccagcagattccccttacagtcatagattcccacaccgttgacccagcactgatatccgcgcacgcccggcaccacatcgccaatcatgcaccgccctaagtcttcctcggcgtaggccccaaatatggcctcccccgaagccgcatcccgcagtgcataaccgtaaggcacgtgttccgctccctcaaacacattgaagatctccagtcccggacggtccggatcaacatctgccacatgcatggcatcgccgtgccccagcttggcgataacgccatccggtctgcggtcgtaagagctgtataacagacttccgtcatggtcgatacaggccgcgccgtatatgatctccatacagccatccccgtccacatcagctgccgagagcgagtggttcccctgccctgccaatgttccatagacagggtcgctgcccgtcaaatcatggggattgtcgttgaacggatttttcatagggacataaccgctgtccaccttccatgtttccctgaatcttccttcaaaaaagtcatacgctgcaaggcaggacctggtataatagccgcggcatataatcagatacggcctgatcccgtctaaataggccacgccggataagaagcggtccacccggttgcacggttcgatgcggttcatggcgtaatcgccccaccgcaggccgtcatcctctctggggaagggaaacggaaccgtctccagctcctccccgtttccgccaaacatcgtcaaatactccggtccctcatagataaatccctcgaaccgccgcaggtcattcttcggactcctctccacagcatatacatcgagaaaataatccgccagcgccccggcactttcccttcgcagaggatattcatagcgttccggaattccaaagcacgcctccagcgtatccggccactgcccgtttaccacctcaggcagttcccgccatcccataaacagatcaatcaaatgctcataataatctccggcactgcacacataggaatcctcatggctgtatccccgcctgatatcctcctccggcatggtaatgtaaaattcccgttccggccgtccatccggcccatagaccgtcatcttcgttcccggcgcggtcttcacggccatctctccccggccgtcaccgttaaaatcatagcagataaactgggtatagtgggcgcctgcccgtatattctcacccatatccagccgccacagaagccttccattcagcttataacagtcgatatagcagcgtcccgtatagcctttgatggaaacgtcatgggaattagagggatcccatttcacaagatactcatactccccgtctccatccacatccgacaccgacatatcattggctgaataggtataccgttcgccccgcggcgtcacgccgtcctccggcttttgaatgggaatatccagatactcccgttcccatacgtcaaccggctcacaggccggcccctcttctccgttcagcacaggcgcgaccgtatagacatctccgggcttcccggcctcatccagataattggtgctgtctgtcaccagtgcaacggccctgtcattccggtatatccggtaatccgctcctgtcatacccccggcttcttcactgtaaccgcatacctcgcaaagaagcatccgccatgtcaaaaatacgccccgttccgttttcacagcagccagtccgcggttcagacgctcaatctgttcttccctgataaaatgtaccggcgtcctcaccatcataaattcgcctgccgcttttcccgccttcaccggacgcacagccagataatgaggcacatgggtggagcgctccagcgtgtacgcagtacaaggaacaggtacggtctctaaaagacggtactgctccggctgcagttcccgatcggaccagaatatctcataaccgtccgcatccggatatttctcccaggagatcgtcacccggttattcgtcatctccgtgatctgtatcatacaagcctcctattccgtcctctatctacgctttgcggaaatttccggcgggcatcctgctcaccagtaaatcagcctcatgaagcgtcttcggcaaagcctcccgtataaaatcgagagccataatcacattcaaacaccattgggccgtaaaattcgtcgtaatccatggaatttccgtcaggaactcccggtttccctcatgctcaagcgtcaccgtctccagaccctgatgattcccctcacagagaatcgcctgaagtaaatgtccccaggcagtctccgccagctttgtatcgtgataatactttgcgccataagcccccatggccgcagccatgaacggaagcgagaactcccggtctccgattatccctccggattcttccagctgcttctcccttggcagatagtaaaaccttccataatcggccatcatccgtttccattcctcatcctctaaaagctccgccatctccatccacacctgaggcgctcccatacagatctgtaaatgggttccgccggccgcccgttccccgatatagcgcagatgcaccgtatccgggtcaaattcaaaatccggtcccgataccaattgtaacggcgccttcttaatgtcctcaatacctgtcacaatcttatcccggtaaacaggatcgtgatgccgttcccattccgtcagccagttggcgcacagcgacgaccagtccggaccgcttctggcatgacttttaaagaccatatccttcttttcataaaaatcccccagcgggtccttattcaaaaacgtcttctcgttgtccttcagttcctcaaagatattttccagcctgtgatctcctgtcatataataatagaaccggtgatgacccgccatggcaatccgggcctccttgcagggacagccccaatgccgcacattgtgccgcgatcccagccccctgtacgttcccatatggtatacatccacctccgaggcgtgtcttgaaagcttttccgccagtgaaaacacatccggccgtccggtcctcataaacataagccacagccacagtgtgggaaccagttccgtattatcccaggcatagccgcccatatcatagcgccacacatggcgttccctgtcgtaggtatgcataaagtccccgtaattaaacagtccgcaccagtttctctgctccacctccccttcataaaaggcaaccgcccggtcaagctgttcctccagccaccgctccgtctcacagttcttctccggcagagaccagtatccaaacgctctcatctcatggtagaatgcggcatcccccacatactgcgccggatgatccacacgtttcgataaagcttccagtctctctccctccggaatcatcacatcataaaattctatggaatattcgctggtagaggcgatcccgtaaggcgtcgcccccttatagtcatacccctcgtaataaacctgattatacccccgctccgcataatgtctgaagtccatggcctccgcggatgggctgtacagccatacacatgcctccgccttgtccttcgtcagtcccttaaaggtatatccggacggatacgtctgccagaaatcccggatcgaaaaggcgatggattgattcccgctcccgaaagcggccgctccctccgttctcataccgtgaagacagtccagataacagcagttttccccttccgtcttcttcctgattctataatgggtcgggctgtcctggcacacatcgtaggtatcccagaacggcatatcctcaagaacccggtctgccagcttcttctcatctcccgataagtcaagcctctttcccgccatctgatccctgtatatatgctccggtatcctgggcctccaggtcagaagttccgctgccgcctcatggaacacgccgtaatccccctgcaccgccacgtgccggttgtacatctcatcccccatggacacgtccatccgaagcccgattccccttaggaaatcccggtcctcatcgccgtcatagagaaacgtatggacaaaatccaccttcccggatccgagaccgatcatcatccggatcacaaacggcagctttcgctccccttcctccgacacatgagtcccctcaaacttcacgacagcccggaccggaccgctctcctccagtgtgactctctcgaccaggcctctgtattccttttccatggtgacagtccgtccctccgcgttcatcctctcttccagaatcaataccgcccccgcgcactccgcccggagctttccgtctatctccagcctctcaaacagccatttcccctcatcgggaatcaccacagccacacgtccggccgtaatcagccgccggccatctcgtctctcaatctcaattccctggccgaagtcccggccgccatcagccggctctacgtcaatcacctccgaaagcgtacctgcatccgccgtatgcgaggtccatttcacagacccgtccggccagaacgccgtaaccctggactgcatgcgctgctcgctcccatcctcgtttttcaggatatacgccgtgtccgcactgcattgtcccatcttccacatacagccccaggaggtaagtcccgtttttactctgtcgcccaaattatgaagtctcatctaatccaccatcacaccactgtgtgtcctgtcaaaatttatgaatgctcaaaggtaagaaaaagcggtacagctcccaggagtctgcaccgccttttttgatatcataggaaagtgccccgcactctttattccttcgcagtatcctgctggtataactgatttacttcctctacaagtctgtcgccgcctctgtttaaccactgctcagccgcagcctccagtccctggtcatcaatctgtccgcagatatactgagttctcgcatcgtcgataatctgttcaatatccgtgccgacctctgcatttaccgtagaatttgccagatatcccagagccggattaaagattgctactttttcattcttctcataagccgcatcctgcgcccgggtaggttcatccttcttaagcgccggagaaacagaagccaggtgagggatatagcagatacactggtttaatcccacatgaggattctgagaaacctccagttcattctttaacacgatgtccccggcctcatccagatcgtaggttacgccttccagaccgtaatccgccagcaccagcatctcatcatcacacatcttatccaggaaatgcagacagttctttacatcctcctctgtttttgccccggccttcgtaatcacataataaccattcataccgctggtagccagagttacattgtttatcggccctaccagggtcatcgatgccgtctgggaaggatctgtcacagatttcacatcatttttgatatagtagttccagattcgcttggcgctgtccatcacgtcgatgtacgctccggcctcgccctttttacaggcatctccaaaggtgccggagtccaccgtggcccagtctttccggatcagtccatcctcatagatcttccttatccattttaatgcctctaaatactcctttgtctgatgaacgggaaccagctttccgtcttcctccacccactcattgccaacgccgaaccatgtctgcataatatccagcggtcctacatacttggtcatctccaggccgtaggtatcgtccttgccgttgccatccggatcttcataggtaaacttataaagcatgttgtatacgtcttccaccgtctttggttcttctgtgattcccacggcttccgcccagtctgtccggtaagaaaagccgtaacggccaatatagcgtccgcggtagagaccgataattttgccgtccactgtcaggctctttaagatattctcattggcctgggataagttgggatagctctccgaatcctttaaaaactcgctcaaatcccagaatgcgcctttcttcgccgcatccaccacattggcagtcagttcgccgcttccggttaagatcataggcatgttatccttatccataaggaccaggcccagcttctctttatacgtatcattggcctcacgcctccattccacatgcgtgttggtatactcctcatactttgcaattacttcatcggaatggtcattcttaagctccgtaccgtagaattgaggaaccataatcgagattactgccttgccgtctgccgccgcagcagccgactcgctgcttcctcctctgccgtctgatttactgccgcatgcggccatagataacaccatactccctgccagcgcaacagcggcagcctttttcatcatattttttctcatgattcaattacccctttctcttttctcttccctttaaccttttacagacccaaccataacgccctgtgtgaaatatttctgcacaaagggataaatcagcagaatcggaaccgtcgcaaccacagtagtcgccatcttcaccgctttctgcggcggaatccccatggctccccagtcaaaaccgctgtcattggctaccgcagacgtcagaaagataattcttctcaaaacgatctggatcacctctttattgctgtctgagatatacatcatggcgttaaaataagaattccagtgagtgaccgcgtaaaacagcgtgacgcttgccagtaccggtttggacaatggaagaataatcttacagaatatctgcaaatcattacagccgtccattctggccgcctcctccagctctgtaggaagcccctgaaaatagttcttgataataatcatattaaagggattcaccgctcccggaagccataaagcccagaaggaatcctttaaatgcagcacgttggcaacaactaaataagccggaaccataccgccggaaaacagcatggtcacaatcaccatattggtgaaaaattttctccccttaaaatacggcttggataagggatacgccagagtacaggagaacgccatattaatcagaacgcccaccacagtcacgatgatggaatttttaagtcccttaattgcatctccggttttaaaaatatactggtacgcattggtagaaatcgtttgggggaacaggaaaaacgcccgctctgtcaattccctctctgtggcaaaggaacccgccacaatatatacaaatggaagcagtgttattaacgcaaacgccccgacaaacacatagatgaatacctgaaccagctgatctcccgggctgcgctttatcttccttgttacagtcttagccatgtcttaaatcctcctcttttcccgactcaaattcccgatttacagtttaatagaaaccggattcgccgacggccttagccagccggttcgctcccagtaccataatcatgctgactacggacttgaacatgcccgccgcggtagccagggaatagtttccatttacaacgcctttcgtgtaaatatacgtgtcaaacacgtcggatacggtacggttcatggagttctgcatcaggaaaatctgctcataccccgtatttaagatagaacccacctttaagattaacatgatcacaatggttgatttgatggccggaagcgtgatatgccacattttctgccaccggtttgctccatccacctctgctgcttcatacagctgcacatccacgccggaaagggctgccaggaaaatgatggttccgtatccggtctccttccacatgttctgtcccacgatcatcggtacaaacagtttcgggttggacatgacatccggtgcgttatttcttccgaatatctctgtcagccagtgatagaccagaccgtccgtggtgctgaacagctgagcggttaaggccgctacaataaccatggatataaagtgggggatatagaccatggtctgggtcactctcttaaacgccacgttcttgatttcatttaacagcagcgccaggataatcggcgccgggaaatagaaaatcaggctggtaatggaaatggacagggtattctttaataactgcaggaaatccggaccagtaaaaaatttcttaaaaacgtcgagccccacaaacgggctttgaagaaatgctccaatgatggaatctccattataagggctgaactcctgaaacgccatcaccaatccgcccatgggcagatagttaaagatcagcatgtacagtacgccgggtatcagcatcaggtacagccacttatgagaagcgaatgcgcgtttgaaggtttctgccttagatttctgtttttggtctgccgccttttgactcatagtttcctcctcttatttgttttacgaaagagctcttttcgttcttcaggaagccgtgtcttatctgcttcccttctgtgagcccatggtaacactcattggaaacatttgtaaataatcattatctgcctgttttccgacatggaaaaagccccttatttcccgcgtattcacggtgtttttaaggagcttccctttttgcagttatcatcatattcctgctgttatcatcttatatttttaagttatcatccttctttatgcttctttcggaatgcagaaggcgtaatctcctcatggtttttaaaaaagcggataaagttctgcacgttattgtactgaagcttctccgatatctccgccacggataagtcgctggtcagaagcatatattttgcaaccttcagcttctcctcactgaccatgtcggtaaaggtgacgcccttttccttcttcaatactttagacacgtaattgggctgatagctgagtgcgtccgcgcattcgttcagggtgatatttcccctggactctttaatcattgccgttacctgtttcacaatatccgacgccccggactggcggaacgctgtcagggaacgggtaatcggccggacaatctcatccatgacataccggatcagctgctttttatcatagatctgcgccgctttgatcagtatattgtgctgctcgctgtcaaacacgtcatttagcggcagggaggccctcgtcaggacatcgacgattgcggtcagaagcctggtcacatagaagtttctctcgatccccgaagcccccttcatctccaggcggccgagaatcagttccagaagtcgttccgcctcctcctcattgcagctgtctacggcgttaatcagttcattctccataatcaggtcatagacattgttcaccggagccatcagggaatagtcgtcatagagcacaagggacgaaatcccctcctcccggttgtgattcctgctgtgaagcgcttctgagctctcctcataagcctttctggtatgggttaaatcatggaaaggccggctgatgccaaatgcgatatgacagccgtaggtttcctccgcatggtccttgatccgcttatagaccagggcagttttatcatccagggcaatgtcgtcattctccccgatcatgaacaggatgcagtgttcgtagagaattggtacaatgtaaaaggattcccgcacctcctccggaagccctgctaaaagctcccggttctgcctttcccgctcctccggtgtaatctccccctcatccggctttggcttgcgggagatgccgatcatccggtaggactgccaggactccatctgatactttcttttcgtctccgcgatccgttccgggctcagaccgccctttaccagattcgccacaaacaattccttaatctgcacattctgatcgtccacaaacttctgaagcagcagaatcggctgggaaaacttaaccgccgccgcctttaacacggccagtattactccaaacagcagcataacgcccagcgccgcaaacacaaagacaattccgccccgtttcattttctccatatcgtaaccggtaatgtaggtcagcccatgaatccccgcctcttttacagccatccggtaccgtcttccagccggcgaacggtaaatctgctggtcagaatatccctccgtcccgcctctgcgcagatagctttctgtcaaatccggatttgtctccatcaacatggaaccattgctcaacactgtcacgtcataccccatctttttataagactgggatatgttaagcagcgcatccgtgttgacctgaacgctcagcagatagattaaatttccactgctgtcctgctgcttaatgatcagcacctctccggatgtgtccaccatgcgtgattccttcacggtatcatcataaggagcctgcacgttcgtcctgtttaaccagtacaccgacagcggaacctccttctgttcctttaaaaactgatctgtctcctcgtaatttttcagatcatcacagggatacatcccgtaattatttaaaacccatccttccttcacattaataaaattatagaggctgatgtattttgtcataaaatagttccccttcagcatattctgggcctgacgcacctctgtataattgctgtagggaaccgctttctgctccagcagccacttaaacgtggaattgctggtactgtccagatagtattcccttatggacgaaaacaggttatcgtattcaatggatacgctctccccataggaatccagagcctgtctgttacgtcttgtctctccctgcacatagatctggtaagacagaagccccatgacgataagaggtaccatcaccagcagcagaaactgcaggaacaggcggtcctcgtatttcccatttcttaaatccagcggtttctgatcaattttcacgttcttttgtccttctccttctgttccttttcgagaaggcctcatcgactgccttctttcgtatcaaggtgtttccagtaaataatcccgtcgcgcgcgattctctccacaagcccttcgccatacataaattccaggcaggagaacgtcttcgcccaaatctgggtacaggagacgaaatggcggtagtccggcggcccctggcttcttccgtaggcccggacgccgacatcccgggtggtcataagccccccatcctcttccagtatcctcttcatgatctcacatttatccagatagccaagaataatccggttggcttcctttcccacatcctctatgggaccgtaatggcacggcagaatccgacagtccgcataccggtgtttcatatcgccaagggactccatatagcattttaaaagtcccagatccttctgctggctgcccacaatcggcacaatggtcgtcataatctgatccccgcaaaacaggaatccatgtgacctctcatagagcccgcactgcccgaacgtatggccctttaaagaaacgacatcgaatacatactccccataatccagggtctcgccgggatggaccgggataaagctgaaatcctgggcttttccacgttccgcataagcgcggccggtatattccataatagcctgatagacctccggcgtatccttttttgtcacacccacgatacgcagattctgaatgcgcgacgcttcatccgccagatagcagtgaagcagatctgcccgcttcctggtctcttccggattcataaacacgctggctccaagctcctgcaaagccggtaccagccctgtatgatccggatggtcgtgggtaatgaacacgtccaggtccttataggagactcccagcgtctccaccatgctgcgcagaatctcccagtcccgttcaaaccggaaggaggtatccaccatcagactgcgtcccggctgccggatcagatagagattgcgcggactcatgtgacggtcagaataggaaatcgtctcctgaaatatattgtggtaaatttcctgcatatcgttctccccctcacatcgctgctgtttaccgttaataatctccattgtaaaaactttccggacaaatgtcaaatagaattccggactgcccacggtctctcatgatttttcaatggctctggtttaccaataccttcaaaactgctgctggcgccaatacaggtactggcttttccattgttaatcctgtataataaatatatcgattaattggatgggattatgaatttaccacaattgtactattttcgaaaactggcagaagttcagcactacaccgaggcagccaaagcgctttacatcactcagccaagcttaagcgactccatcgcatctctggaaaaggaactcggggtatcccttttccagaaaaagggacgtaatatccagctcaccaaatacggagaagagttttaccagtacgtcagcgaatccctgagtatcctggaacacggcatctctctgatcaaggagaaatccggtcacatcagcggctccatcgatattggctgcattcccaccctgttgggcgactttttaccggaggccctggatctttatcagcagaagaatcctcttgccacgcttaatatctaccacggaatgtccattgaggtggcacagggcgtttcctgcggcaaatatgacatcggcttctgttccatggtggatgacatgcccgatctggtctttgttcccattacctatcaggaactgatcgccattgtccaggacaaccacccgctggcagaccggggcgccatgtatctgtccgacttaaaggattacaggctgaccacctaccgggacacgattcccatcggcaaggtcgtccgcaggctgctgaaagaaaagggagtggaggctgtctattcctatgacgatgaaatctccattgcaggcagaatatccaaatcctcgaaggtagccattgtagccgacaccccttacttaaggcagtttaacaacctttccaaagtccggctcctcgacgtccccaaagatacccgcatgatctacatggtatacagcaggaaaaacttcatcacctccgccgtggaagcctttgcaaactttatggttgccaattgcttaaacatgccggactagagcgtatttgaaaattgctttctattctgccctgatcaccgtcctgtcacgcaaaaaaggaaccgctctctgctctctgaacagaggaacggttccttttctcatactcacaattttctaaaatgtaataccaaaggtagccatcaaagcaatcaccaaacctgctgccgctgccgggatcatagtccccagaatcacatgcttataactttcttttaagctgcaaccgcagatggacatggttagtattgccacggaggagttcggcagcttatttaaaatcagggctgactctgtcacgattctgtgcagggcctggacattgacccccatatccacaaacgcctggccaaagctctccaggaaaatcgtttccccggaaatcgcagacccggtcagaccggtcaaaacagcagttccgaaatacgcctttaagtacaccggcatattcatggataacacggcctgctgcagcgcctgaaacgcaggcgacaggctgagcaccttggaaagtcccataaccgccgccacagtcagcatggaattcagtccggatcccgcgcccgttttagcggaggccttgatgttctcgatatgtttaaactgggtcgccatgatcagcaggattcccacggtcaaagaaaacagaatactcgtggaggttccccagctggaggtggccactacgatgccgaataccacaataaacggcagtaccgacattccgatgccgggcagctcttcatcactcataaccttattggagctggtatacatggccagcagctcctcattcgtatgcttcttgtggctctgggcctgggcatagttgaaatatacaaaataacacacagccacaatcgcggtaaataccagggataagaacggcgccgatcccagtgacgttcccagatatccgctgggaaggacattacagatatccagggtatacataaatccattggcagaagctccgccgcccagcagcataaacggaagcagtcggcggtccatcttattttcacgaagcagattgtcagcgatcggatacagtacaaacaccatgatatagccgttgatgcctaaaagagtaataaaaaaggtacagatcaggatgactaggcccaccatcctggctcccagcttctgggtcagccatttggcaattttggtggccagtccggtttccagcaccagctgtccgaagatacctcccatacccaggatcagaaaccaggaagttacgaaacctccggcaccgccggaaaatgtggtaagaagaccgtcggacaggctaagttgactgcttaataagataattaccgccgttatcacggtggcgcagatcatgtcaatccccttgatgatcatgactactaaaagcgcaatggcaaagataagccccattgttgctaacataaaaacacctccatcatttattatttagttccggcctgcactttcctgccgctgtcatactctctgtccggccatccgattatcacattcatcaccgtgggaaggatgagggtgaataaattgatataggatgccgcagtcagtcctttcgataccagggtcgtaagccctgcctgggaaatcacccaggtaagacagatatagacaaaagtaaggacagctccccgccggttgcgcctggcttcggagaccttcggatcttccccggtctttttctgataccagttcagaacgcggtcattaaagccctgtgcatagttgatcgccgtggagattgttgcaaaaaagattgctatggtaagcagcgtcagggaaattgccctgacggcgccgcccgcccagccgttctgtaccaccatgattgtatacacggcttttccgtttgcccatccatcgtaaaccgcactgtagtttcccgccaggtctatggcgttcatctccaggaatacccagtttacaatcacggacaggatcaccgcccatcgcagagttttcttattatcaaacagctgcgcatgattgacgtacgcgccgaatccagccagattctgaccggaaaagatataggcccatacaaatgcaatgaaaagatatttgaaaaagctgcctgcgcccgatgcgatcccggcctccatgctgctgctcataacagccatctcgtttgccagttttccgctcccgatattgaaaataaggttcggaacgtgaacgacaaccagggcgataaagataacagaactcatgaagaccgcatttttccgtaccagctccgtacctttcatacagagaagaaacatgataattcccacaataaatgtggtccatatgtacggaatccccgtcagctccttaagggctgagccggaggtggaataggccagtgccatacatacgatgagcagccagttaaaattcagttcatacacgatctgcatcggttttgccagcacgcctccccagaatctggagccgtatttttcaaggaaattcccatagtcgaaggttctgaaatccatggcgaacttcatgaaaaaatagatgataaagcagttgatcgccgccaccaccagaggcataagcagacagaagtacggttgtgtcacctccggaagcataccgtaaaatcctgtgttccggaaaaaataagtccagggtgtggagcctgacgcaaaaccgcctccgcactgcgagctgaatgcaatggatacaaacaccagcactgctctccagtctacagctgtcccaccgcttccgacattttcgcttttcatacgtaaaccctcctcgcttatatttaacagacgtcattgcatgagttctgttaatttattaacaaaagaatctaaaaaaatcccctacctctccgcttccttttcccgtgtctgccagtgtgccgtcattctgtccagcggcatttccaatagtccggtcccctcagaatatgcgtaaaccgcaaagcccctcttacagcggaacacgcattccagacagggatcttcatcgcagtagcagaacgcatccgtgtctgccagtgcaaataccatgggggaacgtttttccttcctcacatattttaaataaccgcccgtaaaggtcttcaaatagatccactccggtacgcaatcctgttttttcgtcttccacgatacctttaccgcgttgtcgttatagccgccggtaatctggtaactgagttctaaaaactcctttgcctccccggcgtctgtcggcaccaggcgctctgcttcctcactgcagcagaaaatcttcttctcctcaagcgcctggcccccggtaactggaaataagctgttacagcttctgcagcggtaaaacacgacctccggacactgatccgcgcgaggttttctggtatcccggcatcttttcggtccaaatttctgttcaatcattgtgctccggcccctccattctcttttccagttcctctttcaacagatacttctttactttcccgctgcccgtatggggaatacggtcgatcagttccagtctctccggccagaaccgtttcgggacgccgttccggcaaagccatccggtcacatcctccagctttaaatgttcaaatcccggcagcggaacggcaaaagcgcagattctctcgcccagccggtcgtccggcattccgatcaccgtgtggtcgcccattcccggacagccttccagccggtcattaatctcgttggaattcaaattctctccgccgcggacaatcatatctttctttcttccaataatatgaatattacccgcctcatccatgacgcataaatcaccgctgtgaaaccagccgtcatcgtccagcgcgccgtccgtgattcttttatcctttagatatcccacaaacacattgggtcccctggaaagctcctctcccggtaccccgggcggtacgtcgttaccctcgtcatccacaacccggatctcaacgccttcgatgggccggccggaagtggttccgtttaatgtaagcgcctcctcgggccgtacaaacacatggggaacgctttccgtcgaaccgtagacctcacagagcaggattccgaagctccacgccttctgcaccatatagcccggcaccggagcgccgccgcagaggtaaagcttcaggaacggcagttctccgccgccgttctccagttcccggagaatatcatagataaatggcgtagctcccatagaaaaagtacagcgctcccgattcatcagatcaatggcctcacggcagcggtacttctgctgaagcaccactttcgctccgatcagcatgggagcgatcagcccgtgatggaagccggttgcatgatttaacggcgcaggcatgaacataatgtcctcactggtcagccccagttccctggtaaatacctcctcgctgtaacggatattattgtgggtgagcagaactcccttcgtcccgctggtcgtcccggaggtgcagagtatcagcgccagatcctctccggtccgcctggtctccgcctggtccaagtctgccggcccgctctccgcctggtctgtctccatattcccggtccccgcatcacatctgtccagtatttcctgaaacgaggcgatcgctccggcatccggcttttcaccgcccacaatgacgacacaggacagcgacggaatggattctctcacagccagaatccggctcgcataatccgtcttatgaaaaaaggaggggccgaagtaaacctttgactccgttaaattcatgctccggatcagttccttttcctcataggacatggcgatgggatgggctacggctccggtcataaagcaggcgatcgtcaccaccgcgaactcgctccagatgggaagctggaacgataccgcgtctcccggcaaaaccccctgttcccggagaaaggccgccactttcgatgcggcctcatccatctgccggtaggtataccgatttcccctgtcatccaccacatattcccgttcggaatacttcttcacggattctctccaacagtccagcagcgtaatatccttccagtaacctttggaaagatacttttcccgctggatggcattgatcttcatctcatcagtcatgacccgtctcctatccctttttgtgcgcctcctgccggaccgcaagccatccgcgcatgtactgcgggatgtccggagatccgttccatcacccctgctgtctcgcctttaattccttcacaagagccggaacaatctcaaacacatcgcctacgatgccgtaatctgccacatcgaagatcggcgccgtatcatccttattgatcgccacaatggttccggaaccgctcatgcccgccacatgctggacagcgccggatatggcgcaggcaaagtagatcttcggagttaccgtagtgcccgtctgccctacctgtttagactgcggcatccaccctgaatcgactgccgctctggagcatccgaccgttccgccaagcacgtcagccagttcctttaatactttgaaattctctccattcttcatgccgcggccgccggatacgatcacctccgcgtcctgaagcgggatatcgttgtcctcgcacgcctttatgaaatcaaccaccttcgttctgatctcgctttccggtgtgtggatgggctccacaatgatctccggtctgttatccatcaccttttccggctttttaaacgcccccggtctgcaggttcccatctgcggtcttgtctcgctgcataggatctgtgcataaagatttccgccaaatgcaggccgttcccagaccacattaccgctctcctcgtcgacgctgagcgccgtacagtctgcggtcagccctgtacgcaggctgactgcaatcttcgagcccaaatccctgccgtttacggttgctcccaccagaatcgtattgggttcatacttttcgcagagctttaagaatacatttccataagcgtcagcggaataattctcgtattcgtccccctttaccacataaatcttatctgcgccgtactctccggcctccttcaccgcctcatccacatcctttgcgatgactacggcacataacttctgctttaagccatccgccagctttcgcccctggccaagcagctcaaggcccacgcttttaggctgcccctggaagcattcgataaatacccatacgtccttacatgtatcaaaactcatctctcgcgacctccttttgccgtccttaaagtacctttgcctctgccagcctgtcaatcagggtccctgcggtctccgccgggctgctgccttcaatgttcatacagttagcatttctctttggtgtaaaagttgcttttacctttgtgggggacccctttaaccccatcttggtcgtatcggaccctggcaggctcgccagagtgatctctccgatctctgcttttaaggaagtaagaacgcctttgatggtagcatatctgggcttattgctctcctttgtcgcagtgcaaagcaccggaaggcttgcctctatgatctccacgccctcttccacctggcgcctggcgatcaccttatcaccctcgacctccatatcgagaatatacgtcagcctgaccgcgcccaaatgttctgcaatactgggggccgtctgtcccgtatctccgtcgatggcctgtttgccgcccaggattacatcaaatccgcccagcatctgaatcgcctgagacagaatataactggtggcgtacgtatcagaaccgccgaaggcgcggtcggtaacgagatacgcttcatctgcgcccatggccagcgcttcccggagcactgccttcgcctgaggcggtcccatggaaatcacggtcacttttccgccatagcggtccttcagctgaaggcctgtttccagtgcatttttatcaaaagggttcatgatactcggtacgccggtacgaatcagcgtatttttcaccggatcgatcttgatctcagtggtatccggaacctgttttatacaaacaacgatattcatcttcatccctcctggcagtttttacttatattccttttccaacacacctgcaatggtcatcctctgaatctggtttgctccctcaaaaatctggaataccttgcagtccctcatcagtttttctaccggatactccctgctgtagccgtatccgccaaagatctggaccgcattggaggtcacctcctgagcacagtcggacacaaaggtcttacagatggagccttccttctgcaccatgattccctgatccatcatccgcatggtattgttgaccaggcatctggatgcttcaattttgattgccatgtcagccagcatctgctgtaccatctggaatttaataataggagtattaaactgctttctttccctggcatacttcacggattcatccagtgcacgctgcatgattccgacagccagggtcgccacaaaggctctggataagttgagagcgtttaaagccagcttaaagcctgatccctcagggcctaccatggcggatgccctgacccggacattttcaaagatcaaatccgttgtattcgacagtctgaggcccatcttattctcgtgtgctcccacagtaacgccggctgcatccgcgtcgacaataaatgctgatattcctctgtggcctgccgccggatccgtcttaaagaatcccacaaagacatctgccagggccccgttggtgatgaacgtcttcgtaccgtttaaaatgtactcatccccgtccttcacagcggtggcgcgcatcgccgcaggatcggaaccggcgttgggctccgtcagggcaaatccggcaaatccgccgggtgcaatcttatccgcaaaatactgtccctgctccttcgtccctgcaaggattacatttctaagtgccacgaacgtggttacaaaggtgatggcgtagcccgcgtccacctttgccagttcctcaaaaatcatggcggtggtctcatagcttaaaccggttccgccgtattcctccgggatttccagcatgtgaagtcccatatcaaatccccattgaaacagctctctcggacactcccctttctcgtccgcgtcctttacatgaggttttatttcattttccgccatctcccttacgagagcaagcagtgctttctgttcatcggtgtaaagtaagctcatgttattttcactttcccctttctggttggtcgttttacattacagtggtttcagtcctgtcgcgccttccgcggctccggatgcaatgatttccccgatctgttcgtcactgtatcccagctgcttcataatctccaccgtatgggcgccctgcatgcctccgatcacatagtccggtttgcccagagatgcgaagcctacggggttggttggcatgatctttccgcctgacggataaggaatctttgtcagcacatcgttggcccaggcctgctcatcctcatagatatccaatggttcataggcggcttcacacggcatatcattcgcctttaacatcttcattaagtcttctctgtcgatctttgcaatggctgcatccagcacatcggtcacttctttatttaaatggttgttgttgacatccgcgcagtgacggtactgctctttttccagcatttccggacagcccagaagcgtgaacatcttttcataatcacggtcgtactccggacagcagatgcagacccacttgttgtccctggttcggaacacattgttaaatggattgggaacttcttttctgctcttcgggtactggtttccgtactgtgcggagatcaggccggtgctcagcgcataaacagccgcatgatgcagtccgatggtaaccttgtctccctctccggatttttccctgcggtacagagccgcacagataccggaagccagcgccatagctacctgaaaatcgccaaacccgttggtaggtatcataggtgcgtcaccgcggtttaccgtagttccgaatacgccgcctctcgccatgtaacaggtcacatcaaagcccgccgtatccttctccggccctttttcgccgtatcctaaaacctgggcaaatatcagcttcggaaacttttcttttaaggtatcgtagtccagtcccagctttaccagggacttcgttctcgtattggtcacgaatacgtcggcttcctccagaagcttataacaaacctccagccccttttctgtcttcaggttcagagtgataaatttcttatttaagtttgccacatcaaaggccagattctcgtcatcggtaaacggcatattaaacacggcgccctgagtcctggcaggatctcctttgtgtgattcgatcttgatacagtcggctccccattcgccaagtacgcgaaccgtcgtaggagccgccagatacgtggttaaatccactacttttacgccttctaatggtttcattcttcttcctccatatatgggaaaagggtctccaggtccggagtatgttgaacctgatgacccttttgtgtcagatatcttcgatgtcataacggtttgcccggagcatcgttcggtaagggttagattacgtattcgatatgagcaccgtgcttaatggtatttctggaaattgtaattctctgtacggtcggggccccttcctctaaccacatcgcgcggcagtcacggtagagacgttcaaccgggccgtacttgcagtcttcaaagtatccgacaccaccaaagatttccagcatttcatcgctgactcttctggttgtatcaatactgtacagcttacacatggcagctttttcttcgatatattctccagtcggattctccatgtatgatttagcaaaatcgtaaaccatgcagcgaagagcgtgtaccatcatggacatatcggcaatcttgcagcggattgcctgacgggttccgatcggctttccgaaggttacgcggtcagcggcatactgtaaggacagttccagcattctctgtgccatacctaagttgctggcagcaatatgagcacgggatacggataaggagtgcatggcaatctccagtccctgaccctctttgcctaagaggtacttcttatcgatgcggcagtcagtaaatttcagttcgccatggccggctccgcggcatcccatcatatgaggcatgttgattacctcaaatcctggagcgtccatcggtacaaagaatgcggacagtctgtcattcttatcggactccggattagtcaccgcgattacgtaagcaaattcgcagcagtcggtatgggaaatcagtgtcttttcaccgtttaaaacgtaggaatcgccgtctctcaccgcagtggtatgtaagtcagcaccggtacctcccgtcgcctctgtcagtgcgaagcaggtaaatacctctttgttctggaacttcggcatatactctgcctttacttcttcactgccgtaatcatcgagaattctccagttcaaatccattgcatagtgaagatgcattctcattccgcccggtcctctggagaactcttcctgaacctgtaaaatttccagttcattcaatccgtatccgccgtactcttccggaagggagcaacggtataaatcgttctggattgccaaatcatagaactcctgaggaaacttattggttacttccacttccttctggatttcctcaaggggcccctctgccagctcacggatctgctttaaatacgcctggaattcttcattggataacttgctcatttgatatatcctccttctttattcttgttaaatatttttttaacaatcttgataaatccattatagcctgcagcgaaggaaatatccaatcggccctgaccgcgataattccgataattgatagttaaaacctataattccttttttccgttgtaaatggatttttgcaatgatatagtatagtctggagtcattgcactaagctcgaaaagacgtccgctaagtgctcataacgaggaggtatgcatatatgagatcagagataatggacggcatcctgagacatattcatccaatcggaggcatagaaaacgccaggcttctggagatctctccgggccatgcgaaactctccatggaaattactcaggaagccttaaacctttacggaaatgttcacggtggatttttattctctctctgcgatatggccgcaggaatgtccacttacgcctatgagaccaccaatgtcacggaatgcagcagcatcaattttttaagaggggtaaataccggaaccatctatatagaatccaacgccatacacaaaggcaggaaaaccgttgtcaatcaggtaaccgtcaccaatgacgccggcaagctggtggtatccgcaaactttacgatgtttttaatcgcaccggtctagtactccatccggctgtcatacatttcagaaccaaattaatacaccgtataagcttaagcagcgcattttcgattcagaaacatgttgtaggttgaaccagtaagatgccaatgatatcatatagatagaaacttaagaaagtggtgaatccaatggtaaaacagcgtaataatttcaaaatgctctaagcatattatatgacatacttatgtatgaaaaggaggctctaaaatgtgtacaagttttgcagtataccatcagaaaaaggcaatttacggtatgaatttcgataccgatgaaatcgctttaaaactaaaaatcaatcgttatcacgacagggacttattttacttttcagccctgttagaaaacaaatacagggatatcgccggttttaacagcgaaggcctttttatctgcacacaggcagtagattatggtccggactttcaatcaggctgtgatgaaaatgattggtatgcctttgatcttctcgatgaggtactaaagaaagcaaaaaaatcatctgattcttttgaaattctcaataaaagagtaatctcgtatcccagaaatccactgtaccccaatttagggctgcatactatgattgctgataaaagtggtgatgcatttattctggaagaaggaggggatacaaatagaataagccctatttctgatgattttattgtcatgactaattttccaaatgggaattttaaagacgaagattatcgtaaagtgtccgggatcggagctgacagatatgtttgtgcctatgaatctatacagaagcatattcaaagctttggaataaatgaagcctttgaagttttaagtagaaccagtcagaagaatacgctgtgttccatcgtatatgaaccattaaaaaacgaaatttatatcagttttaaaaaagatttaagcaaaaaatggaaaatctctgttatcgaaaaaacaatccagtcaaccgatggattcttaagcaatcataaaattccatttacaaaggaagaagtacttgtgaatgatcttcttcgcttatataagtgaaaaccataccatggaaattcctgaataacagggcatggcccgccaaatacaaaaaagcttgaaaccctctgaaacagagaacttcaagcttttaattcatgccggcgaccggaatacagacgaacattttattaattactctgactatatttgcaataaaatttcgtatgccacgcaaataacccctacataatactaataaaatttatttgatcgtttttagtaaatgatgtattctttaattataaacactcgaggaggtagctacatgaaaaaaacagctccatttggatatgattttagcaatgggaaacttattgtcaataatgaagaggctgatattgtaaaatattgctttgaggcagaacagaattatatgaccgatccgccagtttgggataatgccactataaatgacggttgcgtatgcttagacaccgaaatgctttgcagcataaatacctttgtcaaaggttatatagcaaaagaaataaacacagttagaattatgggaaaaccagtatcttctttatttagtgatgaaaaagtacgttctttaattcgtcagcaaattacagatcaaaatattagcgaattttgtagtatcacaaaggaaaatatatcacaaggactctaattctcagcacacaagaataaatgttcgattataaagtagtgatttaagcaaccaaagaaggactatcacccgcgtgcgtgttgctataaccaatggagtgggcacgtataatgtaactcaggtcggcttatctggcggaaattgcataccggtaatatacagcatgtcggacggcatattttggtctgaagtatcagtcgccatacaaaatgatttggtcgttgttggattcagtagtggacagagcggttgggccgaagtcaatatattttccttcgaatgatcatttattgtgtatcgattatagtgattatttttgcatcaatagccgagacgttttttaccacaatatctctgccattaagcttaatttgatcgtcgatgtcaaaccatatatcgcttttgacaacggactcacgtacccttccgatgacggtatatggcgtgcatgtaacgccacctataaatatcatacatatgtcgcctttacgttttgcgtacccatctgctattgtggctccattttgtgcatctattccacaagtgtaatacgataaattgacgcctaaatctccatttatcgaacaaacgtttgcttttctgtgaattatatgttattctatattcataagcagaaaaggaggcgatactatgaatgatattttaccagaggaactccaaaaaatgttagatttttttaatgccgctactgaagcagtggaaaatgaattagcagcggaatttgcttgtccgttatgtggaggaaaagcatatgcatctaaagcttcaacaaatggacatgtacatgcatattgtagcaaatgtgatgcaaactttatggagtaaaggcggtgattaaatggaaaaaataacgccgaagcaatcagagattttagagtatatcaaaaataacattctaaaaagagggtattcaccggctgttcgggatatctgtaaagctgtcggtttaagttctccgtcctctgtacaaaatcatcttaacgtattggaggaaaaaggatatattcgtaaaagcccactacattcacgaacaatagagataatggatgacaactttaatctgttaagacgccaagtaattaatgtaccacttttaggaactgttgcggccggtgtaccattactcgcagaagaaaatattgaaaattactatccaatacccgccgaattactcccttgtgaggagacatttatgttgaatgttaagggggacagtatgattaatgccggcatattcgatggagatcagctaatagttgagcggtgctcaaccgcttgcaatggtgaaattgttgttgctcttgtagatgattccgctacagtaaaacgttttttcaaagaagatggatactataaacttcaaccagagaatagcgatatgggtcccattattgtaaagcatctggagatattaggaaaagtaatcggattgtttcgattaggaacagactgaatagaaatatgattaggcggcccacacggaccgcctttttcgttatccagccagccccggatactgcaatgctccgtcctgatctggtgtcagcacgactggctccttgacaagtttgccatcctgatcgagataataccactttccatcactggcctgtaaacctttaaccatggctccatcggcaccgagatagtaccagtctccctcatacatataccaggtgctatggaccatcatgccggcaccatcaaaccagtaccatttaccgtctgagtcctgataccaggagttgcgtactggagtgcctgtgttaccgaggtaatacttccgaccgccgctctcctcataccagccagacttcttcggtgcttccggcttcggcgctgcatcgtcctgtatataccgcctgacgcatacaagccccttcctccagcctcccggcgcccatgagtcataccggctcttgcagtatgccgtaagctgcttataactcggcctgccgctaccgtggccgcagataatgccattaccgcagtacatctcaacgtggccgatcttaagcgggcgtctcttatcggttcccgcaaattccaacatatcaccggggcgcaaacgggaaacgtccgggatacctgcggttatgtctacgtctacggttgtcaacttgccggactgatatattccggcggtattaagtatgccgaagctctggcctgcctctgcatatgcataacagatagagctactgcaatcactgtaatagttgccgtctttatattttttaaaacagtaatcacgtaaattctgactgtaataattgcggccaatcagcgtgtcgtactttgcgattactgcctgtctcttttcttgtgctgtcatagtacctccaaaaatgaaaaggcccgggatttacccaggcccataaataagtacagtatcaccggctctcaccctgccggccgggagatatgcggatcatcgcctttctactgcttgatttgcttgattgcctggttcactccggtagcagccaggccggagacaataccgattgccaaggcattgattatgtcctgagccggaaacgctggcatcgtgtacattcctgcgacacccagcgctgccccgaccgccccgcagataaccgggatcacctcgtccttgatcctcacacttgctttgcaggccattccggccagatagcatattactgtaattcctgcaacactcgcaattccaaaatccatagtttattcctctctttccagatcgctgatcctgtgattaacgacctttatctgttcctgcataactgcctgtgtttcttcaagcttaaaagtccgctcaatcaccgtgttatgcttgtctactttcttctctagctgctccagccggtaggcggtcagtttcgctgacgcaaacacgccggcgaatgtgccgattgcactgcctcccagcccgatcagagccaccattatctctgtaggcatttgtaagccctcctgtcagttattccggattctcttccagccatttttctgtctttgttttccaaaacttcggcacatcattaatcgtaataataccgcacctgatccgagtcccataaaatgctcccattaaatcatacctccttctgctagtgttccaaccacttcaccaagatcattaattgccccgtcctgtaccgcctttccttcctccagggcgtccaggcgcttttcctcgtcgtttttctcacgtagattatacgttgtaagcaccgtaccatctgcggccaccatggacgtttcagacacaagtacaaggttagtataattgcctaccactaacccatcaccattcttaatctgcactgctgtgagattgtcaggagtcagcgcctcccaggtcgttaccatggccgcccggtttgccgccgccacctgtaaggctcccaggcttgtgcctgcctccagttcaataatagttccattttttaagatcatagtgtccttcatgtacggactcctttctcccttttcgggtataaaaataagagcctttcagctctgattaacgagtttcttattcatttaaatagtgatttagctcttgtcggaaacgttgacggcatggagttcggaaccgaaaacgaaaaaagatattttgtttttaagcataatgacggctccaaatcatcactggagttttataataacggtatcaatctggtaagatatgatcccaaaacaacgcaatgggaaattatttggtcaataccagtaacgataaaatgatcatttgtttccgatggcggcccagattaatgtaatctccttatttatccaatgctgccccgctatgtttacggatactgaaaatccggtagtattaatttcccgtacgctggctgagcattgatcatatgaatacgctaccgtaggaattacaaaaatatcgttatctgcaaaggtataaccaaatggtatattacaatttccatactcgtcagtagttactacgcagtatgcgttccatattatttttttgttaccaataaccattaccgctaaatcactattttgtttatcaagctgttccttcaaagtctttcctgcaacggcatcaagcgcgctctgccctgctactgttgccatgaaattgtttgttaatggaggcagtggtcctgtgtctcctttttcaccttttgggccttgcggtccagccggtcctacattaccagtgtctccttttggaccttgcggccccgtcgcacctgtatttccctgtattccttgcggtccagccggtcctacattacctttagggccttgtggtccagtcggtccagtatccccttttggtccttgtgcacctgccggcccttgcggtcctatatcgccctttgcaccttttgcataaccaataatcacatcaaccattgccatatagttacctcctattttccattgtcataactccatttaatagccccattttcattatcgtatgaaaatggagggctgtcataaaaagcatcatcatacacacagtgtatagcactgttatcctcatcatcagtatagatgtataaacggctcagtgccggtatattaactccagattttccttgcgcgccattctgccccggttctcccttcggcccctgtattccctgcggcccctgtggtcctacatctcctttagggccttgtactccagcttctccagtctctccttttaccccctgtagcccccttggccctgtggctccttgcaatccttgtggtccaggatctcctttttctcctttgaattctccagactgtaaccggctaactaaatcatttctaatagattcagcattggctgctgctctattggcattggatgctgaaatattggcatcatgagcggatttttcagcatcttctgtagccttaacggtccgtggatatatattttcatattgaaccaattgagtaataaggccctctgcatctgcttccaattgatccagttttccgatatatccacccgcatccaggctattttcattgatcgtatcttccatgacgtagtacaggaaacggcaggaggaagaccgcccgtcgctgtatttaaactttacgtcggctactgccttaccaggtatagacagctcattcccaagaagcctatatacatagccattcccggattttatcagatttcccacaaccggaatacggttctccagtctgatattaatggttgcactgactgcatcagtcacatatgcaccgtcattttttacccggagcgtgaactgagtctgtccatagtctccctgcgtgagacagataccggtatcaatcggatcactgtatttcgtgtttaactcaatatcatagtttaccatctataccacctttcccatgattacatacgacgcccctgctcttatcaacaaaactttatctcctatggatggcgcataactggaaatatatttatacggcttctggctggccgttccctccccataaaagcggacatatggacgcccgttagatatactcatcacagttgccattcgataagtttttctctcacctacgacataatcttttatgtcctggagacgttcacccggattatcatagatcataatttcaccacccgttttaatgtatgggtcatagttcccccaacgctcaattccatctcccacgcatattcaatatacttatttccaacaccaagagttgtttcattcacaaagatacagtcgcggtactcatggtgtggcatcagacctgtaggaatcgtaatggtatcataagtctgactcttttctatcgcaattcttctgacaagtgcatcaagggtttcctgatccgcgatatcatcaacgctttcgatatcaacaacattccttccacggtttactgttgatattttacttcccgcactgtcgttcacatattcgcttctcaattcctccccatccggatcgtctgtatatcggacaaatatattcgggacattgtacatatcaaggctctgcttcgctcctgccttaataaggcttttgtcatccgtacggtatgagtgttccgttctgcggtttactggctccacatatcggcggctaacagcatacccgttgccattaaaatgcagcggctcatagttgatcgctgtcagcagtgcgttaataacttccagtttgcttgtaccgatctcaaactcaatattttcgcgggccattaataccgaagtctcaatatttatttttttaatcccggccccattgatgaggtttcttacttccctgacgtagtttgatccggaagcgataaaaagccgttcccggatcttgtcctcacgcagaattgtactgtaatcataacagtcaatattctgatatattccacagttctgtgtctgacgctccgggctgctcatgatatagattccgagtggatatttcagccagccatgctctgtcagcagcataaaaacggggcggattctaagatcagtctccttaaaatccacccctgcggtttcctccacgataaaacttccagtacccatgatctcctgggagctgtcaaaccggatacttccagatacattatcaaggtctttcagtttccgttcgtttctgtccagcagttcgaaacgaaaatcgatcattctgtcaccttccagccgttttaaaacttcttcgtgggtatatcctccctgtgccagattagtcaccgaacctcacccccagatcgtaattgatgcggcttaacgacaaatcgaaagtcttccctctgtcaaaaagatcatttttaaagctaaaatctgtaatctcgcagcagatacaggtttccgagttacggaacagatagattccattcaggccatggatccgttccagcgattctgcctccttattcggaaggtagaaagaggtacttatcgttgattctttatgaataccggattctttcaccttatacgtacggccttcgtagctgaccaattccgcttcattgctcttcttctgttgtatttcgatatgccagtcactggtagattttataatccggatactctctgcaaggttcccaacctcagccagacgcgcacctttatatttaatggtcatatctgctgcattactgtctgagtagccacctgcgtacgctctgatgatataacggtacagctttccagatttcaccgtgtaatcctcgtattcgtttcctgcaaacttgcctatcgggctgtacgctccgccttcttccgaacgatacacaaattttgtaccagctgtcgaatccgtagttatcttcacacctgcatcgagtgcggataccgctatggacggtcgggccggcgcagcggcagatatggtaaatacctgagcactctcatctgaccagataccatatgcgcttccaatcctcattttcacaacgtactggccgttttccagcatcatatcaggcacataggaatcagacagtcctccggcccgttcgccgctgtcatgaatgatttttccgtcctttatgatctgcaaaatatagactgcattttctgattcgttgcatttccaggttatttctgtaatggaatcattcttcattcccgttataattggactggccggcctcccggtgagttcaaatgtgccgtatgcatacccggaagccgcattaatggcgttataggtctgtactctccattctacaattccgatagatattgcagccgtttccatcgtataggactgctctgaagtattctgtgtgactgtggtccaggaagactctccctgttttcgccaaccaaattcaaacttcgcctgccctgtatcgtagagcgaattgtatttccactgaaacgtaatacttccgcttttctcaattacatcaccgttaggatatagaatcgttggaagactcggaactgcgttgttgtatactacattgatatatggggactttccgccctccttgcttgtaaacttccatgataagcttggtaccaccttatcatcaatgctgtatactgccagaaccacgttattctttccgacattattttttacgatactggttacatcccattcaatccattcgttgttatcctccaccgtggctttggtttcatattctgtaggggaccatgcgacatcactatccagatacttgttgtaaaacaaattacctgtaagattagagatgtcagggatattatattgtccacagcctattatactgtttttgacttttactttattgtgtaaccttacaaccgccgacacaatctctttgttgtcaaatctaggtatattaaactggagaaaaatccccatgaaacttgatgaattgatctctctccacattgcaagttctgtgtgattatagttattatcgtttccggaataacgactaataaatgtatctccagtacaaagaattgtctgttccgccattatatcttactccttcccgtccgatacgcctggttttcctgctgggccaactttacaactttgttaaaatcatcaacattgctggcatcaatagtacagtaaaatacgttgactgttccagctccgttcttagcaacattgctcggcacaacacgagatcctcgcggaagacgcaccagttccggcccgtgttcacccacccaagcatcaccattcatcgaatagtcggttcctaaagcatagtgaggtacttgttgcgctgtattcacagtgctggtcactgcgctcacgctgtttcccacactattcattgcattttgcaaatcatttcctttgccaataattactgcaatgactgtagcaagtgcaattagggcggctacaactccgacgataatcgccgtggtctttaatgtctgaatatccatgcctttaaacattttcacaacgccctttcctgcatctgtaacactcttgatccccttatataccagtacaaacccactcgctgcacctacaagcccgaccaatccctgaatcacaggaattggcacctttgcgattacttcaaacagatcggtaagaatcggagcgagagcaagcccgaaattattcttcaggttcttgctggtattatccatccgccgcatagcatcatccagctcaccgaacttctgtaagttttctgtactcatgacgtatccgacagtatgggcttcctttcccagttccttaaatcgtttacttccagcttctattaacggatttaattcttttgctgagcgtccgaataaatccatagccatagaatcacgctctgtctcatttgtcatttttccaagtgcatctatcgtatcataaaaaacagcttctgcacttctgagctctccgttatgttctttatatctgacaccgagtctagcaaattctttctgaagatctttgttgccgtctctcgcatccgccatactcctcaccattttggacatggatgaactaatttgatccgtggagacgtccagaagttcggcagcataatccagttcctgtaaagtatctgttgacagacctgtaacactggaaagggtaagaatattatcggaatattcagcagccgactttgaacagtcaatcaatttggttgcaagggtaccgagcgcaattactgccaacccgactttttcatccacgccgtcaaatttagatgcgaatgcttcaaccattggatttacttctactcccagcgtatcggctatgtcccgaatcgtatccccaaaagagcgttgcttttcctccgattcttccgtcttttttcctgcttcgtactgctgtttcgaatactcatccagctccttgcaggcctgaccgtattccccgttcagtttttccagagtcgtacgtgcgttcagtagttttttgtctagggcatcaacctgtttttcggttgcatttccgcttgtcattgccttatcgtatgccttccgattctcgtctacaattttactctgaagctttattttctgcgacaacacttctttttttattgttagttggtcagtttccgtaccataatttttcgcctgttcttttgcgagcttaaattctgcttccaacagtcccatcttcctattacattctgcaattcctccactgaattcggagtaatccagccccagaacaatagaacgcttatattgactcgccacttccgaatccctccaattctttcatcgatgtgattgtgggtgccttaaaatattttgtctcgtattcatcgtctatttccatgttcttttcatcattatagatgtctatcagttttattatttttaccaggctgcttttccaaaaaccaagctcagacattttcatctttacacaatataaataaaagataaaatcaaaatcgaaaagcagctggtttaactggattttgccagcccaaccaacatctgagctatcactttttttgtaattgcatcctccatttccttatccatagaaccggacgaatcaagataatctgttataatttcgtttaaatcagcaggacgtattgacatcgctagggctttagcttcctctatggtgtaatctgtatggttcactttaattccagagtataatacaattgctccaaattcttctatcgggatttcagtaacgctctgattaagttttataagttcttcctgcatatagcagactgccctcatgttaaatgtagcaatgaaagaccggtcgttaaatacgatctcaacctcattagccggtgctactgcaatttttttcattcttatgctcccttcgccgggtatgtactgggtcccgttgtaaaccatttagctgcctgagcatctgtaaaatccggattagccgcatcaccaaaaaaacgcaaccatttatcactttctcgtggaataaagtttatagtaacactgtccgttgaaaaagtaatattaccttcagactgtttgtttgtggaattgatcggttgtgcttgtccttttaaaagccatacaaactcactttttcctccagtctgttctacctcatacccaagtgcaatgtacggcggctcattaccggcaacttctacaacaacgccgtctttaaatgtattcccgcatatttcagcccttacttctgcaaatactttatttacatcaaccacaaccgcaatgccattaaggatagaaatatcctcctcttttactccttctccatacaattcccctttagacacactgggagtaagctggatctgcatggcttttccaaagcctttaacttctccatacgttgtaccagtgctatcgtctgtcgtcagcagacagtatttcagattttttacgttgattctgtttgattttccacttttgctagtcaaaaatatcaccttccattttctcgaattttataatcgcccgccaaagtttcgcagccggatcacagcttttttccactaatggtatagagaattccggaaggacgattgccttcaggagttttttcaccgcctcttcaagtgccattctttctcgataccacaaatcaacctcataactacttacccattcctgaccggcaccatctccgttcaaccccgaagcggtataataatctatacaggtggcacaggcagacatcaacggtgctggttcgttaagaacaggaatatttaattccgtttcgatgatttctttcaccgtcattccgtcaccttctttaccatatcatcaatcgccttttctacctcgccctgtgcgtctctcatagccttatccataaattgattccccggcacccaggtatggccgtcacgggcaaaatggccgtcatttatcttattccacttatatccggtcatttttcctccacggatactcgcatacagcatcccatttttatctttccgtacatctgcggttacatcatccctggcatgttcatacggccgactgccgtcatagttggagggaggtatttcttttgagcgcgcttcaatatcactgctgtggagatacttttttatttttcctttgacgatagtaccgagtttccggagcagcgggcgttcctggctttcgagtcctttcggcatctgtgcaagcatctggtcgatctcaaatattccctgctcataatcaaattttacgtccatctcatcacctcacggttatctccatctctccaatatttttttgaaatgccctgataatggtaaataactctccgtcatatctgatctgtgatggccggtatttctgattaccaattgtcttgatacacactttgtaatcatccggattaatattgattgtcagttttggcgtaagaccaacaccatatgccgcgaaaaattcacttcgaacaacgcttttgatttcgcagaacacttctgtttcatggggagttatttctataccttccggaaccggtgtaatcagcacacagatatcatttcgcattgtaatcaccacacagactcagggaatccctcagcgctacataagcccgttcgtaacgatcggcgctgccatcatagttatactgccatttgcaatagaactccgctgacttaacaataaggggatcgttttctttcccggcagtagcaacgcccacccgtgacaggtcacacaggcaggcgtttatatttgcgtcgatatcattatccagtttgtcatgtgatattcgcatagaaagttttatttgctctatcatattacataacctctttttatacattcttcttggtcacagtcacaagggaatttttgtcaattacttttccgtcgcagatcataactgcttttgtaatctgatcctcggtatcattatcctcataactcttaaccaccatattgtagttggtgttgaacatataatcagaccaatcgaacaggaaagctactacggtatctttattaatcgttgccccaaggcttgtcatataatcgtttaagactacccggcgtccgaggagcgttctctccggctttccgtcaattccataatttactctggcaattggctgtttatttgtatccaccatgcctacaaatttcataaatgtcttcttagtcatattccatactgcgccgttctcatatgctagtggaagcgccgcttccgcttctacgagagtctggtaagtcggatcggaattcgccgcaatatcaatattacaaccggattccgccgtttctgttaatacaccttttggctgccctgacccggttccgaagataaacgccttttcctgagcctttaccattgcctctgacacactgttaacaaacacagtttcaaaaatctgtaaagacatcacagatgtttccagtgtcatggaaatagcacatctcaatttgtatcctttaatgtcaatctgcccggttgccttcttctgcttatcactggtaccgccttctgctacccatgttgcctccggcttaacactggacgtgggaactgtggctccagccgcataagacgtcttagtgacaagcggcagaatcattcccattgattccattttttccacaatccggttgactatggtcggagaaatcacggatcctacatccgtggtctttgttgtcgcagatacattcctgaatttctcaggaattgccgtccctttcaagacgtaattcatgaacgctttacgatactccacggaatcgtacatatcttctgcgttttcgtcgtctcctcttccaaaagaagccccgtcaccaactccggataacggaagcggcggcgtagacagtgcccttaagttcgcttccgccttggctgctgcttcaaagttcttatccagctccgtcacggcctccattttcttattagcctcctccaactttccctcgttgataaacgtctccgcttcgttgataagtgcctgtcttttttcctcatattcttttctattcattacctctgtctcctttcagatttaacaatttcagccgtaactcggcctgtgctttgtgtattaaaaaatccggggggttctgtcccggatctttaatcatatttcttaatttttcgattgtctccggcggaattcctccaaatgcgttttgcatcgggatggcgctgtcggaaaacataattctatcgacaaatccgtgttctacggcctgctgtgccgacaaataagtttcgcggtccatcaagtcctgtaatgatgctgtatccattccagtcttgtctatgtacgcattcataatggactgattcgctgcccgcaaggcgtctccggtattggtcatgtcccggtagtctcccgaagcagatgtcttgacattgtggatcatgaacattccggttggactgatctcgcactctccggcctgcgcaatcactgacgcggcgcttgcggcgattccggtaatcttaatcactttccttccggaataattcctcagttctgtgtagatttctgaccctgcgaatacacttccgccaggggaattgatatagatttcaacgtcttcgcctccggcctcttgcaaagccttgataattttctttggagatgtgctctctaacccaagccagtcatatacccattcattcccagattcaatgatctgccccttcacatcaattcgctttgccactcttctcccccccttctaatagcgccgtgattccggccctcgtttcatttacgttatccagattcatttgggccatgaggcccttgatctggttgactgtctgtgtgtcaagtcttcgcagtggcttatctccatcaggcaccggacttaagttcagcgtttctctccattcgttcggtgttagggctcctctgtctaccatggcctgtaaagccagttttgttgacaggctagcacaatgtaggtttcctgcatcgaaatagattttgtttccgcagcctcgttccctccgactgaataatttccttgtgtactctcctgacatctgcccggcgagcggttcaatcaccaattcaaaatagctgttccattcatcttccgtgtaatttgcatggacgattttttcattcgtattgaaaaacgcatagatcctctttttggtattatccatctgcaaagcattggggacgtaatcctttggctcgatccgctccgctgtcgctttggaatcgactccggcagcgccaaacgtagaactggaaatgcttaaatagttgtccacaaattcctgaacagaactttttagatcctccggccgcatagacgagttaaattttaacagccatcggatcacaccgctgtttttgattgcttttatgattccctgatccgtagttgatacgatgtccataagctgttccagggcttctttgggggaatctccaaacaagtcattatcgttgaaatcattccgtagatgaatcacttcactgtatgggaacatggacgttttcccgttcaggtagtagaacttaaggtatagttcctgattttcatactttgcttccacaccggcggctggaatcgggtacagctgttccggtattccattaggatcccgtacgatcagaataaaggcgttgttgtttagtgcaagctgtgtcgccaccttctcttgcatcacctggccgcacatatatgggttcggttcctccagtagaaagcgtatgtacggttcaggattcaccgaaaaggatttcccgtcatttctgacatgctttgctatcagcttcccgaccgccttcgcatatggccgtatgcatgatctgacaatatcggattcatatagttttccattccacgcaaaaaagccgtttccctgctcggtgatcattttgtaaacagtgcttttcccgatattttgaaaaaagtttattattcgcattcttctcctcctttccgtcagattatgctcagatattcttccagatggttttccagtgtgacatatgcgtccagtagaccggccataccgtcaattcgtcgcgtaccctgattccctttgcatggctgaatattgtcgtttttatcaacatcaaccgaggtatttgtcagacaccatttcagaatcggattattgttataaaccactctcttttttgccaagtcagctccaagggacttcatcggactgctcagcgttttcttgccctgaataacgggttccatcgtcgtgagtccgaaggtgtttttcatatcctccacaaaatacgatgctgaccacgagtcgtacccacacttaaacaggtagatgtcaagttcgttctgcacttcttcgaaccactctttgacgtatttgtaatgtaccttatttcctggacttaatctcaacaatccctgttcagcccataagtcataagatatcttatcctctcttacgcgctgctctaacagatcttccggaagccaatacatttgcagcacatagattctgtcatctcccggtaccatgaatattacggtggcgttcgtcaagtccgtggtgctagaaaggtcggttcccccgatgccataacgcggtttcagcgcttcgagatcgaacagctccgtgttattcaactgttcgaatgtcagccaagcctcggaagaagtctcgcggatattgaattccttgcaaaccagattcttaacaagctttggattatccttcgccttctccacttttgccgcaagggttgactgcttctttatggttccaaggcccggatttgctttcttccagcatttcggatccgtccattctttccggctgtccaactcataaataaacgggaagaaatgaggatccttgtaccccacactgtcaaacaggccattgataactttttcagcctcttcgtacttcgcatcgtagatatcttcccggattactccggccgtggaggtaatatagacaagcggctggtctctggccgaacagccgtcggccatgatatcgtaaagggcctttccgttcttccattggtggatttcgtccatcaaaacacaatgtacgttaaggccgtccagcgtatcgctgtcagatgccagcggcttgaaaatcccatcattgaaatactcggaagacagctccgcgaccaatggcttaatgcgcttcaaaagtgccggcgatttcctcaccattcgctttgattctgtccagatgatcttcgcctgatctctcttcgtggcaaccgcgtaaacctccggccccggttccccgtctccgacctgcatatacaggccaacgatggaagccagaagggacttcccgtttttctttccgacgattaacactgactccctgcactgacgaaaaccattgatattcacaaagccaaacactgcagccaggtgcgctttctcccaaagttccaaccgcaccggactaccagcaccggcacctttggatagcttgcagtaattctccgcaaactccaagacatggtttgcccttgccggactataaaaatactcgcctggattattgacttcccaggcgaggtgcttgtaccactcatgtattttatttgatacgacctcttcccctgattctatcaggttccaatattccaggatcgggttatagcttaatggatagactactttctttctgccggccattaaacatcctccctcccgtttacaaaatcatcgaagccgtcgtcttccacaaccacttttttttctgtttttggaagacaatcaaccagtattttcatagcctgggtctgtctttgcgaaagctgcaaataatactgtgcctctgggctctgtttggttccatactgattctctccattcttgtactccacggtcgtcccctcacggttaatcgtttctcggagatcctgcattgtaattgtcatgaaagcaatgtcctcaatggtggtaaatacaagcttctttttgttctcatctatgcttgcaaagagtttttttaatctgcttgtctcccgcttaatccgttttactttctccaaatagttgccaatgctgtcaacttcctcttctcttttccttgcttccgcttcaaattccttgtctgtgtacacgtttataccacaccccctttacgtacgacctgtgtattaaataaatctggggacacggtgaatttagaaaccacccacacctcaatttaaggggggagtcagcggaatcggctgaccaaattcatcaaatgaaaccagtagagccgctttcttgtttagtccatgtccttcctcttcatcatggcatgccttgcactcccacattaagttgtcccagttcaatgtgatctctggatcgttaatgttatcaggtgttattctaaccttatgatgtacgatgtatcccagtcgctcgtgacacttctcgcacattccgccatcaatcatgattctgttgtgtatgtatgacctccggcagtccttccactttttcgagtgatagaacgcctgtgcgtatttctttgccatatggttacctctcctttccctctactgttggcgtgatctgtgctacaaggtctgtgtctccttccaacagaatgcagttgtgctcagttctctttttcatatcttcgcagaactcattgatatatttttcacttagacgtctcatacttttgaatacaagaatactatcaggtatattaagcacctttacttcctgacattcaattctctttccatcatcatcttcaataataaatttcattaactcaccttctttcaggaggaccaacgccctgggtttcatgcgccggttttaattatgagtatgacttttatgtgtttcacacttgacatatctgctattttgtaaagtgtgtcgtgatcctgtttctactaattaatgccaccgttttttttactatcgactttacatcatcaatttatgacaactcatagacaaaataaaaagaaactatcgaaaatacgatagcttattgtataccttatctttctgatcttgattaacgccgatatatctaagggtaatatggatatctgcatgattgaaaatgtccatcaacatagctgcatcttttgttgactggtatacgtggtagccgaatgtcttccgcagcgtatgcgttcctatcttctcgattccgaattttttacccgcatctgacagtatgttgtatgcctgctgtcgcgtgataggtttgttttcatgtggatttttgaaaaggaattcgtaatcgtctttcccaactatgtattgctccagagctttcttaaggtctctgttaatcggaaaacgcttttcttttccggtcttcttttccctaagaacaatatcacttttatctttaacatcccgcacccggaacttaagaatatccgatatccgcaggccagaataaataccaaaaaggaacatgacataattgcgttcactatccttttttagatattcagctatatcaatgactgtttccttgtctcgtataggctcaaccgtattcattcactcacctgcttctcctttttggcatgagaaaagggcctctgcatttagaagccctcaccttgttttgtaatccatggtaacatattatcacacttgacaaggcaaaatacgccatcttttatatttcacctaatttttttccgactgcataaataaaatctcttacaatccgctgcatctgcctttcacggtaagatgtgcaccgctccatatcaaaatatttcatgttatggtaacgataggaccaaaacctcacccggattactttttgatgttccggccgcatattattatagacactttccactgcatcaatttcccgctttactctttgcaaccatggatcgtcggcaattttaattgcaaggcgctccgtcggattgcctatactgttcccttttggctgcccgtcgctcccgcccttctgattcatgatttcatcaatacgctcttcatactctgctttattttgcggatatctacgtacttttggttcaattattctccatgcttctgttggtattctgtttcccattaccattccctccctgtctctctgtctttaaggtgtatccttccgacgatttcaaatcctgccagactcgccactgtacgcaatacatgcatcacatcttttaccggttttggcggccgatctgcttcttttattgcccggtatgccgtcgggtccggatatccctcaccatttttatgtatcatgcgttcacccttcctttatgtaaaatttctaatcgagttttatcccattcctcacacaattcttgcgtgaaactctttgtctgacattcatcagataccggtactatgtaatacttccgttttagtttatagcctccggaagccgcagcataaatacttctaactgaaatatttataagtttggcagcttcatcggaatttaacgtatcaacaaatttttccccgtcgtaaatatcatacattcttgctttcatgattttcttctccttaactgacatattttctatgtgcttctttggctttgctacggctgtaatttccataattatcttttgttgtattaagattgttgtgtcctactaaatctgctaccaaagtaagaggtacgtctttttccagaagttccgtaacaaattgtctacgccacttatgcggattaattgcaatcccattaagacgcttatccatctcgctgagactcttcagcattacccgcactgcatcatcggtcattcttttatgtggtgcacggcttcctacaaataatgcaggattatcgtcagtgcggctttcaaggtactctttcaaatgtaccgcagcttcaccgttaaaatatactggtctttccttccgtccctttccatacacaatacattgccgcccatgcatatctatatcttcacgattaagcgctaccatttcagatatacgcacccctgtcctgtgaaggaagtcaactatagcaatgtcgcggagactatgctcttttgcaatgtctttcacaattgtgatctgctcatctgtaaatacttcttttacgcgatgctccaccttattatccttaatcttaagcatcggattttttgtaatgtattcttcttcggtaagccatttaaaaagtccgcggagcatacgcgtcttattattaattgtctgatccgcattatgccttaccagtttgcaatgtgccagatatccacgtatatctcccgtggtaatctcgttcagtgacttgttcacagcggtgaaaaactgcttatattcctgcttataggtttctacggtcttttccgtacagccgcgaacaagcatggaagccaggaacagcctcacccactcagatgtattatctatctgagtagacaatccggtctcttcccggtatatctgcatgttatgaagggccatatataataccgctttcgcatcattaagccgcgtctgctctgctatcacatttgtaagtccgtacataatgttggttacaacttcgtctaaattaacctgttctgccatgatattatcctccttctcagactggaaaattattcctcttgcttttctctgcctgagccggttataatatactcaagcagttatagagcggtggtaagcatcttcccgggtgtccaccgcgtttttcttttttcgcacatacgttctttactttctttttttattgccgggaaatgaatcccggcttatttttattcaataattctctttacttcttcttttgcatcgtgatacgcatgggtgtaaactggcggaaatccctctggcggctccatttggtccactttatcccgtatctctgccagacgcatacgcaggtactcattttctgcctgtaatctttgcgtttcgttgtatgcaggattattttttaatattctatcaataactttgtgtaatccatgtaagccccttaacatagcattgcaatacgctatctgtaatcttaatatagctctttttaatttcattcttcccctttctgaaaatctcgatttaggcgccgaaatgcctttcgataaaagcatcattctcggctttctttttttgataataggcccggtacgttaacatcgttcccgtgtctacttcgtccggaatattatcgccacctttatacttcaccgcgcccgttaatctgtagccgtgatacggcggtggcacttcattctcccatggaggcatgaagacggctctttctgctactccgattctcacaaggtaatccatgtacttttttacttgataccggctcgtccccagtatagaagctatatttacaaggtttataattccacataaagggcacattatatcaagatcacatgaaacaagcacaaaaaataccttccattcattaactttcttatatctcaattttcacacctcttaatggtcttacatggctactcgcgcacggcctatgctgccgccgttttcgccactgccattattctatttttttgatagtgctctctccgcttcttctctgtttaaaaaccacttctctccaaaaagaaaatcaaagaaggaatagttttgatggttttctctatccatgcatatcatgtacagcccaccaccagtgtatttccagccaatgcaaaaacattcggataccctcccggcgaacgttccataaactatatcgccaaccttgcatggaagttttacaagctgtttctggtcttccagtcgtctatactccgccaacttccgtatttcgtccggttcaaggccaacatcttcatactccttaagcagccaatatatagtcatggcctcctgtctaaccaatctggcatctattacagttctctttattccgccttcaatcggctcatccggaattgtaaacctatccattatccgttcctcctttaaatgatcgttttgttaagcaaaccgtagttgttcgtggctgtcgtcgatcctcatattcggcattctttcgccgactttgagatacggacagtttgcagataccagtgcctgcgccattatcggcaccacgctattcccgatccgcgccacctgttccccgacggggtacggcttgccctctatgtcatggttaagtatgtaatcctccggaaatccctgcattctcttaagttcctctggtttcagcatacggaggaagatatctttcaagatatactgttctccatctatgtccgttatcacatttactaacccgaatctatcctttgttgttatcgttcccaacggccgcccagcttcctgaccgcaaccagtaccgtaatacttaatcaagaatgcagatataagcccgaaatgccccggtgatgtggtgatggtatgtaatggctcctcgcacatctggcctgtcccggatttataaaatttagtgacaaatgccgtaaccagaccataccggttgctggtatcaattgtctttatcggctccgtcagcagttggccgcgcgaatcaccttcccgtgtttctccgtgatactggatcataaaggaaacggcgctctgattgttaactatgtacggttgcggattgttaacaacatacttaacgtatccgtttgctatccgtttcatggtggcatctgccagcggccgtggacggtcaaatatggaacgccccaaatctgaccaatcaatataatccccacattccagccacttcagccggccatctgctccgctcttactgtgtgttggctccggccatgtaatcacattcccgtctctgcggaagattgcataccatcgcttccgcgttgtcggcgctccgtaatctgccgctaccagttcccggctgtcaaaatcatatcccaatcgtttcatggccgctatgaatcgtttgtagtcctctccggctctttcttttattgggtgccctgcctcgtctagcggtccccactgctgtatttcctcgacgttttccatcaagataacatcgggaagaattgctttagcgtgcttgtacaccgcccatggcagaattctaagccccttgttacgcggctgacctccttttgccttgctatgactggtacaatctggagaggcccacataagtgctacatggcggccagcaacatactttttaagatcgaccttaaatatatcctcggtcagatgcagcgtatccggatgattgactttgtgcatccgaatcgcctgcggatcatgattgatagctatatcaaccggccgccccagtgccatttctatacccacacttgccccgccgccaccggcaaagcaatctataatcaaaccgctcatggtctcacctccagaaagtcttttatgctcatctgccctgcaggggcaaaattcatccacaacacttcacgcttctttgatgcgatttgggaatagcagtcagtttctacacggtaccaatcgtgtaagctgtcattatacaactcgctatcatatccactaattagtaccggccccttatgggcgtgaagaacttccagtaattcagtttgcgccccgttgtccatctcataccggtactgtttcccgtgcctggccgataaaacatatggcgggtccgcatagatcaatacattggaatggttgaagcgtttgattaattccacggccggcatgttttcaatttgcacgcctcgcagcctttcagcggccgccattattttctcaggcagattacaccaatctttcgcagcataggcccgctctctgccttgtacgtcgttcttccagcccaccttttcgccattggtccggaacccgtgtcccatattaagccgtatgtagaaattcactgcccgtccaaaactgtcctctggtaccgattcaaacgctgaatcgtatacctgccttgcgtaaggcgtgtaatatatttcccgtgctaggcgctccgggtctttcctgatccactcaaacaagtttacaacgtttccgtcgaggtcgtttacagtctcgatattggaccgcggcttattgaatagcactgcgccgctaccgaaaaacggttcaatgtagctgtggtgctgcggaaaataactgataatccaatccgctatactccatttactgcctgggtatttcataattgctttcattttcaaaaaaggaacccggcgcgcctgttttccggaaaggttccagctcctttcttaatcggtcaaatatcagtttaatgaattatcgcctgcccacatgaagaacatcttcctgcatttacacaatcttctgtggtcgattctccgcaattcggacaaggataaaaaccattcccgtattcgcatgtcttgtaaacatctttttgcatagaagctgtggcaattttatatgcttcttcgatatcagaaaaactttctccctcatttggaatagtcgtttttctacttataatttctatggctttttcaatatccatcatgatcctcctctcggaaatcttaattttttaactcaatcagggcatcgaatatatttttcgataactcataatgtttacagcgctttgattcattttttataaccagatcaccggttattccaaacatctccgaaacatcggttcgctcctgcttatttgtgcaatttccgttcacattccatgcacagttagcgcactgtttctttatctggattttttcggcagcatggcttagcttgcctaacatacaatcgcagccctcgtcaactgtacttgacggtatataccggctgcgtccggtaccgtaatccacttcatcgtatccatcacggtaggtatatgttcgggttttcccgcaatacggacataatttttcaagtgtctttcgctgtggtgtagtactatacattttcctgatcccctttccattcgatcaccagctccggtaccgttatacatctcggctgccctggcaccatcttgataatcccggcgtctgccatctgcttgagatgcaggtgtacgctgctcgtgctctccagtcctacgccttccccgatctctctcaccgagggcggccagccgtgggctatagtgtactggactatgtagtccctgatctgcttatgacgctctttcatggtctgcctttccggcctcgtgaagcatctcagctacggtctccgcaaatttctttttcaggtctatatcattgtcaacaagttctttacttttgatgctccgtttgcttctggttttctctctgtaccttgcctctgccgcctcgaagtcagcaccattttttcgcatctcccgccatactgccgcataggttgagcagccgtttgtactcctgtctgctctcgcctcaataagtggttgaatgatctcctgtcttgtcaacgcaagttttgcagcttccgccgcctgagctttctcttctcgtaatctgcattcctcctcaaaattgaaaaggattgattcgaaaagattccttaacttctcgctctgtgaaatggcctcaagtgttgatggttttttatccgatctgcctttacagtcttttacttcctgcgccaggcagaccccatactgccgatccatcttaagatatattttccgcagcacggtatttaacgaatcattctgcttcggatatctcttcgccagttcagtacctcttttattcatgttcattttccagatcatgcacgggtccggctccccttcctgttttctgaccggccctgctgtcttcttttttttccgccggaggctccgactctgtatttatcatttcctgcagctcccgtaatctgccgtcaaagtatgtaatcaattccgttctgagttccgcaaatttggaatccatgtataccctgtcaacaaagttttcgggattatatctctttcccatgttcaccatctcccatattctgtagtccctgcattaccagagcgtcataatcaacctcacgctgtgggaactgctggaactggtttgttttctgttttcctgtccttcctttgtccttctgctcagcttctttcaccgcatttatcacccatttgcggattgccaaataatgactctttgctttatagcctttcatctcgatatactcatcaagaaacgtgactgctttttccgccatcccctcgccgtactcagcctgtagttttcccttttcatcatctgttaacataacatgtttatattcgccatatttgtgttttactttaacgtcaggtgagggtggagcgtcagcggaagccggtatattattattaatcttatctatactaatcttatctaatctaatctgagaagccgaaatggatacaggctgtacacattctgtatccaaagtgtatacgccggtctctgtctgggtcaaaagtgccttttcttcgaggtggattgtctccttgtagcggtccctctggatgtagttatggacccaccaatgtgtgattacacaaatccctttttccatctggattatgtaattttttgccaccagaatcttataatcatcctcactggctccaatgctacgcatgatcttttttgcattgtcaaggaatccatcgtcatccgccctcataccaagatggaagtaaagcgcctgggctgatttcggcatatccaggaacatatcgctgtcaataattgcctttgagaacattctcttgtttgccatgtctacacctcaattcctgtttttctggcgttctgtgccggggtaacgatccgcaggttgtctttccggttgtccgcccgattatggttgatatggtcaatcacaagcccatcaccgcgatactggccgactaacagctcatgcattcgcatcatttttccgtttaccctggcctgtgggtatccatctattccgatcgaccatgaatgttttgacagccggtctacatcttcggcatctacgttaatttcatcacccttgtgggtacgtataacatagctatttgtatccctctttccgcgtgtctcctgctcttccttcaagcagccacaggactttacattccccagtctaagatgctctcctttgaccaatttgtcttttccgcagttaagacattgacacttccagtatccctttcctgcatattcccgagccaccagaaacccaaaatgcataccgcttaaatctatataactcaattgtaattcctcctttgttcccccgccgctagacgaaagacggcggaggcagtaccatggcaattattatgttcgtgacacattaattcttgccccctatctaaaggctcgtttcagagccgacaaggcttattctttatatttgataccgtataccttatatttctctgcaaagctgttaaaaccggttgtatgagcctctgtatgatgcacacggcacagacatatctttcgatgatccgaatcatcaagcgtcctgcgatcatttcccatcccgattgcatcaacatggtggacttctcccggccttccgcagatagcgcactttttaagcttcagacatgcatacaggtaatgtccaatatcatcagtgcggttaagcgcgaaatctaatagcggtactccagcttccagcgcataatccagtatcgtgttgatatattcccgggccgtatccatagagcaagatgagagcgaaaagtactcgcagcctgtacggtaaatatgcagatacttaagccactctttcatgacttccggcatctctcctgtgaaagctgcaatgtcgttaatcgttgcgtatgctttcttccgctgctctgcgcttatgtgccgtccatcgtcaagccagacgttacatgtccgcatgtgcttttcctccagcggacccataaggtttttacctggaatgaacacctgcaaatacgtcccttcctctactggcttgtaagccgttatatgtgcaaattcatacatgccatcaccccactaattaaacggtaatccattatcatctggcggcgataattgtttcatttcatcgtctgagactggaggtggtatcttctctttatccggcttcgatttaagcacctttacagcttcgctatactggtcagcctccatctcctccagagtcttaagaccatagttctttaaaagcccctttattccaacgcctgttcttttcagctcctctataatttcgtttcgctggtcctcattgattttcccgttggagtcagcatctttgttatcatcgatacagaacaggccattaagcgcatattttcgggcgtaactgcttgtacttccagttatttgagaagcgtccatgcccttcttttcttcctcttcccgtgcatatgccttattggtaatttcggccccggtctcgcaatcaacaaattttgcaatgcccttaacataataccggtcccctatctgctctatctcatcgttgaggaaaagcacagcattcacagattttaaaagcggttttacggcctcctgtatgtcctctcagttacgataataatatttcccaaagagattatactggcttttcggtactttgagttcctgctgtactttcagcaacttctcatacacattcattacacggctatcgcccattacacatctttcctctcaaaatacagtcccagactgttgagcgcagtttccagttcttccagttccgattcagtaccgagaaccgtatatataactttttttgcttccggtgcaaccggccagactccggcaagtgattcatcaacagatttcaactcatctaccgtctcccggcgcgtctcttctctgatctgctgttcctgagctacccgctcacgttcctcacggcggattctctcgatttcaagatcacgttttttctcttcctctctgcggaggatttcgagacgctgggattcgtaattgttgatatatctaacagcgttcgcaagactcaggtcacgcttgtacatttcaagcgccttcggaaccacttcggaatccatatttttaatggttgtaacctcttcgtatgacttgccgatcacctcgatcatagcctttttaaccgctggtaatttgacagatgcattttcccattttggatcataaatcttttccaggggaaggtattccagcatctccccgatcacgctgtcatataacgcctggatatctgtctttctctttgccaccctgacagcttccatttccttaagctggctgtcgatgagattgaccggcttgtctacgatttcaagcagcccatcaacccgtaccttaaaggcttcatatggcttcatccactctgccttaacctgcttccggctgtcttcgatctcttttctcagcttccggaggttcgcaagctcacccttcgccgtggttctcgattcctcggtaaacacagcgccttcatactcggaaagcttctcccgcaagcccttttccagttcttcaaaattaacttttataattccattggtctgtgcgacctcaaattttaatccctgcataatagcatatcctccatcttcatttcgtactggttcccgttcagccgtatccgttccgtgatcctgtgccgctgctctgctttccgctggcactcgtcacaccttcggccttctacggggtcgagatagcaaccacactggtcacaccgatatctcatttttctcaccctcttgattttctgtggcccgtatggtatcatgggcctgtaaagttttttcgtatttgccgctgtgagttcgcacctcacgcggctttttccttgcttttccgtttccccagccgtacgggttaagcccggccgccgcagcggctctgtatgtaccgttctttctcttgctcatcccacacctcaaatctgtgccagtgcacggcacccaataatattaccgccctcatccctcaccatctcatcaactatgtataagtccttgcgatccggcgcggcctgtgcagtcagtacagatacaatgtaggcaattcccgcttttggattcggaagattgaccaccttgcgtaccctgtcttagataccgggataccgccgatgtctccgatccgctcccgtgtctgttccgctctggcgataccggaagaaggaattgtcaatatgacattgtcgtccttgtctaatatggtaattgcgtgtggtgtcagattgataagctcggtatcgaggagactctccaaatatccgatcaactcgtccagccccgtaccaccatcgtttgtgagtacgtccatatagtcgaggcatctaatcatgtctgacggaaagcttgattcagaatgagcaaaaaatgttatcctagcgtcttcaacatcaaagaaaaggtatgctccgtcggtgtctccgtccgtatcatagtcgtcatcggcctcgagcagtgtcttaaaaatagtctgcttgtccctcttccgcagatccgaaaagtccttcgcgtcatcggcctgcatgatttcctttgttgccttcgcccattccagtactctgttaatagtctctttcttcatcttttttctcctttattttgttaaaataataattgccatcagtgccacaatcaccacagcctcgacctgcgccgccgtccggtaactcctacggccctcgtacgcctcgtgaaacatacgattccaatatctggcgctaaatcctgcaaagtagtttttcatatccattatcctgcctcctgttttccacggcttttcttccactcttcgaactccctcatattatccggattttcaaaatatatcttgataatctcaccgagtgatcttgccattggatttgtagtgctttccggtatctgttctatattcactttaatcattgttatcgcatcctttcattccccatatattgccatttggttacagatctcctataatctaagtacaggccatgcagggacaagtacaaatgtggaggctaactatggataaacttcaggagcatatcgttcagaattggcttacatattacaagcaataacgaaattactgaaacaaataatggaaagctggggtacctggacataaagtcaagtttatatcccgggttttcttttttgaagtttcgtcgttgctctttagatagtggtctttcaggtactacaactattctgtgcttcatctctattctcacctcctcgattatcaacgtgcgccgatcagtttgttttttgcataagaaaatctcttgcggtttgaacctgtccatcgaaacggcactgcaatgtttctgggagttcgtcccaatgttcagcaatataacgtaactgctcaagacgtttttgctccttagtttctagtactcctctatgatctttcatatagcttcacccctttcttgttgttgttagcactattataagtcttgttaacactcttgtcaatactttttttgttgttgttagcactttttgttgacgttagcacatttttgtattataataaaagacataagagaggtggtgtgaaaatgaaagacagaataaaacaattaagaaaagcgttagaattaacccaacaagaatttgctgatagaataggaataaagagaaactcgtttgccaattatgaaacaggacgcaatacgcctatagatgcaataatcgtttccatgtgtagagagtttaatgttaacgaggaatggttacgaaccggagacggcgagatgtttaataagttggattctatggacattacatataatcattttgggtatttaatgggaaatggaacagcacaaaaaaaagcggtgttatccgctttagtcgaaatggtttatagtgtgcctgatgataaatgggattatatttttaatcagttcgaaggctgcttaaaagaagccaggggaagcaatgaatctagggaggattagaatttcctccccaatacccccattgctaactggtatatgcgtctagcagaaatattatcaagtgtatctactaattcatgtaacatttttttatagtccataagaatcataaatatgtacctccctttccgagaacatatgccgtatgtatgtactatacatatattatagcatatagtcattaaatttgtgcattttatgcaaaataatatatggaaaaatctggcaattgccattattttccaattagttgcaaataaatcgcaaatattcaaagcgccatgtatcaaacgctcgggaaaggaagcatgatacattgtgggataacgcaatcgaacgtttgttccttttattctataaaaattatataactattagggctaaaaatcaaccccaaaaaagaacatttgttctattgataaattatttaggagggaaatataatgtcatattatagtgcttatgatgtgagtaaaaaaagtcattttaaaacaggagttctctgcctaattggaggcataataggcatgcatcggttttacatggaaaaagtatggacaggccttgccatggctgcaatgttagttgtaggactatgcctcgttccaattaatctgacatgggctggtattgcatttggtgctgattttttgatgttaggtgtagacttcttttgcatttgtcaaaactttgtggaagatgcagatggaaaaaaaatatctccagataatttgaacaaggataaggaacctctttttaatatgctcttaatgataacattttcggtatatagcactttgttatgttacatatcttattatttatttatattaacagcggtatttacagttattgcacttatctttttgattatggagttgaaatatattaaaaataactgattacataaagccccctgtgctggtaacacagagggcaaaaagtaatataccggcaaggcgccgatacgatataaaagtgcacttctattgtatcatttcgcgacttgtctgtaaagaaatacacaacatttaaaggaggaaatgatacagtgaacgcagtaatatacgcacgctacagcgccggacccggccagaatgaacaatccatcgaagggcagttaagagactgccgtgactatgccaaaaagaacgatatcaccatcatagatacttacatagaccgccatatatcaggtacagactttgaaaaccgcaccgagttcaaccgacttattaaggactgcgagcgccatcagttttcggctgtgattgtatggaaagtggatcgctttggcaggaaccgcgaggagatcgccatgaacaaagtcaaaatgaaaaaacatggcgtgaagctgctctatgcgaaagagcatattccgaatggccctgaggggattatactagaatcactgctggaaggcatggctgaatattactctgcggaattgtcgcaaaaggttagacgtgggctgagagagtccatgcttaaaggacacgcactgggaggtaatctgatgcttggatataagataattaataagaaatatgttgtagatccagtaacatctcctatcgttgttgagatttttgagcggtatgctgccggagagacagcaaaggccatagctaccgaccttaatacccgtggtgtagttaatgccaagggagatccctttaaaaataataccatatactttattctgcggaatgaaaaatatataggcatataccgttacggcgatattgttgttaatgatgtgatacaccccattataaatatggagttgtgggggaaagtccaaatgatacttgaaatgaattcccgcaaccgatccaggagccgatgcactgctccggaggagttccttctcactggaaagattttttgcgaatattgcaagcggccgatcatcggggaatctgggacaagccggaatggagcaagccactattactataagtgctcttccaggaaaaacaagggagtaaaatgtgaaaaatctacagtccgtaaaactgatctggagaattttattatctctcagactattgataacgtgcttcagccagataccattgattatctggctaaaaaggttgtcgaaattcagaactcggatgcacaggaattacagatgcagtcactcagaaagcagctctcagacgtacagaaaggcttaaataaccttgttaatgctgtagagatgggaattatcactgagacaacgaaagagcgtatgatggccttagaagagcgtaaggaagaactcaaaatctgtatcgccaaggcagaaatcaaacgcccgaaactcacagaggagatggtagagtactggctcaataaatttagagatcaggacgttgacagcacagagtttaagatacggctgattaatacctttgtcaactcaatttatcttcacaatgactatgctatcattgtgtataacttctgtgatgatgagagcggacatcgtgcggaaatcagagctcagcttgatgatgcgttaagagcaaaaaaagaggatcaaacgtgttcgtctgatcctactcaagtgccggcgaccggaatcgaaccggtacgggcgattaggcccgcaggattttaagtcctgtgcgtctgccagttccgccacgccggcatatcatgatttctcatgaaaatgggacctacagggctcgaacctgtgaccctctgcttgtaaggcagatgctctcccagctgagctaagatcccttttttgtaacatgcattgaaacaatacaacatatgctggtaataaatgctgcatcaacgatttcatgcaaacgacccggatgggattcgaacccacgacctccgccgtgacagggcggcgctctaaccagctgagccaccaggccagatttcaaatatttagttcagtgttagtggaccttcggggactcgaacccaggaccgaccggttatgagccggttgctctaaccaactgagctaaaggtcctaaatattgtaatctgattactatttagttgttacaaagccgatgatcggactcgaaccgataacctgctgattacaaatcagctgctctgccaattgagccacatcggcatattccattccgcctcactgatatccggtggaataagtgaccccaacgagattcgaactcgtgttaccgccgtgaaagggcgatgtcttaaccgcttgaccatggggccttattaattcgcatctgatgcgttagaaatactgataagtatttctaaactccccgagtaggacttgaacctacgacagcgcggttaacagccgcgtgctctaccgactgagctatcgaggattattataccatgaagataatccttttggcaaggcatataccctcaaaaccacacattgtacatatcttttcatccgttcttatttcctctttttcctaaaccaacttggttaagccctcgacctattagtgacagtcagctccatacgttaccgcacttccacctctgccctatctacctcgtcgtcttcaaggggtcttactcttgcgatgggatatctcatcttgaggggggcttcacgcttagatgccttcagcgtttatcccttcccgacttggctacccggccatgggtttgatacccaaccggtacaccagaggtcagtccatcccggtcctctcgtactaaggacagctcctctcaaatatcctacgcccacgccggatagggaccgaactgtctcacgacgttctgaacccagctcgcgtaccgctttaatgggcgaacagcccaacccttgggacctacttcagccccaggatgcgatgagccgacatcgaggtgccaaaccactccgtcgatgtgaactcttgggagtgataagcctgttatccccagggtagcttttatccgttgagcgatggcaatcccactttataccaccggatcactaagtcctactttcgtacctgctcgacccgtcggtctcgcagtcaagctcccttatgcctttgcactcttcgaatggtttccgtccattctgagggaacctttgagcgcctccgataccctttcggaggcgaccgccccagtcaaactccccacctgacattgtcccccggccaggtcatggccgcaggttagaaacccaataccgcaagggtggtatcccaacaatggctccatgcagactggcgtccgcacttcttagcctcccacctatcctgtacatgcagtaccgaatcccagtatcaagctggagtaaagctccatggggtctttccgtcctggcgcaggtaaccagcatcttcactggtacttcaatttcaccgggtgcattgtcgagacagcgctcaaatcattacgcctttcgtgcgggtcggaacttacccgacaaggaatttcgctaccttaggaccgttatagttacggccgccgtttactggggcttaaattcaaagcttcggattgctcctaacctctcctcttaaccttccagcaccgggcaggcgtcagcccatatacctcacctttcggttttgcatagacctgtgtttttgctaaacagttgcttgagcctattctctgcggcccactctcgtgggcaccctttatcccgaagttacagggtcattttgccgagttccttaacaatgcttctcccgccggccttaggattctctcctcatccacctgtgtcggtttacggtacgggcacgtattacacaatagcggcttttcttgacagcccctataccaacttccctacttttgttcggtacgcgtcacgctttcctgttgttaaacggattttccagtctaaccagtccggcgcttgccccggtcttttcattcccgggtttggcttcggttctgtgtccccacagttctgataatacgcggtacaggaatttcaacctgttgtccatcgactacgtctttcgacctcgccttaggccccgacttacccagagcagatcagctttactctggaaaccttagatattcggcctggaggattcccacctccatctcgctactcattccggcattctctcttcttaacactccacgcctccttacggtaacgcttcgccgcagttaagaatgctcctctaccaattgaccataagtcaattccacagcttcggtgtcgtgtttcagccccggacattttcggcgcaggacctctcgactagtgagctattacgcactctttgaatgtgtggctgcttctgagccaacatcctagttgtcttcgaaatcccacatccttttccacttaacacgcactttgggaccttagctggtggtctgggctctttcccttttgactgcccaacttatctcgtgcagtctgactcccgtacatcatttatgcggcattcggagtttgatatctcttggtaagctttgacgcccccttaagaattcagtgctctacctccgctaaactaatacgaggctagccctaaagctatttcgaggagaaccagctatctccgggttcgattggaatttctcccctacccacacctcatcgccacccttttcaacggatgtgcgttcggtcctccatttccttttacggaaacttcaacctggacatgggtagatcacccggtttcgggtctgcctgaactgactcaacgccctattaagacttggtttcccttcggctccacaccttgagtgcttaaccttgccagtcccggcaactcgccggaccgttctacaaaaagtacgcggttccacctaaaatgtggttccacagtttgtaaacacagggtttcaggttctttttcactcccctcccggggttcttttcacctttccttcacagtactatgcgctatcggtcactaaggagtatttagccttggggggtggtccccccgacttcccacaaggtttctcgtgtctcgtggtactttggaacatgcccgctctcttctggtttcacatacggggctttcaccctctgtggccggtctttccaggaccgttctgttaccatacgagtcacttatagcagtccgtaacccctgggtgcacgcacccaggtttaggctccttccatttcgctcgccgctactctggaaatcgagttttctttcttttcctccgcctacttagatgtttcagttcagcgggttcccaacgtatggctatggattcaccatacgccgactgaggtttgctcagccaggtttccccattcagatatctccggatcaaaggatatttgctcctccccgaagcttttcgcagcttatcacgtctttcatcggctcttagtgccaaggcatccaccctgcgctctttttagcttaaccagttcgattttcatctgcgggtgcggattactcatctaagattcatagcgttgaatctctggtcttaggtttgttatcgctgtacgttacagcaacaacgagtttataattttcggttatatctgttacgatataacacctcggatgtcttgatttactctttctcgggattaaactcccttaaaagaatctatctagatatattcaatatgtggttttcaaggtacatgctggcatgactcccggttaccttacggcttccttccttcataccgaatggagatggagagattcgaactcttgaccccctgcttgcaaggcaggtgctctcccaactgagctacacccccatatttatgtcaaataccggatgctggtcttcccttttcaggcaatccctttattcttttgtttctttccacttacttatctcccgggagttaagtagtgggcttaagtggactcgaaccaccgacctcacgcttatcaggcgtgcgctctaaccggctgagctataagcccttttgtaaaatctggcacccacctgctctcccatgccgtctccagcatagtaccatcggccgcttaagtcttaaccatcgtgttcgggatgggtacgggtgtttcccctaagcgcatcggcaccagaatcttttcgtctttgaaacacaagactcaacagtatctaaaacccttacttcttcttccttagaaaggaggtgatccagccgcaccttccgatacggctaccttgttacgacttcaccccagttatcagtcccgccttcggcagctccctccttacggttgggtcactgacttcgggcgttaccaactcccatggtgtgacgggcggtgtgtacaagacccgggaacgtattcaccgcgacattctgattcgcgattactagcgattccagcttcatgcaggcgagttgcagcctgcaatccgaactgagacgttatttttggggtttgctccagatcgctcctttgcctccctttgtttacgccattgtagcacgtgtgtagcccaaatcataaggggcatgatgatttgacgtcatccccaccttcctccaggttatccctggcagtctccccagagtgcccaccatcatgtgctggctactaaggataagggttgcgctcgttgcgggacttaacccaacatctcacgacacgagctgacgacaaccatgcaccacctgtctccactgctccgaagagggacaccggttaaagtgttttcagtgggatgtcaagacttggtaaggttcttcgcgttgcttcgaattaaaccacatgctccaccgcttgtgcgggtccccgtcaattcctttgagtttcattcttgcgaacgtactccccaggtggaatacttattgcgtttgcggcggcaccgaagggctttgccccccgacacctagtattcatcgtttacggcgtggactaccagggtatctaatcctgtttgctccccacgctttcgagcctcaacgtcagttacagtccagtaagccgccttcgccactggtgttcctcctaatatctacgcatttcaccgctacactaggaattccacttacctctcctgcactcaagtctaacagtttccaaagcagtaccggggttgagccccgggctttcacttcagacttgctaaaccgtctacgctccctttacacccagtaaatccggataacgcttgccccctacgtattaccgcggctgctggcacgtagttagccggggcttcttagtcaggtaccgtcattttcttccctgctgatagagctttacataccgaaatacttcttcactcacgcggcgtcgctggatcaggctttcgcccattgtccaatattccccactgctgcctcccgtaggagtttgggccgtgtctcagtcccaatgtggccggtcaccctctcaggtcggctactgatcgtcggcttggtgggccgttaccccaccaactacctaatcagacgcgggtccatcttacaccaccggagtttttcacaccagaccatgcggccctgtgcgcttatgcggtattagcagtcatttctaactgttatcccccagtgtaaggcaggttacccacgcgttactcacccgtccgccgctaagtcaaatcctcttccatccgaaaacttccgaagatccgcttcgctcgacttgcatgtgttaagcacgccgccagcgttcatcctgagccaggatcgaactctcatgttaaatgattcgtttgatccggggtcaaaatcaactaactagctaatttatttcccgttttacttgttgtttggttcgtatacaatacttgtattcgttctgaattttctcattcaaagccatcaaacaatggcttgttttattagaattttcagggttttacatactgttcaatcttctgttttcaaagtgcgatggtgcatctgattccggtattgcatgtccggcacaaatgcgaacgcagaaggagggatttgaaccctcgcgccgctactaacggcctactccctttccaggggagccccttcagccgcttgggtacttctgcaattagctgatttcatttccttattaaattcagcggcaaacctgccaacggagaggatgggattcgaacccatgcgcccttgcggacaaacggttttcaagaccgcctcgttatgaccacttcgatacctctccaaacgtgcttttctattttaaaagatattcgcgcttttgtcaagcacttttttctctttttttcaacctctggaaggtttcaaaagcgggctgcatcagatgcaactcggctagtttaccattgattttgtaatctgtcaacagatttctacaattttttccagtttttttattttaccctttttccctctgttttatcccagttttcaacctgtaattcaacctgttttcattgatccaggcctggctgaccgaccgcacattttgaccttttccctctcccccttcctattcaagccgcataatcaattcttttttggcctctgccggtgtggagtatttcgtcttttcgccggtaatatagtaaattgcatcgttccaggtctctgtagtgtattcttcagccggaatctccaccagaacggcacggcattgaaccttgcgcttcgttccgcgtaaatcggataaatactgacagcccatcctggcacttaattgttccagtaaatctgttctgccgcttccttcacgtattttttccattgtttcacgctcctgttctgctgttattctggtatattttgaaaaatgtgttcgcatcatacatttaatactccatattgttaataatattgtaatcaatgcaatatgtcaagtgagtgattgcattatttgccacagatatttcattgaatgcaatactatgaaactggaagggggtattttatgtatatcgacttcaattttgcaaaacgtctttctgaactgcggacgcaaaaaggtgtatccgcgcgggacatgagtctctcactgggtcagaaccccacatatatccacaaaatagaaaatgggaccgcgctcccatccatgatggggttcttttatatatgtgagtatctgaatatcgaaccctctgacttttttgctgtggaccggccctgtcctgcaaaactaaaagatatcatggaagatgccggacacttaaaccgtgagcagctggaacatcttcatctcctgataaaggatctgctgaaggcaggacaaaaataagcctgaaaatgtgcatcctgcccggagggctttttgagatcaaaagaccacgttcctgcgatctcaaaaaagagtttgaccggtatcacgcggtcaaactctttttttctgacagactctgttgttttactccgtacctgttttatgaaatcatgtgcttccttctcagcagaacctccgccagatccatatcctccggtgtagtcactttgatattggaataatcacctcgtatcagttttacctttcggtccgtcatgctttccacgaccatggcatcatctgtcacaccggtctggtattcttcggttgaaagcagctttgagtatgcatcaaagatcaggttgtaatcgaatgcctgaggcgtctgaatctgccataagcggcttctgtccggagtcatgacggcaaattcatcatgatcggacattttaaccgtgtccttcaccggcattcccaccacacaggcaccgtaccgaccggccccctctatcgctgccgagatgatctcgccggtaagacagggccttgcaccgtcgtgaattaaaacgaggctgcagtcattcaccgctttcagcccttcaaatacagagtggtaccgctctctgccgccctccgtaatctttcggaccttttgaaagccgaacctttccacaatctcttttctgcagtacccggtctctccctgtccggttacgaggataatctgatcaaccggactgtcttcaaaggcttttaacgcatagtagatgagaggcttcccccccagttccagatactgcttctgaatatcgctttccatacgcgttccttttccagcagccagaacgatggcggccgtattgctgcactcccccatctccacacctccccttctcatttctgcccgtggtgcggaatttctaacgctctcccagcttcagattcggaaccgcgtttaaatcccagcctgcccgggcgccgttaatatattcataatacgcagcgacaccgatcatcgcggcattatcagtacagtaaacaggggacggataataaaaatcgatccccgccctgctgcacgcgttcttcatcccctcacgcagagcagagttggaagccacgcctccggcaatcgccaccttgtgaaacccgtattccttcgcggctgctatcgtatggctcaccagcacatccacaaccgcattctggaatgaggccgccaaatcaggaacatggatctcctcgcccatcatcttcgcatggttgatatgatttaacacagcggatttcagaccgctgaagctgaaatcgtaggcgttggcctccaccttcgcccgcggaaaacggatggcctgcggattgccctccttcgccgccttatcgatcttcggacctcccggatatcccagtcccacagccctggccactttatcaaaggcctctcccgccgcgtcgtctctcgttcttcccaggatttcgaactcaccgtaatcttttaccacaacgagatgcgtatggccgccggagacaatcaggcacataaagggcggttccagctccggatgctcgataaaattggcggaaacgtggccttcaatatgatggactccaaccagcggcttcttagctgcataagcgatagcctttgcctcggctacccccaccagaagcgcacctaccaggcccggtccgtaagtcacgcccacggcgtccatctcctccagcgtcatccccgcttccgagagcgccgcttccactacctggttgatcttttcaatatgctttcttgacgcgatctccggcactacccctccatagatcgtgtgaagggcgatctgggaggagataatgttggacagcacttcccggccgttcttcaccactgccgccgcagtctcatcacaggagctttcaatcgccagtatatagatatcttcctcagtgtgattctttttcatttcctctgcctcatcagtcttcatcgaattccagttccgcggtccatgcgtcctttgccgcctttgcccgcggaaagatctctcttaccttgtccataaactcctcaggcctcgtcagggaggggctgtaatgggtcagccacatctgttttggatttgcttcctttgccagtctggccgcctcatagaatgtcatgtgcttgtattccctggctttggcctccttgccgtcctcaccgtacatgccttcacagataaaaagatccgcgtccttcgcatattcggcgatcacaggcaccggcctcgtatcggtgcagtacgtaacctttaaccctctccggggcggtcccagaaccatatccggcgtaaatacctttccggcctcttccatggtctctccccgctgcaggcggctccagaatttctgaggaatctcatacgccttcgcacgctccacatcgaaccggcccgttctcggaatcgaaatcgaatacccgtagcataccacattatgattcacacggtatgcatcgatcacgtacggtcccatcttaagctgctccctcggctcgttgagctcaatgaatttcaattcaaaaggcagctccggagcaatcacgcgcagcgccgacaccacccgttccagccctcgagggccaatcatggtcaggggttccgtccgttccgcgttccccatcgtcaaaagaagtcccggcagaccactgatatggtccgcatggtaatgagtgaaacagatgacgtcaacaggcttcgggctccagcccttttccttcagtgcaatctgggttccctcaccgcaatctatcaaaaggttacttccatcacagcgcgccatcatggaagtcagccaccggtacggcaaaggcatcatgccccccgtacccagcaaacagatatctaacataaacaattcctcatttctttaaaaatgcctacctgagatcataacacaggttggtacaaataatcaagaggactttgcttcactcaattctgcagctgcagcccttccgcgcagtccggaaaaggggaggaacgggacagtgatgatttccggttccgtgattcgcagaaagacgggaaaatgaagttgtgaatgtaagccttcaagctgacattccagcgcatagcgtgcagccattcttccgaaattctgcaaagcctgcgcaagccgtccattttcccgtctttctgtcttaatttctgctgcctgggaaacaggaaatcctttgccttcctgttcctccccctctctggaccatacgaaaggcccggggcgctacctctccccctcattcggcctgtccgtccgcatattcacagaaattccttctgttcctccacatccaccggaatcttaaactcactgacgattgcgtcgtaacagggttcgcatagatcaaaatggtgaatctctccatccttctccgaaaagaaatcccatgcgtgattcaagcttaaaacaccttccctcacgattccatccactacaatcaatttcttcccgcagcagttgcatacaaccgcctccagctggccgccgcttgtgtactttctcatcctactctcacctttcttcttcgcactttccggatttctccagttcgccgctctctgattttgcagatgcgaaaaggagcatcctgaccggatacccctacattataaacggtgccatggcgaaattttagtggtaaatgtttgaaatctcacggttccacatgatcacggcatcttccttcgggtccctgtagtaaccgctgcggatgcactcctctttaaaaccataggatttatataggcttctggccggtgcattgccttctcttacctccagagcgatggccgtgaccccattttttctggaattttcgaccacgccatccatcagtttcttaccgtacccgagaccccttaaaggcggacgcacgccgatccggagcagttccgcctctcctgcaatcgtacggaagacacagtatccgcaggcctctccctcctcttccaggatcagccaggtgtccagacccgttcggaaggaatccagaatcatctccggcgtccacggatcgctgaagcactgtgtttccatctctgccatacagtccatgtccgactccggaatcatttctctaagcatacaaacgctctcctttgtccactctctgttaaatcagtccggcttcccgttcccgctccgcctgcggctttcttaagtaatccggcgcgtgctcctccgccgtctcggtccgcccttcccgatagtaaatacagcccagagccgcgactgccgccgccctctgccggtttacatgcgccggagcaaattcgcagggaaccgtaatgcgctccgcaatccgttctctgtatacaggaactccatctcccagaaacactgctctgctctccattttgtttaactcatccaccagttcatcgatatccatggcgcactgctccctgacagccgaaaatccctcccggttgtcatagatcccggtatagacctgatttctcctggcatccatgatcgggcagaccaggccggcatagccgtacatgccgtaagccatagcgtctaccgtcggaatgtggataagcggcttcttaagcgccagccccagccctttccctgttgcagaaccgatgcggagaccggtaaatgatcccggtccgccggacacggcaatggcatctacggtttccaaatccagttccaccatacggacgatctcatccagcatgggcagcagtgtctgggagtgggtctttttaaaattcaccgtatattccgccgtcaccacgtcgtccgtcaccacagccaccgacgccaccagcgatgagctctcaattcctaaaatcctcattccagtccctccacagttatccttctgtaatcaaatcctttttccaaatccttttcgatcttcaccgtgatcacattctccggcaagatctcctcaatcaggccgccccattccactaggctgactccgtctccgtaaaaacagtcctcatagccgatctcatccatttcgctgatatcgccgatccggtacacatcaaaatggtaaaacggcattctgccgtcgtcatactgcttgacgatagtaaaggtcggactgtccacaggaccttccacgccgagcccgtcggcaaatccctgtgtaaataccgtctttccaactcccagatctccgtttaaacagtatacagaagacggctctgccgcctcccccagccttctgccgaacgcatacgtttcttccggtgtccatgtctctgttaccattgattctttcctccatgccgttttaccggctctgctgcctcttatatcttttttctccgctccgctggcagactctcccggaacagatccagaagctcttccttcttctcaccagtgatggaatcaggaagcagatacgcgcggactttccccatgtatacaataatcataccccggatccgctctacccgtccgatattttcccagataagctccagccgctccgttccctgagtcaccacgatgccttccctgctgaaggagagatccattggattctggataaccggacgcttcgactgcttcgccgccttcagatacaggagaaacggctgccacacggtaaacatcagcgcacagacaatcagcagtgcccggtacatcaccgtgttggatccccaggtggtaaccagcagaaagatggccgccagactgaagatcacattgaatatgcccagcattcctttattggaatggtacagggaaaatttccataagtcctttgctgtcagcttcaccgtaaataccagcgggctggtctgtaccatcaattccgcttccggctctgcctgccctgtctcgttctgctccaccggcgcttccttcctatcttccgttttcgcctgttccttctcccaacgctcctgttccataagcacctcctataatttcatcgtcagagcaatccgtttcttcgccacatccacgctgattaccttgacttccacgatatctcccacactgaccgcctccagcggatgcttgataaatttctccgacatctgtgatatgtgaaccagcccatcctgatgaactccgatgtccacaaacgcaccaaaatcgatgacatttctcactgtgccctttaacaccatacccggctgtaaatccttcatatccagcacatccgtgcgcaggataggcttcggcatctcatctctcgggtcgcgggccggcttttccagctcctttacgatatcctgaagggtaatctctccaattcccagttcttcggccagttttttatagcctgtgaccttcctgccgattccctttattccgccgtgggccagttccgccacatcatagcccagcctgtccagcagcttttgggctgcctcgtagctttccgggtgcacactggtgccgtcgagaggatttttaccgccctgaattctcatgaagcctgcgcactgctcatacgccttgggtcccagcttcgccacctttaacagctggtttctggacgtaaatgcaccgttttcctcccggtatgtcacaatattctttgcgatcgtcttcgtgattcccgagatatactcaagcagcgaggccgaagcggtgtttaaatccacgccaacccggttgacagctgtttcaacgactcccgtcagcgcttcgcttaaatgcttctgattcatatcatgctggtactgtcccacaccgatagatttgggatcaatctttaccagctccgacagcgggtcctgaagacgtctcgcgatggagacagcgctcctctgccccacgtcaaactgcgggaactcctcagtggccagcttactggcagagtatacggatgcgcccgcctcattgacgataatatactgaaccggctgctgcagttcttttaacagttccacgataatctgttctgactccctggaggccgttccgttccccacggaaatcagggaaacgttatatttctttatcagtttctttaaaataacctttgcttcctccaccttattttgaggtgcagtcggatagatgactacggtatccagtactttcccggtctcatccaccacagcaagcttacatccggtacggaatgccgggtcccagcccagcacgacacggcccacaatgggaggctgcatcagaagctgctccagatttttcccgaacacccggatggcaccgtcctccgccttctccgtcaagtcgtttcggatttcccgctcaatggcgggagcaatcaaacggtcatagctgtccgttatcacttcccgcagcacgggtgtggtgttggggttgtcctttacaatcacatgcttttccagataacggataatctgttccacaggagccagcacctttacggtcagaaacttctctttttctccccggttcagggcaagaatccggtggcccgcagtctttttgatgctctcctcgtactgatagtacatctcatagactgactccgccttctcatcctttgccgccgactgaatacttccctggctcatcgtcgcatttcggatatacgtccggtattccgcattgtcagagatccgctcggcgagaatatcactggcgccttccacagcctcctccgccgtagcgacgcctttctcctcagagatataatctctggccgcttccaggacaggtcccttcatctgctgaagcatgattaagtctgccagcggttccagccctttttcctttgctatggtcgccctcgtccggcgtttcggacggtacgggcggtataagtcctccaccgctaccagcgtggcagccgccagaatctgctgttccagttccggtgtcagcttctcctgttcgcggatagaagaaattacctgttccttcttctcttccagattgcgcagatagcgcagcctctcatccagatttcttaaaacctcgtcatttaaggatccggtcgcttcttttctgtatctggcaataaacggaatcgtgtttccttcatcgatcagtttaactgccgcctccacctggccgcggccgattcccagttcttcctgtagtgccctgataatgtccatgttctatccccttatgtcttaatacttgactcaatttaattattataattcatacagggaggttatgcaagacggttatctctgctgccggaaaaaacggttttattttattgtaaaatctggtatactgattttattctatttcttttctgctttggcagaatcatgcagctgttcttatggctgtctttctggaagttcttccggataatcctgttttaaccaattacatatgaaggaggctttacttatgactgttaaaataaaacagcactatggcggaataagtatgaatgagaacgcaatccgcaaactggcagacagtgatgaacggctgaacatccgtttactcaatgattttgcgtttaaaacgacgttccacaataaagcagcactgaccggtttgctcagtgcattattggatatcgatccagccgatatccggaaattagagttcatggattcatttcttccgggcgaatatgctgacgataaagaaggaatactggatgttaaacttttgttaaatggagaccggaaaattaacattgagattcaggttctgccgtttgccaactgggaggaaagaagtctgttctacttatcgaagtattttgttgaaggatttgagaaaggaacttcttataaaatgctggaggctaccgttcacatcagcattctggcctttccactctatgagaatgggacctggtactcgatcatcgaatttcgtgacagaaatacacatcggttatatagtgacaaaatgagcctgcgcgtgttacaattaagccagttatcgaaggcaacaccggaagaacggaagtcggaaatctatgcatgggcacagatgatttctgctgatgattgggaggtgcttaagaacatggcagagagaaatgagtacatgaaagcggctgtggaagaattagagaagatcaacgcggagaaggaaaaacgttaccactatctaatgcgtgagaaatgggaacacgacgaagcgaccatacgggactatgaacgaggtcagggcaaagcggaatccatattagaacttctggaagaattcggagagatacctgaacagctgcggactgttgttttagggcagcacgacacggatattttgaggatatggcttaagtatgctgctaaagcggaatctctggatgattttataagttttatacagaccagataagtattacctgtttagaaagggctgtgacacattttttctttcgtgccacagtcctttctaagtctgccgtccccctactggacacatggccattttcgtgctacaatcatacaatagcattcagaagaggtacttatacaatggaagataataacaataaaaacaacggcctgcttcctaatatgccgtcaccaggaaccctttgggcatcctggtcggtgtttttgggaggcctgggccttataggcaactgcatgtgcggtcccatctggggccttccggcaggcctgattcttgggcttctgggaattgcctgcgccgtgttgtccaaaaaaggaaaaccgtttacccagcaggcacagcttggtctgatcctctctattctggcagcggtctgcggactgctcatgacattcttcattattatcgtttacgatgtcatgggaacggacactatggcgggcaaatatttccgtgatatgatggaagcgctgcagaatccttccgcactgtttccaactcaatagcttttagcagattcataacagattaacagaaagagctcctgggggagcggaacatcttttccgattccccgggagctcttttgattttccggttcacaccttacttcagcagcggcagcaaatccacgccgcggaacaccagcatataattcttgtaaaaccagtttgccaccacgattcccgctccgatcagtataaaaagattataccgcctgatatgcagccacggtcggtgaaacatgcgggacgccccccaggataccaactccagcagaacgactgcggccccgtagagtacaagcggatggtactgaaagctcatgcgcagatcgccgtaaagaagttccctcacagctctcgttcccccgcatcccggacagtacagcccggtcagagagtgaaaggcacagggcataccaatgcccagcagtttttttataaagccaaagatctcattgatcattccgtcactgccctgatcagtcagccagatcgaacgcgtcatgaacggttctcatggcacggtttacatcctcttccccgatgagcacggtgattcggatctctgacgttgcaatcatcttgatattcacattggcgctgtagagggattcaaacatcttggcggcaacgcccgggttgctggtcattcctgcgccgatgatggagatcttcgccacgccttcctcacaggtgatcgtctgagccgtaagcacttcccggttttcattcagcagcgtcatggcttcctgcaaatccgttttcgccaccgtgaaggagatatcctttctctcttcccggccgatggactggatgatgatgtccacgttgatatggtgtctcgccagcaggttgaatattttaaaagcgatacccggttcattcttcactccgatcacggagatacgggccacattcttatctgcggccacaccgctaaccagcattctttccacttttgtttcctccttgatgatagtaccttccgcccttgtaaggctcgataagaccactaactgaactccgtaccgcttcgccatctcgacggaacggttatgtaataccttggcccccagagaagcaaattccagcatctcgtcgtaggaaacctcggtaagctttcttgcattgggtacaattctcggatctgccgtgtatactccgtccacatcggtgtaaatctcgcaggcatctgcatggagagccgccgcaagagccaccgccgtggtatccgaaccgccgcgccccagagtcgttatgtcgtcgtacttgttaatgccctgaaagccggtgatgattacaatctttctggcatccagctcgtggcggatacgttcggtatcgattcgttttaatttggccataccgtaggttgacgtggtatgcatggcaacctgggccgcattgagagacactgccggtacccccagggcgctcatggccatggacatcagtgcaacactggtctgttctcctgttgccagaagcatatccagctcccgtttgggaggattgggattgatctcatgggcctttgcgagtaaaccgtccgtggtctttcccatggccgataagacgaccacaacttcatttcctttttcataatcttcgatgcagcgtctggctacatgatagatcctgtctttatccgcgacggaacttccgccgaatttctttacgattaacatggatgcggtcctttctgaaaactgtaattacgattcacgaccgttcacggagtgagcagcaacaaactttacacttccgctctgatccgctgtctgattccggacagctccttcgccttcttctcatactccgcttccgtcatgacgtctgtcagcacagcgaattcgtccatatgatccagttcaataactgaaacatcgccgaataccttctgaacttccgccagtctcgtctcggcaattcccttgatccggataaagaagcggcaggaggaggtctctatgggggcaataccaagccggctgtcatcccagcccatttccacatggcggtctctgttctgaacagcctctataatatcggcaatcaccgcactggccgtcggaagcattcccgcgccgctgccatagaacatggacgtcccaagcatattgccctttactaaaattccgttgaagacatcactcacagaatagagcgggtgctctttgccgatcataaccggagctacccaggcgtgtatctcaccatccttcatgcggctggagccaaacagcttcacagaagttcccagcttctccgcatacttgaaatccacatctgtaatggaggtaattccctctgtgtgaatatcttcataatgaacctcatggccggtcgccatggcggtgagaatcgcgatctttctgcaggtgtcgtggccttccacatcggcttccggattcctctccgcatagcctaagtcctgggcctcctttaaagcggattcaaaagtctctccctctttatccatctttgttaaaatatagtttgtcgtaccgtttaaaataccggtaatctcttcaatctcctctcccgcaagagaagtatacagcggacggataatcggaatgccgccgcccacactggcttcgaagaagaagttgacatttttttccccggcaattcttaagagttccgtgccatacgctgcgaccagcgctttattggaggtagctacatgcttccccgcctccagacaggcctttacgaaggggtatgccggatttaaaccgcccatggtctcgattaccatggttacctcaggatcattctcaatgactgcaaaatcatgaacaatcttatgctctaccggtgttcccggaaactcccttaaatcaagtacatattttacatcgacgggttcgcccgttctcttagcgatggtttcgcggtttttttccaagatctctaccacaccggaaccgattgtgccgtaacccataactgcaacatgaatcataattatcactccctggctaatatttttacgtagtgaaccccgtgtttctcttccatgtcctctaccatcctggatacattgcccgtgctttccaggacttccacgcttaaggtcagcgtagccaccccgtttaccggaatactctgatggatcgtcaggatattggcatggtacactgccacaatatgcagtaaatcggataataatcctggctcatcgtccatctgcatcacgagtgtgatggtctttcccttcgcgttatcatagaacggaaagatatcgtccttatacttataaaaagaactgcggctgattcccacacggtcagtcgcctcctgaacggtaatgacccgctctgattccaaaagcttctttgcctcgaccaccttcagtaatacttccggcacggccttctgcttcaccacgaaatatttgctcttttcttccataaaaaaatatcttcccttctgtgtccgcaatagaaatacatctgtgctcatagggaagatattatcatatttatgcagggtatgcaactattttttataaaaattttagaaatgcctgttttccggatttactctggtcctgtactgtcattcgctttcgcccctgtgctgatccagcgtaagtaggcgtagataaacagatccagagcaccgtccagcacactattcacgttgccggtctcggcattggtccggtgatcctttaccatggtataaggctgcaggacgtaggaacgaatctggttgccccagccgatctccgtcacgtctccgcggatgtcggacagcttctccgcattctcctgctgctttaacatatacagcttcgccttcagcatctgcatggccttatccttattctggaactgggaccgctcattctgacactgcaccacgattccggtcggaagatgagtgatgcggatagcggatgaagtcttgttgatatgctgaccgcccgcgccgctggaacggtacgtatcgatcctcaaatcctcttcattgatgtccacatccaaatcctcttcaatatccggcatcacatcgcaggacacaaaagaagtctggcgcttgccggccgcattaaacggggaaatccggacaagcctgtgaacgcccttctctgactttaaatatccaaaggcattctctccgttgatctgaatcgtgaccgacttgattccggcctcctcaccatccagataatccagtacctccacggaatatcccttcttctcagcccagcggcagtacatgcggtaaagcatgctgcaccagtcacaggactcggtgccgccggcgcctgcattcagcctcaaaatggcgttatcgctgtcgtattcgccggacagaagggtattgatcctcatctcttccagcttatctttaaattccttcaacatctcttccacttcaggaaccacagacgggtcgttctcttcattccccatctcgatcatcacgccgatgtcctcatactgctgttccagatccttatagccatttacggtgtcttttaagttcttcgccagctgaacgatcttcgtggacttttccggatcttcccagaagcccggttcctccatggatttgtcaagctcatcgatcctctttaacttattatctaagtcaaagtgaatccctcacttccactaatggtttttcaaacgtagataattcatatttgtactggtctaactctaccactgtgtcacccactttcttatattaaatttatttataaaaagggtccaacctgtgtcctttcgtcggttgaaccctcttcattcaaaagaattactacagacgcctataccaccttacggccgcagcactgtttatacttcttgccggaaccgcatggacacggatcgtttggataaatcttggtttcgtttctcttaaccggcgccttggcagcgctgtcgtccttgttggttcccgtaaccttggctgcaggctctctctccaccttctgctccacgcggatatgcattaagattctgacggtatcttcgcggatggctgccgtcatctcatcgaacatctgataaccgctcatcttatactctaccagaggatctctctggccgtaggcctgcaggccgatgccctggcgcagctggtccatatcatcgatatgggacatccacttgttgtcgatgacctttaataagatgacacgctcgatctcacgaatctgctccgcatcagggaattccgcttccttcgtctcataaagcttgatggcttcctctttcagcatgtgcttcagttcgttcttcttaatcttcttgtcttccggaagaaccaccggcttgatcggaacgatcggaagaagaagggtattcagttcacctaaatcccactcctccggcatctgctcgtcagtaatggataaatcgaccgcattctctacaatgtcagttaccatctttaagattacgtcgcgcatgttgtcgccgtccaatactttccggcgctctgcgtagatcacctcacgctgttcgttcatcacctcatcatacttaagcaggttctcacgaatgccgtagttattggtctctatcttcatctgagccttttcgatggcgttggaaagcatcttatgctcaatctgctcgccctccggaacgcccagcgccgtgaacatgttcatcagacgctcagaaccgaagagtctcattaaatcgtcttccagggagatatagaatctggaaacacccgggtctccctgacgtccggaacgtccgcgcagctgattgtcaatacggcgcgactcatggcgctcggtaccgatgatctttaaaccgcccgcagccttagcctcgtcatccagcttgatatccgtaccacggccggccatgttggtcgcaatggtaactgctttgtgaacgcccgcatcagctacgatctcggcctccagctcatgatactttgcattcaggactttgtgcggaataccgcggcgttttaacatgccgcttaacatctcggaggtctcgatcgtgatcgtaccgaccagaaccggctgtcccttcttatgtgcctcttctacctcatcacagactgctttgaatttttcttttttcgtcttataaaccgcatcctccatatcaatacgggcaatcggtttattggtcggaatctcgatggcatccataccgtaggtattacggaattccttttcctcggtcagagccgtaccggtcataccggatttctttttatacttattaaagaagttctggaacgtgatcgttgcaagcgtcttgctctctcttctgacgtttacatgctccttcgcctcgatggcctgatgcagaccgtcggaataccgtctgccgggcataatacgtcctgtaaactcatcaacgatcagaacctcatcatcctttaccacgtaatccttatcacggaacatcagatagttggcacggagagccagaatgatgttatgctgaatctccaggttttccggatcggataagttctcaatgtggaagaactgttcaaccttgtccacaccctgttcggttaagttgacaaccttgtccttctcatcgacgataaaatctcccgtctcttcaatctcctcgcccatgatggccgccatcttggagaattctccggatgcctcgccgcgctccaactggcgggccagaatatcgcagacctcataaagcttcgtcgactttccgctctgtccggaaataataagcggtgttctcgcctcatcgatcaatacggagtcaacctcatcgatgatcgcgtaatcaagttctcttaataccatctgttctttatagatggccatgttatctctcaagtagtcaaatccaagctcgttgtttgtcacataggtaatatcacagttatatgcttcacgcctctcatcagaggtcatggagtttaatactacgccgaccttcagtccgaggaattcatgaactcttcccatccactccgcatcacgctttgccaggtagtcgttgaccgtaacgatctgcacgccttttccggccagtgcgtttaaataagccgggcaggtcgataccagagtcttaccttcacctgttctcatctcggcaatacgtccctgatggagtacgatgccgccgattaactgtactcggaagtgttccatatccaggactcgtcttgccgcctctcgaaccgttgcatatgcctccggcaaaatatcatcaagggtctcacctgccgccagcctttctttgaaaagtctggtgttatccctcagttcctcatccgtcagtgcgatcatcttcggacggagtgcctctatcttatctacaatcggattgattaactttaattctctttcactatgagttccaaataccttttgaacgaggttcatgattcattctcctactcttcttactaaataaacacagtataatcctgtatattgtagcactaactcatttttaattcaatgaattcataaaaaattaacattctgataatagttctgttacagtctgctccctgtccggtgccccagagacctccctggctcctgcccttcccccgtcatgaggacaccacaattcgacaaaatccttgtacattatggtaaacctggcaagttgcacaaaaaatctgttcgattttccacttatccacattatccacattttcctgtgcacatttcccccatttttatccccaccaacaaacccaatatttaaggcaaaaactacttatacaccgagttatccacattatccacatcttttcgccagaaatctcctttttccaccagacatgattttccccttttctttttgtgtacttgtcataaacttacttatttcgacaaaaaatacaatttttcccttgactttttcagaccccaatatatagtttttcaatatttggggcatatataagtagaaacattttacaaaaaatttagattaattgtcttgatattttcgtaacataattgaatttttcaaataaatatggtatactgataacatctcaagaaaaaggagctgaagacttatgcgttttacaattacaggaagaaatattgaggtaacacaggggctgcgcgaagcagttgaggacaagctaggtaagctggaccgtttcttcgcacccgcgacagaagctgtagtaagactcagcgtacagaaagatattcagaaaattgaagtaacaattccggtgaaaggacatataatcagagcagaagaatcaagcagtgatatgtacgtttccatcgatctcgtagaagagatcctggaacgtcagttaaaaaaatataagaacaagctgattgataagaaacaatccgcaccttccttctcagaagccttcttacaggaagacgcttccgcagaggaagaaatccagattgttaaatccaaaaaatttgcagtgaaacccatggatccagaggaagcctgcgtacagatggagcttctcggacacaacttctacgtattcttaaatgcagatacagaagaggtaaacgtggtttataagagaaaaggcggaacatacggactgattgagccggagttctgatcgaagataagataaaagcaggaaacagaaaaggcggccgcaccagtgatcgaaccatcaacggtgcggccgccttttctgttatttaaaaattagcggtaaggtaacgctccacgctggtgatggcgttcgctccatccgccacagctgtggatacctgccttaactgtttcgttctcacatctcctgccgcgaaaataccgggaacagatgtctcacaatcctctcccgcctgaatgtatccgtgatccatctccacaaggccgtcgaacgcactgctctggggattgattcccaccgcaatgaacacaccgtctaccggaagttccttagattcctcggtcttgacattcttaagcgtgacagactccacctggtctttgccgttaatcttctccacaaccgtatcccacagaacttccacgttatccagagaaaacagctgggtctgcagagtcctggcaccgcgcagttcgtctctgcggtgaatcagatacacctttttgcacattctggaaaggaagatcgcatcctcgatggccacatccccgcctcctgtcacagcagtcacgcggttgcggaaaaatgccccgtcgcaggtagcacagtaggacacgcccataccggtcagttcctcctcacccggcactgccagcttcctgtggctggcgccggtcgatataatgacagtcttcgccgtatagctctcctcttcgcaggttacggtaaagaggccgtctgccttctccacgcgcaccacatcgtcggtcacaaactctgctcccagcttatccgcgtgttcccggaacttcattcccagatcgtatccgttgattcccggaagtcccggatagttatctacctcatacgtgttgagcacctgaccgccgctggcgatctccttttcaatgacaacggtctccagttccgcacgtttggcatagattgccgccgtaagtcctgccggacctgaaccgataattaccacatcgtaaatcttttccatctgatttccatccttcctgtatcatttcttcctccgcggcacgcaatcacccgattccggccgcctggaatattttatttgtcatgaaataattcatagtctcattatatcgcactctcttccaagtatgcaatgctttcttttgtgacaaagtcaccggagttgataaccgaatcctattgaattaaaaaattacctttggtaaaatagaagtgacggaagacgggatcgatccggcttaccaggatgaaaagaaagggtgagattcatggcaaaaaaaacagtgctggttacgggcgcttccagaggaatcggaaaagccattgcggtaaaatttgcaaaaaaaggatataatgtggtaatcaactgccttcacagcgaggagaggctcctgcagacaaaaaaagagctggaaacgtatcagatttcctgcctcgcctacatgggcgatatgggcgacatggaacagtgccggattctgttcgaccagatccggaagcagtttggaacgcttgacgtcctggtaaacaacgcggggatttcctatatcggcctcttacaggacatgagcacggaatcctgggaccggatcatacggaccaatttaacctcggtcttcaactgctgcaaactggccgttcccggtatggtggagaagaagcaggggaagatcatcaacatttcctccgtatggggcgtctccggcgcttcctgtgaagtcgcatactcggcgacgaagggcggaatcaatgcatttaccaaggcgctggccaaggaactggctcccagcaacgtccaggtaaacgcggttgcgtgcggcgccatcgatacggagatgaaccgtttcctggaggaggacgaactcatcgccctgatcgaagagatccccgccggacgccttgggcaggcggaggaggtcgccgatctggtctaccacctgggatataagaactcctatctgaccgggcagatcattggactggatgggggatggatttagaagtgaatggcaaaaggagtactgcggcaaatcatgtgcgcagtactcctttttttactcaaacaagtctccaagtatctccttctccgcaaataacgcggtagccccgcccgtatgccagaacaccacactgcttccggccggaacctttccggtcctgatgtaatccagcatgccggcaaaggcctttcccgtatagaccggatcagtaagaagcccttccttcaccgccagcagcttaatcgcttcggatgccgcctcgttggggatctcatagccgggcagataataatttaaatcagtatggatatcccgctccgcttccaccgtgattccggctccaatcagctttaagctctcattggccagtgcggccgtccggtttggatactccggatctttcgcgctgacattgatggagataatctcagtccctgaaccgaccagatttcgtcccgcggccagccccgccatggttccgccggttccggtggcatggaagacgtaatcagcccggaggcccatagcggacagctgtttctccagctccacatagccctcgatgaatcccacggaccccaccggactggctccgcccatagggacctcatagcagatacaccggcctgcttctttattcagacgggccatgtgttccctcgcaagaataactgcgcgttcttccgcttcctcctccgtctctccctccagaatctccacgatatggacctccgcatccaggatgcggtccagaagcagattggcccttaaatcgtcctcgtccggcttcacaatggcaaccagatacagcaccggctttaagccacagcgccggcatgcggctgccgtctgcatggcgtggttcgactgggtcgccccaaaggtaaagacatattcacagccgcagctcatggcatcccccatcagatactgaagcttgcgcaccttatttccgccaaacagattcataccggtgaaatcgtcgcgttttatataaagattcactcccagttccttcgaaaggcggtccagccggtaaaacggtgtcggaaagaatcccagctctgcctttggaagcttttcaaatagtttctccgcctctttaactgacatactcattatttttttcctccttccattctggcaagtatctttttaaaagatacgctgaacatggtgactgtaacacaaaccgcgcagaaatctgccacaggttcagctaagaacacacccatggtctgattctcgacaaagcgcggaagaatgaaaatcagcggaatcagcaaaaacaccttgcgcagcagtgccagaaatacggatactttggcatttcccagagcgataaaggtctgctggcacgccacctgggcgccaaacatcagggaagccgccatgtaaatccgaatcgcccagtgtgtatattccgtcagcgcagcatcgctggtaaaaatcatgatgaaaatctgagggcagaacatggagagcgcccacagcagcgtggaataaccgatacagcagagaaacaggattttaaaagtctttttcactcgttccgcattccccgccccgtagttaaagctgacgatgggctgggagccctgtgtcagtccctgcagcggaagcatggaaaactgcatgacgctgctcaatatcgtcatggcgcctaccgccacgtctccgccatagcgaagcagggaagaattgaagcagacagacagaatactttccgtaaatgccatgataaacggggaggtacccaatgccatgcagggaagaataacgcctgcctccagttttaatccctttcttttaattcgcagcgagctcttctccgaggtgaggaaacgcagcacccagacagaggagaccgcctgggaaaggatggttgccagcgcggcccccttcacgcccatattcaggccgaatataaagatgggatccaggatgatattgcagacagcgccgatcagcaccgtatacatactggttttggcatagccctgagcggtaataaacgcattcagtcccagtgccagctgcacaaagatggtacccagcgcatagatcttcatgtaatcccaggcatatccgatcgtattttcactggctccgaacaacagcagaatcgaacgcccgaacaccagaaataccgcagtgagaatcagggcaagcaccaccagcatcgtcgtacagtttccaaggatcttttccgccttgtctttctcgtttctgcccagcatgatggaggaacgcggcgcgcctcccatgctgataaaataggcaaatgcagtgatcgccatgatgaccggcatcgtaacgccgacccctgtcagcgcggccgccccgactccaggaatatgaccgatatacatgcggtcaaccatgttgtacatcacattgatcacctgtgccgcgatggcgggcatagacagccggaaaagcagcttccctacactctcggtacccagttcattctcttttcccttatttggttccatttatttcattcctttcaagatattgtcgagattttcattgatcaccttcgtcgtgcgcgccatggcctccatatcctcctgaggcacgccggcatacagctttcctgcaaattcctgacggcattttctgagtctcgccacaatgtcatcgctcttatccgtcagggacagatggatgagtctcctgtcttttaagtcctttcccgctcttaaatagcccctttcgcacagtgtctctacggattttgccaccagccccttggaaatgttgcggaaatgggcgatatccgacgcgctgtcattaccgggattgttggccagaaacatcagcaccacgatctcgttgggagtaaaacagtattccgcaacttccagggcacacaattttctatataccttgtctatctttgcatagtaagcaaagtagccctcatctttctgttccatgattttacctttctaaaattgttcatttttgaactgttcacttttgaattatatacaagaaaaactctcctgtcaaggaaaaagaccccgtcctcccgacggggcctataatacggccgtttgtcgggaaaacggagtcttcctgctgttttattttattccttttaaattaacattttccccgtgaccggaattccgcctctgtcaatgttccagaccttccgcatttcaagaagccgttccacctgctcctcatggagcgtggcgctgcttcccagcatattcagatacaactgaatcctggcacactgttccactgattccataaaataaaaggactgatatacatcttttccccagctcagcgcaccgtgattcgccaacaggacgctgttgtaatcatgaataaacggagcgatggattccggaacctcttccgttcccggaagagcgtaaggtgcgacaggcacaacccctactgccatcacggcctccgtcaggatcgctctgtttaaagggattccagccgcagaaaatgcggtggcaaatggaggatgaagatgtgtgacaccgcaaatctccggatcctcccgatagattctcaagtgcatcttcatctctgaggaaggcttcccctcagacagcacgctgccgtctaacgcagccttcaccatcatatcgtccgtcatgtatccttttgacacgcctgatggagtaatcaaaatagtatcctctgaaattctgcagctgatattaccgtcattggctgcaacgtacgcacgctcataagaccgccttcccaggtccgtcagcactctcctggcttccttttctgtcatatatcgcataatcactgccctcccacttctattacagccctgttcttcctgattcgcccgatcagttcaatggtaaactgaatcatataaccgtttaccaccatagatacgacagtagcgccccccagttttcctcccagaagaaagcccgtgatggaaagcagaatatcgatggagattcttgtcacattcacattctttttcagctttccggataaatacatcatcatggcatccattcccgcttcgccaagacctgcagctacgtatgtcccgattcccacccccatgagaatcagccctgccagaaggcacaggagacgctctgcagcagctccgcctccggtgcagatcatcggagaaaaccatttgataaatgttcctacaagcacgctgtttaagattgagcctattccaatccgttttctgtcgataaagaacaggaggataatgatggagatcatcaggacctgagatgtcgtccccaaagaaaggtgcagcacacgtcccagtcccgcctgaaacagcgacagtggatccagcccaaagtctgcctggacgaatagatcaatgctggctcccatcatcatggaaccaacgataaccatcagaatttctttccattttttaatcatattatttcctcatcgcgcaaccgcttcgccgcagcgccttcttacagcggcttcagcatccggatatccggcacacagtgtttctgcatcaccgtgttcgtagtcttccggcaaatatgccggagccatcgttgttcccaccagacagtatttgcctccatgagccacaaccgatccctgccagacacctgccggaacacgaagctgcgggacttccccttcagacagacgtgttcccaaaacttttatttctgcagttccatccggatacaggagaagaagttccaggccatcacccatatagtaatggtagatttcatccgttttcagtctgtgcatatgggaaaaagagcgttccgtcaaaagataatagatggaactgtaagactctcttcccgcagaatccttttcgccggcatagagataccggtacatgcctccttccccagccagcggtacaagcttcagttcattaattatggattctatcattcaaccacaacccactttccctccgaatccgcactttcaagcattgcattacagagtttcacgatgtctctgccatcgaaaaaggtaggataaaccggtgcttccgacacacaaccacgctttacatcttcataaaaactatccacaagactccggaatgtatccataaaaccattgccaaacccaaatatctccgagtttacaccgcttcctttggatgcggtgtttaaaatattgttatcctctgaattccaccacagatttttcttttcccctgtcacttccagtgtgatccggttaattctcccctgagacacttctgataagagcaccgttccgattgccccattgtcaaatttcaaattaatagctgccgcatcctcagagcagacttctatcgtttccttccgtttcccatcgccagaatcaggatacatcgtacggtcttccacatacctctttggataaaaacgtccaaagttggcggaaagagctttcaccttccggccggaaatatactgggctatgtcaaaccagtgtgttccaatctctgtcaccgcgcgcatccggcctgccagaacaggattgtagcgccagtcaacaggcgccggaaacgcgttaaactcctgtaaatagtttccgtgtatcatattgacgcggccaaattcttccgattccaccagttttctcgccttctgacacgccatatggaatctgacattaaaattaatggcacatactactccacactctttcgcgcgtctggccagttcttccgcctggctgtcatcaaagcacagaggcttttcacacagcacatttttcttatgatccaaaagcttcattaccatatcataatggagattaggcggtgtacatacatggacggttgtaatctcatcgtccagaagaatcgaagaatcagttccccatttctcaatagaaaattcttcggcaaatgcctttgccttttcctcactgacatctacaattgctccgattttaatcccgctggccttcagcgcctccgcatgagtatgcgcaatattgccggctccccagatacctgtcttcatattttccgcctccttacacttccaccttaataatgctttccagcgcgatcataatctcatcttccacagccttcgccatcttctccggataatgatcaaactcctcagatcctacaaattcaaaacacggaccatctgccgccacaatacagccggcttttatccctctcaccgaagcaataacgaagagaacggacgcttcattttccatcgccagaactcctgcttccgaaaacagacggttattggtaggcatcagacccgtataaaacagacccgatgtagtgataatccctgttctcgcatcaggattaatttcttttgccgcttcctgcatggccgctactacatccatagacgcaactgcaggataggaaatcggaatgaactgtggcgtaattccatcatcccggcacgcagctgtggcgataatcagcgcaccctgaggcatatctttttgcagggtcccacaggttccaacacggataatgacttttgctcctcccagaatcaatccttcaaagcttacagaggccccgtttccgcctacgccgtgggaagataccgtcacgggaacgcccttgtaggttccattaaatgtccagtattcccggctctttgccactacttctacatgatccagccgttttgatattttttctgcccgtgcagggtcgccgcaggcgattactcttgctgcaatcttgttatagggaatgtctattattggtacaatcttttccatttttttcattttcctttcttatcaggccgctgccgcccttctcttatccaccatcttcttgtaagaataaatgaccagtacaattactgttacaatatatggaatggtactgactaattccgtcggaatccccatgttctgcgttcccggatttaccgcaaaggcatctgcaactccaaacagcagacagacaagcagtgtcggcaccggtttattacctcccagcgaggcggcggcaatcgcaataaatcctcttcctgccgtcatgtcttttacgaaatacgatacgtagcccatggacatataggcgcctcccatagcggccagcattccgctgattgccagcgcaatatattttacctgcagcacatgtacgcctacagactccagcgcttccggattttctccacagcttctgatgtgaagccccagtgatgtcttgtacaggaatatggtaagtatggcgatcagcaggagggccgcatacgtcagtacattatgcccggatatcacggttcccaggactggaatgtccttgatccacggaatattcacctgaggaagcacaccgctttttaaggatgaagaaattcctttttcccctactgccaggtacagaagaaacaccgtacctccggcagccgtcaggttataagcaatacccgtgatggtcggatccgtcttaagctttgtaacaataaagcacatcaagattcccagcaatgcaccgacaagaacggctgccgtaaagccaaggaacgcattccctccaaacgctgcactggccacaacaccaatcagggcgcaggtcagcatcattccctcgatcccgatgttcgtaacacctgctaaatccgccaccagatatgacatggaagcatacagaatcggcgtcgtcatgcggataatcgaaaacaggaagctgaccgatgtaacaatctccaatatcttcattttgctcctcctttacgcgtcagccgcttctcttgtcatttttacagtcagtttcttcttataaccggcaaggaaaccggtagctgctatcaggacgatgataacaccctgaatgatggaaaccacttcgttctgcacatcagttccacggctcattatatcggacccgattctcagataagccaaaaggaatgcgcccgcaggaacaaacttcggattatttctcgcaatgatagcgatgatcaggccatcccagccgtatcccgaccgccattcccagttaaaacgctgctgagatcccatcatatatgccgctccgcccagacctgccactgccccgccgataatctgagacagcagtatcgtccctgtcactccaattcccgaatactttgcaaaatttttattctccccgcacatacggatggcgtaaccccatttcgtatggtacaggaagagccacgctgcgactacaagaattaccgcaatcacaagccctaaatggattcctctcgtaaattcaaacagccttgccgtcttcgcgaatttcagagaagccacatgcgtgcttttgggatctttcatataagtctttaaaagaaaatccccaatatagaaggtaatgtaatttagcatcagagaagatacgatttcattggcctcaaactttaattttaaaacagccggcagaaatgcaatcagcgctccggcagcaaggccggcaaacagagcggtaaaagcgtgaactcccggccccatcttaagcagggtagccaccatggcagctgccagtcctcccgcatagaacattccttccacagcaagattgtaaaccttcgtctgaagaatgaaggtaactgccagaccggtgaataacagcggtgtcataagctcaataatattggcaatataacggaatgaggtaagtggagccacaaagaacttgtagatagcctccagaggctggctgcttaccagaaagataatgataaccgcaaatatcacggcgatcccgatggccagaagagttctcaacagctcaaaccgggacatgattttattcttattcttcacagcaggccctccttaagtcatcctccggctggttcttaacaccaagcatgtaataccccagctcttcttcactcatttcctttgcctgagggaaatatccggaaattcttccctggcacataacaataatactgtccgagagttccagaatttcattaagatccgcagaaaccagaaggaccgcacagcctctgtcacgaatttccacaatctttttatgaataaattcgatcgcccccacatcaacgccccgtgtcggctgatctgcgattaaaatcgacggttctgtggaaaactcccgtgctacaattaccttctgcatatttcctcctgacagcataccaatctcatcgagaggacttccgcagcgaatatcgtaatcacgaatgcctgcctcaacccagcggtcgatcttctttttattgagaaacagtccggaatttacctgatcagaatcacaaatactggaaatcatgttctcccgaatggtaacgtggcctgctgccccatagaccatacggtcctccgggatataggacatcccctttcgcctgatctccttaacagaacagcccgccgttcgttctgcaccgatcagcacttctccatttcgtctgtccagatgcctcattccggtaatcaattctaccagttcctcctgaccgctgccctccactccggcaattcccagaatttctcccgaacgcacagaaaatgaaactcgatccagcacctgacggcccacttcattcttacagctcaaatttcgcacagacagtctgacttctttcggttttgccggttttttttctaccttcagtatgatatcgcggcccaccatcaatttcgatatatcttcgaccgtcagtcccgcaacatcataagtacctacgcttttgccatggcgcatgatggtaattctctggcatatctccttaatttcattcagcttgtgagaaataaagatgatggtaagaccagcttccctcagcttgtttaactgctcaaacagttcctctgtctcctgtggagtcaaaactgcggtgggttcatctaaaatcaacagttttacctctcggtacagcgccttcaaaatctctaccttctgtttctttccgactgacaaatcactgacggctgccgtcggatccacatcaaaccggaatcgctcagaaagtgctctggtgatttcaaccgcctttttccggtccagaaaaccgttctttttcggttcttttcccaatacaatattttctgccacggtaagagatggcaccagcttaaaatgctggtgtaccatcccgattccaagccgcagggcatcattagaggaagcgatctttaccgtttttccgtccagttgtatcgtgccttcatccggttgctgggttccaaacagaatcttcataagtgttgattttccggctccgttttcccccatcagcgcatgaatttctcctttatttacagaaaaatccacatgagagttggccaaaactccattgccgtatacttttgtgatatttttcatgcttaaaatttctctggccttctccatccgtatcacctctctgcgcttatggctgaacctcgcccttcagcgatgcgatttcctcatctgtcatatcaaatgcgcttttgatttcgaccttcccgtcgatgatattctgcttcgcctcagctaccttttctcttgctgctgcaggcacgttcttctgataccagctattgtccgtgatttctatgcagccgtctgacaaaccatacgtctttacagtaccgaattccagtttcccatccaggtaatcaccaacggccttctcaatggaaatatcaacacgttttaaaatagacgcatatatggcatctgccttctctgcatcgctggagaatagttctgactggtctgaatctgttccgatcgcatgattgccggtctccttagccgcatctaaaactcccagacctgcaccgcctgccgcttgaaatacgatgtcagctcctgcatgatataacgcgattccaatctctttacctttggccgcatctgtaaagctgttcatataacctgtgttaatcttgatatccgggttaacagtcctagccccctctatgtatcccaccagccagtcattaatcagaggaatatcgaatccgcctgcaaatcccaactgcccggttttcgaagcggaagctcccagcacaccggccagataaccgccttcataacacttataggtcatacaataaatattggaattggctccgtctgaaaagtctacgctctcatcgtataagataaacttctgatccggatactcctcagccgcttcctgaagaggctgggaaatattgacgcctcccgtaatgataatatcccagccctcatggatcacatcttccagtgtagcggaatatttagtgatatccgttcccatctccactacctttgtgctggcaccataatgatcctcgatgagtgccagtcctgcattggcggaatcaaagaaagacttgtcccccagagttcccggaacgagaagaagtacacttaaatccccgtccttcttctcctcgccaacagatgcctttgtcgatacgctctccccagccgtatctgatgtctttgcgcttccacatcccgcaagcatgcctgccgttaaagctgccgttaaacagattgcccatactttcttcatgatcgtcctctccttctccttgtgctgtaccttatcagacacagcagatacgtttattgttctttctgcattcttccgcaaattctgttacatattcatcatccgaagcatctacaatcagctccgtaatttcctccaggccacagaccctgtaaaaggccctgctcgccagcttgtgatgatccatcaggaaatagacttcctcgctggccttaatcatcgccttcttaacctccgcctcatcacgcgtagcgtcggaaataccatgcttctcatccaccgatttggaagaaagaaatgccttatccacataatagttatccagcatacggactgcttcgatccctaccagagacatggcgctctttcttaaacttcctccgatcaggattacgtcaattttctctttgtctttcagtttcatgcagatactgatgttgttggtaattacagtcgcatgaacctctaaataatctgccatggcatacaccgtactgctggcatccataaagattgaatcaccttcatttaccagggatgccgcatatctggcgatcctgtccttctcctccgagtgaaatttcacccgtttgtccaccggatcttcatacgtacctccgggaatgcttcttgcacctcccagcactcttaccaggctgttatcctcttccagcttctttaaatctctccgaatggtcatctcagacaccatcagcgtatcctttaaataagtgatgtctacgaattcattctcttttacgtaatccagaataaatttttttctttcttctgcgctaaatgttttcatacctgcctcctttcaagtgaacgccttatttccggcgtttccggtcgaaatgaaaggcagcttcctttcacctcttccctattttttcatcagtatctttaaattgtcacggaaaggagggtaaacaatccctttctccgttacaatggccgtaatatattcggccggtgtcacatcaaatgccagattgtatgtctttacctccttcggggcgatatattccccattaatgcaaagaacttcttccctgcttctctcctcgatcgggatctcttttccagttggacactccatatcaatcgtggtcgtcggtgccgcaatatagaccggtacatgaaactgatttgccaggacgcttacactaaaggtccctattttgttcgccgtatcaccattcgccgctacacggtcacagccaacgataagagcattgatctttccctgtgataagactactgcagccatattgtcacagatcagtgtcacatcgacaccgtgttccaccagctcaaatgcagtcaagttggcgccctggagtctcggtctcgtttcatctgcgaaggctttaatgttcatgcctttttcctgagccatatagaagacagacagtgcggtgccgtattccgaggttgccaggcttccggcattgcagtgagtcagcacagtgtctccatcctttaagaggcttaagagattttctccgatatttctgtttgtctgcttgtcttcctcatgaatcgccacagcttccgcttccagctccttctttacagcctccatgggatacccctcatcaaccagggtttctgctcttttcaccattctgtcagcggcccacatcaagtttaccgcagtaggacgggaggattttaagtattcaccctgttctctgaagtaatccagaaatgatgctgtttctgttccatcaaaagcattggcagaaaggaccataccgtatccggctgacacaccgatggccggcgcccctctgacaatcatagtctggatcgcctgatagacgtcctccagtgacttacaggccacatacgtaaccgtattcggaaggagtgtttggtctaacaaaaacagattccctttctcccatttcaatgtgataatttctctcatattgtttctcaattcctttccccttatgtttgtttctaacatctataccgagatattaccacattgcttgtttgaagtcaacattattttgttatttttaaacatttatttctaatagcaagatagcctattggaatattttaccttgttcttgtagaaatagcaagtttatttgtttaattacctcaaattggaaagttttaattgttattttttaacatccttttgaatcacacagaaacaaaaagaaccggctgcagaaaatcaactctctgattctccacagccagttctctatcctgttttactttatcaggtttgcttcttatacttccggtttttccacctgaacaatcgcagccttctgcatcggaattctgcagttcttattattgccgaactcaacaatcacggtatcatcagtcatgtcgataatcacaccgtaaaaaccgctggttgtcaaaacactgtcaccaattgcaatgcttgcaagcagttcctgctgtttcttcttttccttcttctgcggtctgattgcgataaaatacatgaagccgaagattaccgcgatatagataatccagaatcccatacccattccgccgctggttgctaatgccataaatcatttcctccttattaacgatccgccgcctcgccgcggtatcattgtccttacttctcagcctgtaccgccatcatgccggcaagcttttccgctttgtactccgcataacggtgctgttcgattgcgtcgcgaatctcttccatcattgtattataaaagtacaaattatgcaagacacataatctcatcccgagcatttcttttgcttttaacaaatgccggatatatgctctgctgtaggaccggcaggccgggcagccgcagccctcttcgattggactgtgatccagctcatacctggaattaaataagttccgtttgccctggttcgtatagacatggccgtggcggccgtttctcgacggatagacacagtcgaagaaatccacgccccggtccaccgcctccaggatattggccggtgttccgacgcccatcaaataggtaggcttattctccggaagatacggcaccgtctcatccaaaatccggtacatctcctcgtggctctcgcccacggccaggcctcccagcgcatatccgtcgagatccatggcggagatggtcttcgcatgtctgatacggatatcttcatacgtaccgccctggttgattccgaataacagctgttcccgattgatggtatccggcagactgttcagtctcgccatctccgctttgcagcgctccagccacctggtggtccggtcaacactgtttatcatatactccctggtcgccgggtgaggaggacactcgtccagcgccatggcgatggtagagcccagattcgactggatctgcatactctcctccggtcccataaagatacggtggccgtcgatatgggactggaaatagacgccttcctctttgattttcctcaacccggttaaggaaaagacctgaaatccaccggagtccgtgaggatggggcggtcccagttcatgaacctgtggagtccgccgaattccttaattaacttatccccggttctcacatgaaggtgatacgtattggacaattctacctgagtcctgatctcctttaaatcatccgtggagacagcgcccttgatggcaccaaccgtaccgacattcatgaataccggagtctggatggttccgtgcaccgtgttgacttccgcccgctttgcacggccatcctttgcaatgattttataattcattctgattcctgacttttattttttagtttgtatcaactcacatttattttttggagctcttcgcagccgccctggatgccttttcagcagccttcttctcttccatacgtttattcttgtaaacggtcattacataccataaagaaccggtgatgcagacagaagaatacgttccgcatacgataccaaccatcagcggaagcgcaaactcgcggatcgaggatacaccgagaaggaacagtacaaataccatgacaaacgtagttaaagaggtattaatacttctcgtaaaggtctgtgtaatactcatatttacgatctctgccagttccagtttgctgtgaaccttcagattctcgcggatacggtcgaagataacgattgtcgcgttgatggagtagcccacaatcgtcagcatacatgcgataaaggtagagccaacggaccacttaagcagcgcatagaacgcaagcacgacgagaacatcatgaagcagtgccagtacagcgcttcccgcgaacttaatatccttaaaccgcagccagatataaagcagcatacagatggtggcgatgataacagcgatgattgcatcctctttcatctccttgctgatcgcaccggagatactctccgccgtaatcttctcagcctccacgccgaaattatcaaccattgcctggtctaaggcctgtctttcttcaactgttaaggttctcgttttgataattacttcattggttcccgcaaccttctgcgtctgaacctgggcgtcgccggttacattttccacgaccggaactaccttggaagagatctcgtccagagtcatatcttcattaaatgttacattggtagaagtaccgcccttaaactccatgctgtagtttaagatatcgccggtctgtgtcttattgattacaagaccgccgagaccaatcacgataaccactaaggatactgcaaaccagattttcctctttccaaggaaatcaatggtcttcttatctgtctttgtcccgtaaaacttcggatcctggaatcctaagttgaacagtgtgtttaagacaaacttggtaataaacaacgcggtaatcatggataaaacgataccgatagccagtgtggaagcaaatcccttaacggtaccggagcccctccagaacagcacgccggcagcaatcaaagtggtcacattgccgtcgatgatcgccgataaagctttgttgaaaccggacttgatggcggactgaaccgtctttccgaggccgatctcttctttgatacgagtgaagataataacattggcatcaactgccataccaatggaaagaatgatacctgccacgcccggaagggttaacgtcacgctgaatgcggaaagcagaatcagaatgacacctacgtaaatggaaagggcaatcactgcagcaagtccaggtaccaggtatacgacaagcataaatacggcaacaatgccgaatccgatcgcgcctgcctttaagctggtcgcaatggcttcctgtcccagttttgctcctaccacgttggaacgaagttcttccagctccagggaaagggaaccgatacgaatggtggaggccagtgtttcagcctcttcataggaaaccatgccgctgatctggcactgtccctgtgtaatcggctcgttaacaaccggattggagtagatctttccgtcatagatgatggcgattctcttgccgacattctttgtcgttgcatctgcgaatacggtttttccatcgtcagtaaaggttaaatcgaccatatacttcttaatgccgttctcgtcggtaataaccggcttcgcggtggcaacctgattgccgtttaaaatagtctgtcccgcctcatcgacaaagatcagagaaccgggcttacccagttcttccaggattgcattggcatccgatacgccgggaatatcgacattgatccggttgctgccttcctgatagacctcagcctctgtgctgtagttctgaaccctctgctgcagtttgtaaatggtatccgacatatcctcggcactcgggttctcttcctttgcctggtacgtaatgctgacaccgcccgccagatcgaggcccagcttaatatcattcatggtagtatatccgaaatatccgaacagtcctactagagccagcgctatgatcagcccgatcaggcctttgcctttgttacttttcatgacttttctcctttaattttagtcttcagccaaagctgctttcaacatgatggcgcattcgattctcttcttctgcattgcacagccgatgtcgtatgcatcggtaatgctcccatggaaattataagaattggccgcgcagccgccgctgcagtagaatctcgcgaaacagtccctgcacttatcctttgcatagacgttgcagagtttgaattcatcgcggatacgttcgttagtcacacctgtatcgacattgccgagaaggaattcttcctggccgacaaactggtggcagggatagagatcaccccacggagtcacagctaagtactccgttccggaaccacagcctgaaagcctcttggcaacacatggtccctgatttaaatcgatgttgaaatggaagaagttaaagccccgtccttcttttttccgttttaaatactcttcggcaagacggtcgtactcttccatgatctgcgggagatcttcctccctgatggcatactcttcctccggcgctgccaccaccggttcgattgacatgctgcggaagcccaaatccgcaaattccatcacatctttggagaaatccagattatgacgggtaaaggtaccgcggacgtaataatctttgtcgcccctcatttcagcaaacttctggaacttgggaacgattaaatcgtagcttccctttccgccccggaacgggcgcatcttatcgttgacttccttccggccgtcgagacttagtacgacgttgctcatctcacggttacagtattccatgatctcgtcgtttaacaaaacgccgttggtggtcatggtaaaacggaagttcttattatattctttctcttttgaacggccgtattcaaccagctgcttcacgacctcccagttcatcagaggttcgcctccgaagaagtccacctctaagtttctgcggttcccggaattggcaatcaggaaatccagcgccttctttcccacctcgaagctcatgagggccctgcggccgtggtactcgccctcttccgcaaaacagtactgacaggcaagattgcagtcatgggcaatatggaggcagagcgccttgactacagtcttacgcttcttaaaatctaccacgtaatcgtgatactggtcggtggtcagcagctcttccgcatcgattaagtactggatctcctccagcgcctctaaaacctccgcttctccatatgtaggggaaagccgttccttcacttcctctgcgacttccgccggaagcggctgcggctccgccagttccggcacacgctctgccacaatttcgaccgcatcgtacatcacggggtcgacgctgtgtacagaaccgctgttgacatccataatgatatggaagccattattgatatattgatgaatcactgaaatgttctccttgtcttaacgatattttaacgccataaacgagttttgggcagacaagcgaagtaacccctaccgtccttacgaccgtaggggtctttttcactcatctgcctcatattccggcatactatctattgctgttctcacagctctggttgcccactgtacaggatgtcttgcaggctgactggcaggaagtctggcactcgccacaaccgccttttttcatagattcctttaatgtgctggaatttaatgtcttaacgtgtttcattcttacacctcctgtaattagctaattctttgagattataccacatgttattacggagtgcaaggtaaaacggccccgggtatacagggattttcgaagtttttccctttatccaaaaagctgtccggcttacacgcgcactctctactccctgatcacccggaatctctcatccagcgcgtcaatgtcatacaacccgataaactcctgcggcaccggcatttttgtcatatgtcccgtaagctctgcccacttatccatctgaaaaatatagtcgccgctcttccagacggcctccgcctcttcttttgagatatccatatattttaacagcatctccggaaagtcctgttccttcccatagcactggaattctgactcaagtatccactttgcgttggcagtcgccctctcatacgcgtgcttccggtctgcatccgagcacgctaccatcagcaagtctccgtcgaactcgtcataaataatcacttcagcctgaaagatacgggccacctccttcgccgtctctttcgtgcagttctgctgaacagacgcacagtcaatacccagccacttactgtccggcgtcctggcggccagtgcgtcccctgatgcaggatacggtgatgcgggatactctgcactccgaagtttcttcatctctcttaacccttctgcgatttcctcgtcgctcatggcgcggtccatcagaacgagacagctggtcatataagtgttgtcaccatagtaaccgtgaaatacctccgcatccatctctttgcagatccccgttgtcatgtccgcaatccggaaagagtcccgcactgcccttgccgtctgcatgctcacggcatcctctgtatccggcgtgatcgacagggaatagcagcgttccggcccatacacctccagtccgatcacgcttcgggatccctcttttcccttattacgcagctcacgccttacgataaggaagtctcccatttcttccagagaatagtcaatcacctcggtctctgctccaaaggaaccgctgtctgcattagccctggcctggtattccgcctttgtcttcggcagcatctgtgttaagccgtatccctcaaaggaaccggttggcccgccggtaacgcttatactcccccattccgagaccagggagtcataagcgttattcctgtcctgccatatcttccactctcccttcgggagaatcaactgataatacagcgtggaggatgcaaaggttccctcttccgtaaccacatcgaataccgtatcatccggaataactgcagttaaatcctgaaaggcggagcctccggcttctccacctccgtgcttcccgtcagccggctctccggtctccgccctgtcatttcctggtacttcggaagacagcgccgccgtacttctgttctctcccttccagtaaacggtacccaggaaagcgatgccggccgcggcaatacacaaggctgcggccgcagccattcccggcagctcccatcggacggacagcggaatcgatttttttctgaggcgaaacgccggattattaaatctgcatcgcgtatcacagacattcatcagcgcttccgccccctccagtccgcccagtgcagccagagggaccaggataccgtctccctccttctccgcaaggtaaagagtctgttccgtataaaatgcaccggttatcgtttcatacggatgaaggacagcggcccgctctgagatctctataagccctctctttcccgccgccagcatctgttccccgatcatgcggtacggaaaggttcccagctttcttagacgttccatctcccgcctgctgatccggagaaggccatattccgcctttacctcgtcgatctgccttgtataacggcgaggtgtaaatttgctgtcagcacaggcttcggcagcctcctggaatgaaatccgcatttttccaagttccctgatacggctttcaaaagcagtacgccattccgctgcctcctccttactccccagaatacgcttcggaactgcccaaaaccgtttcatatcataaaaaacaaacagcgtttccagctcataaagcttctcaaccgccccgtacaaaagatatacctcgcacgccccgcttttcccataaaccatgtcttcctttacagtcagctccaccggctctttcagacaggaaaattccgcttttcccggcttcgctcttctcatttttatgtatgtcccgtgataccaatgaacaaactctctgtactccttttcactcagctgacaggtcaatttctctttcatttgtcttccccctggtaaattaccattattataaacaaattttggggggatttccatacctttcgcctgctctcctgggaaagtacgaagaaacatcttccaggcagggccttttgacaacacagtattacttttcagcaatataaaaataccggtttaagaatagctgacgcctcttcctgctgtccgccgctctcaaaccggtttctcattccgttctttctgatttctgtactctcaaaaaaatgcttacactgttcttctattctgccggaatctccttcccttccatcagcgcaaggatctcctcccgtttcggcatggccggagcagttccgatctttctgacagataaggcggccgcagcgctggcaaagatgactgcttccttccagtccattccttccgacagtccggctaaaagccctccgttaaatgcatctccggcgcctgtcgtgtctaccgcttttacacggaacggcggtaccatatacccgctgccgcccacagaaagataagcgcccttttctcccatggtaatgatcacaccgttcacaccgcgctcatgaaaccaggccgcagccgatcctgcactctcctccgattcgacagatatccccgtatagaattctgcttcaacctcgttaggtgtgacaatgtcgatccatctccatatctgctccggtaaaaccgctgcgggagcagggtttaaaataacctgttttcctcctgccgcagcacattccgcaatggctgtgacagcatccagattcgtctccagctgcatcagtacatattcgcagtcattcccgcagatctggtctttcacacagtccacttccaggctggtaaaagtaaggcaggcaccaggcaccaccacaatctcattctgtccgctatcctctcctaccagaatcagcgcacaccccgtgtcatactccttcgttataaaaacaccggactgatccattcccagctgacacatggtatcccgtgcaatctctgcaaaatgatctgttcccagttttgtgaccagctttacctctgctcccgccttaaacgcggccaccgcctggttaaagccttttcctcccggcccaatcttgaatccgttccccattacagtttccttcggagccggaagatggggtgcacgcgccatgatatccgctacaaagcttccaaaaatcaacgatttcctgcccatacagcctctcctgtcactcttccaaaaggagcaggccattgccggctccaatcctgtcagctccggcgccgatcagacggcacgcctgttcatgagtacgtattccgccgctggcttttaccttcgccctgtctcccacagtttcacgcattaatcgaacgtcctcttccgtcgctcctccggtagaaaaaccggtggaagttttcacaaaagccgcaccggctttgactgataattcgcatgcacgcctgatttcatcgcttgtaagcagacatgtctccaaaatcactttcaccgcggcgctgccgctggctgctacgacctcccggatatccgcttccaccagatggtcatttccgtcctttaatgcacctatattcatgaccatatccacctcttcggccccatccttcaccgcagtatacgcctcataagcctttgcctgcgtgctcatggcgcccagaggaaatccaaccacacagcagacctttacaccgctgtccctcagcagctctgcagccagcggcacatggcacgtattcacgcagaccgaggcaaaatggtgttccaccgcctcactgcagtaccttctgacttctacagcccgggcatccgcccttaaaatcgtatgatctatcttatctgttatcttcattttctatctccatttctacattcctgaaccaggatccctttgataagctctgtcccacgttccttcgggctgcggcagagaatccgcactgcctgcatcaaaaagccaagcctcacctcatcccgctctgcaaactggtcctttacccggctgtaagcgtacataatacgattgcactctacatctcccataccgatatcctccaccgacatgataacaatccgctcccagagatacgcttccatctctcctccgcttaaaaacgcctcatacgtaagcatcagcacttccggttccagcgccctgcggatgctcttttgaaatgcagactgcagcagttccagattcagtccgtgaggcgattccatctcatagaaatggttataggcatccgatcggaaggcttttccgttttctccgccatagatgggcgttaaaagctcaatcagcctctttttgtatggttccgcaccttccgcctccggcaccaccttactgcctccatccgggtaaaggaaatccaggggcgtatggcccagttccctgcccgcatggttgtgatgatccctggcaaatgcaggaatcacaggatatactcccgcatcatagcaatcctgaaccttccgtatctcctgttccagtgactgttccttctcacagccgcacagataccgaatcgcctggataaagctcagcgcctgcatgccgcccgcgtccggcatatacggctctgtatgatagcagatgcatctcagattatatatgtaggccagagcgccctgctccgccaggccgatggtatagaccgcctccagctccagctgtttccacagctcctccagcataaccgcgctggttctgtacagatcgtaggcggtggaaatcgcctcgtccgtactgccggccagaatatcgcggtgcagctttaaaaacgcggcactcaccttcattccgctccttgtactgtagtccgttatgttagccctgtccatttgttttctcctccatgttcaatcacgatccaacgctcatccccacttgcactgatttccattatcccttcacaactccgctgcagatactgctctccaccttctcctgggcaatcagataaaagataaccgtcggtataatactgattacaatcgatgcaaagcttacggcgtacagcgttccaaaatcacctttcaggttcaaaagcgccactgagatgggctttaactgcggcttcgtaatcagcacattggcgattggcagttcattatagataaaaaggaacgatgtaatcgcacaggtagaaagtgccggcttcgcaaccggaataatgacccgcagaagcgtttgaaacagggaagcaccgtctatcatggccgcctcatccagttccttcggaattccctcgatataccctttcagaatgaaaaacaccatggaaagatttactccggcatagatgaccatcagtacgaaaagattatttctctgaccgatggcgctgaccatctggacaatcggcacaatcgcgctctgaataggtatcatcattgcggcaatcagaaacagcgtaaccccttcgcttcccggtatccgcttcctcgccgtcacataggcgcccataacggatactcccagcatcaggcagatagaacctgctgacagaaaaagtgaattggcggtggcacgcagaatatgcaccattttctccgcggaaatataattatccaatccaaaccgctgcggcagggcaaaaaagtccgcgaaaatagtctggtcatctttaaaggaagacagtactgcaaaataaagcggaaagatcgtggtaatcagccagattcccgcagcacaggcgtagagtatcccgcccggcgtaatttttcttttcttcacgtctttcctcctattccccatcccgctcggcgaacacccggttcgtcacgaccgtaataaccagacagagcacgatcatgagcacggcgatggcattggcatatccaaatttgctgtaggtaaacgcattcttatacagcagcgtgttgggcacatccgtggcgtagcccggaccgcctcctgtcagtcccataataaaatcaaagaccttgaaggcaccggtcagcacaaagacgaccacaatcttaaacgttggctttagctgtggaagcgtaatatagacaagacgctgccacggggtaactccgtccatggccgccgcctcatacacatcctccgagatagccgccatgcctgaagaaaatatgatcatctgaaatcccacattactccacatattcaccagtgccacgccccacatggcagtgtgcacgtcgttaaacagattaaaatgttctgcgatccccagttccttcagcagcaccgggacaggcccctgtcccggcagcatgataaaggtaaacatcaggcagatggcgattctgttgataacgaccggtaaaaagtaacatgtctttacaaatctgattccaaaaaactttttgctcactactgtagccaaaaacaacgaaacgggaattgtcacaaacagaccggtaacgcataagattcccagattgataaacgccgttttcgtcgtataatccttaaaaaatgtcacgtaatttcccattcccacgaaccggtacggatcagtaggaattccgttccactcaaaaaacgaggtgaacaccatattggccagcggatagataattacgaaggtgtagagcaggatgaccggagcaatcatgaaaaatgcttccggccggtactttttaccccggacttttattaacaaatcgatcccccgcctttcttactgcggaaacagcttcgcatactcagtgtcaagagtctttgcgatatcttccaccggacgctccacaaacatggtctgaagctccgtattcgtaatgttgattacactggcgtcgtctaagtaagccgccataatgtcggttgtatcgcttcttgtggcgtagccctccataaatgtcttcatcggattcggagacttggaggcgtcatagtcgatatccaccggatagaccccaccgccggcaacttccgcatatccttcaaaggtctccttggaaagcatgaaggccatcagcttacaggctgcatcgtactccggtgtacccggttccgcggaaatacaaaagccctcgctggtagatgcaaaccagatattcttattctccggcgcgctctcaaaatacgggaaattgacacagtcgatctgatctgcaaattccatcccgttaaaacggtcaaagtaatagcttgccgtaaagagcatggcgatctttccctcaccgaaggaagtgacattgttctccacttcataagagatggcgtctctgccgaacacgccggcatccatgagttccttcatcttattcagcacagccatcatctccggatcactccatttaacttcatggctgatgaacttatcccggaactccagcccgttcattcggactgccagttcactgaagaaacggcccaaatcggcttttgtcttggcagctacggaaaacggcacgatagacggatccacttcttttagcttctctgtcatggtcatcacatcttcccatgtcttcggcgtctcaattccgttttcttcgagcagttttgtgttgacgtaaaccggagaaccaatgacagagtttggaacgccgtagatcccttccagcccttttcgctcaaaggagaaggaaccgaataccccctcgtccacggggcctgtccactccggtgattctattaagggagtcagatccttgatcaccccgtttttcgcccagtcataatgcggaaacgcatcagaacagataaagagcgtaggcgggctgcctgccgcaacggaggcctttaagctgcttttgtaggattccgcatctgcgatggagacatcctccacctcaatattcggatttgccgctcggaattcctccagcttttccatgtaatactttgcccggggcagttccggattggtgtaacgggacaaataggatatcttgactttctctccgtccgcctggcctgcctctgcatttgcggccgtctcctcctgcttcgtctccgtagaaacagccgcaccggaggtatccttcgtctccgtggtcttcgcgctgcatccgctgaccgcagcaatcatagccgcagtcagtaccagtgctgcaattcttttcatcataataaatcccccttcttttgttttcttattttttcttcctaaagcttaccataactgccttctcactcccatagttctttttgggtttttatctggaaatttttgtttctcagaggtagaaacgcctggcagtcaacaaaaagcaatggtttcttatggaatattttgtcatatctgtacttttttgcttttccttccccaatgttgactttgcaaaacccgtgctgtatcattttcttaataaaacaccctctccagctgtatgacagtttgtccgcagaacggagggttaaacggcagataaggaggcttttgtgagcggaaaaggatatttctcaaggctggagtctaaatttacatttatgtatacaatcattctgatagtcgttatcacatgtattgcatgttccatcgggcagtacagcaattccatcctgaaaaagaaatccctggacagctgtattcagaaactggatttcgcaggtgaacgcttcgggctgatcctcgaccgaatcgaaaatgagtctctgctgctgaccttaaatcaggcttcccgccacgaggcggcaaagaaagaggccgcctctccctatgaggagcacatggaggcggcctcattttcctcctatctggtagagtttctctccacccagagcgcggtggaatccatcagctattacagtccggatggctccttcttttatcaggataactacggtgtacttcctcctgtcaaaatcgagatcccccaggaggtccgggaagagtttttcagttcttccctgaagtcatcctggtatatccacgaagcccccaattctgaggccggcggaaacttaacctttacctgcctgaaaaaatcctttgcctttaccggcgagcccctgggattttttgcactgaccgtatcgccgtcacagattcgtgaaatctacagcggttttttctcagaaaatgagattttcatgattacggataaaaacggtctcatctgtgccagcacgaaggaggcactttccggaaaaagagtgaaagaggttttctccgacggtgcctccctccagacagggaatacgatcacccttgattccacaaagtatctctgcaccttccagccggaaaaagatctgaatttattcgccctcactccggaatcgcaggtttatcacgattcccgttcccttgtgtccgtaattcttgccatcgggatcatctccagcatctttaccttctttctgttccgctattccaccagaaagatcatgcttcccgtcaaccagatcatttcgaatgtccgcgccatgtcggatggcgactacggagtgagaatctcagtccgggaaggtcagacagatgaaatcagcctgctggccggccagatcaaccggatggcaaaaaacactcaggacttactggcccgcgttcaccgtgaaaatgaattaaaacgccgttatgagctctcctgtattcagcttcagatgcagcctcatttcctgtacaatacgttggaaacactttgcggcatgatcgagatgaacaataagagcgaagccatcggcctggtgaacctcatctccgggttttaccgaggggcattgggcaaaggaaaggaaatcatcacgctggaacaggaactgaagatcacccgtgactacttgaagattatgcagaaacggtatccgggctgcttttatttcgagacctccatggaaccggaagtactgtcctgctgtattcccaagctcaccctgcagccactggtagagaactccattatccacggcctgcagctttttacctccgacagagccggattgatcactatcacgggatacacggaggattccttaatctgtctgaaaatcacggataatggaagcggaatggatgacgagacggtagcccgcttaaacagtcagattttttcagaggaacggagttcgttcggaattcacagcataaaaaaacggctgaagctgtattttgctgtagccgatattgtggtgacctccaaaattgcagaaggaaccgtcattacgatccgaatttccagacagcaggaaaaccctgacagaaaggattagccctatgacctatcaattcttaattgttgacgacgaatattttgtaaggcagagaatccggctctgtattccgtggaaagagtacggcttcgagtgtgcgggagaggcggctaatgtggagcaggcccttcattttctgcagacggtccccatcgatctcgtccttctggacatctccatgccaggtcccaacggactggagcttctccgcatgatgaaggaaaagaacagtcaggcgaaattcattatcctgtccggatttgccacctttgaatacgccaggcaggccatcgcatacaacgtggccaattacttattaaaacccattaacacggaggaactgatccaggccataacaggaatccgggaaactctcgataaaaacaaccatttaaaacaggagcgcctggcctggcaggaagcccgcctcatcgccgagcatgtggaaaaaaataccttcttccagaatattttctccggccacgccctgggctctgaaagtgccggtctggcggagttcggcgtaattcccgatacaccgtgcaccgttgtgatcttcgacggccagccaaagattacgcacagcctctcctttcaggaacgctcctcctttcagcaggccctcggtaatctctccggctgcctgctgtccggaaaatcaggctgtgtccaggtaacggatatctataaccaccaggttctgatcattccgcaaacacagctgcctttcggaccggatcattttctgggacgcctctccgccgctgccttggaaaatttttcaaaggatatcgtctgcggatatggaaatggggaggacagccttgccgcagccatcagttccgcctaccagactgccctgcagttttttaccttccgcaccgtctacggaacagagagcggcgccttccacacccgtctgccggaaaagcaggcgctggaacagctaaatacttccatacggggaatcgcgggcggcctgctgaaaaaagaccaccaggttatcttaaacagccttcattccgtttttcagatcatcgggcaggaacagttttcacttcctgccctggaatccgcgctctcctccctgctctctgccgccatcgaatacgcagtccacagcggaatcgaactcttctcaggcagcggcggctccgcctataccgcggccggaatcatctatcacggatgcagcctgggtgaaatcgaagaaaaatttacgaatctctttctctcgctccccgggagccgggagatggacgaggttcccatgatccagcggattgtgctccaggccgccgaactgatcgagcaggaatacagccgcaccgacatggggcttcagtatattgcatctgtcctgctgatcagccccgcctatttaagccgcaattttaagcggattaaacagtattccgtcatgcagtacatcacaaaatgccgcatggagcacgcctgggacttactgagcgggggcaggctttctatcgcggcagcagctgaaaagactggctatcaggacgctttttacttttccaagtgctttaaacggtattttggaatatcgccatcgcaggtcgaccggtaaatttctatgaataaccccatcctccccggaatatactgaaccagaagacaagattgggggagaaacaaatggaaaaatcaaagctgcaggccaccctaaaaaccctgctcatctcgtacatactgaccggaattctcctggttgttctggcctttgccctctataaattccggttaaaagagggacagatccgcatcggagtcaacgcggtctacatcatcacgtgtctgatcggcggactcatcatgggaaaaagcatcagacagcggcgttttttctggggactgaccctgggactcgtctatttcctggtgcttctggcggtctcctttttgctgaacaaagggctgaacggaacgatgaaccagattcttacaaccatggctatctgtgccgccagcggcaccatcggcggaatgatcagctgattctccgcctgcggcgggtcgcctgaaggcaagctgcaccaacttatgatataaaaacaagtgccggagacaccggctctgtggagcttacttctgatccacaggccggtgtttccggcattttccttatcatttgcacattattacggtcttatataggcatagccttccgcctgccgctccgccagttccaccaccccggccggaaccactgttacgaagtcaaagatatcggccttcgtcaagccggttcccttcagggcattcccgcaggcggcgaatcttatcccttcttcggacagggttttcatcgctgtttcatgttccggtgatgataacgcatatccctccaccgctgccgaattcgccagcacttcgatcatgcagttctccttcgcctctttataataagcgttcatattcttcacattcccaagaaccagtggccaccggtccgtttcatcgatatgataaatcaccttcatactgccgcctccttacgcgtcaacgttctgttcatttggaagatacatgtgcacccggtcgatccggttcttatccagcctgtccactaccaggcggattccgtcacagacgacgctctcgccttcttccggaaggcggtccagctgtccgataatcaggccgccaatcgaatcgtaatcctctgattccagttccagttccagctgatcgttcaaatcatccagcttcatggaaccttccaccacatattcaccggggccaactttaaccagctcctgttcctcatcctcatcatactcatcccgaatctcgccgacaatctcctccagtaagtcctccagagtaatcattccggccgtagccccgtactcatccagcacaataatcatgttattgctggtctgacgcatctccaccatcagctccgccgtgttcttatactcatatgtatagagcggctcacggagcagatcacggatatgaaactcttcattccggtcgatgaggaggacatccttcatgttaatgataccgattacgttgtccgtcgtctcttcgtatacgggcatacgggtatatttttcctcgcggaagatatcgatcagctcatcgtaggtagcgtctacctcaaccatcgccatgtcgattctaggaaccataatatcctttgccacagaatcaccgaaatcgaatacattattaataatcttcttctcttccgattcgattacgccctcttcgtggcttacctccacgatggtgcgcagctcatcctcggtgatagcctcctgcttccggttgggatccacgtggacaaggcgcagaaaaccggaggacagcacattgaccgcataaatcaccggtgtcatgaccgtcatgaacaggtagatgaattttgcatattttaatgaaattttctcagaatacagggtagaaatcgtcttcggggaaatctcaccgaataccagaattaccagcgtcagaacgccggtagcaacgccaaccgccttattgctccagatattcatggccagtgtggtggacatggaggaagccgttaagttcactacgttgtttcccacaagaatcgcgctcagcatcttaccctggtcctccagaaccttcgtcagcgtaacagcgcttttgtcgcccgcctctgccaggtttctgatccgaattttattcaccgtggtaagtgcagtctccgcggaagagaaaaatgcagacaatccaatcaatagaatcaaaataagcaactgtatatagtcacttgaatccaaaaaaatcaactcctatttttcatattttgctattgattctacaatagaaaagcggccgtgtcaataaggcggccgctttatccctcaattcacgcagtaattcagcgttctttccaggctctgatcagttccagaaccagcatcattccggctccgaagaaaataaacatatcccccagattaaatacaacccgttttaatctgccgaactgaatgctgaaataatccaccacatagtctctcacgagacggtcatataaattgctgacagctccgccgagagtcaccgataaggcaagcttatcagcgatattccccttcttaggcagcatccacacgagtccgccaccaatgaacgaagccaccgccaggggaaccatcttcacgtattccggcttctcttttagaaagccaaaggaaaatccgggattgtggttcttatgcagtacgatcctgcctcccgttccgttcagttctttgggaaatgaggattcctcctgctcttcaatcgccttttttatacagagatccactgccgccagcagcacgatgataccgataaataccatgacgcacactccttccgtctttattatctccattttactatgttttttatccatagtccagtaattcccgccctgaaagctgcatacattactaaaaagaatgtgggagttttttcatgccagtctgtgattttaatcccgcctcggaagagtacgccgactttatcatccgccacaacaacagttccccggaagatatcctgctgcagcagaaggcgggctgcatcgattatgtggaccaggagtttgccgtcgtttacagtcagctggagccgcttctccctattaccacaaaaacatatacgtattttgccattcccacgctctataccctgctcgataccaccagcatggaatcctccggaatcatccagaccgctcagcagccctccctcaatttgcggggagaaggcaccatgattggattcatagacacgggaatcgactaccgcaacccattgttccgccttccggacggcagttccaggattgcaggcatctgggaccagaccctgcccgagccgacaggaaccatggatgcttccttcgggataccggcctccacgcctgccatgagcttctcctatggacaggaatttcttaagccccagatcgatgaagcgcttcgttcttccgatccgctctccgtggtgccctccatggacacctccgggcacggcacctttatggcgggtattgcggccggaggcgcgacaccgaatgaagattttacaggcgccgctcctaactgttccatcggagtcgtcaagctgaaaccggcgaagcagtatctccgggacttctacttaatccctgaaaatgccatcgcctatcaggaaaatgatatcatgatgggaataaaatatttaaagctgttagcgctccggcagaaccttcctcttgtcatctacatcggtcttggcacaaattacggaagtcatgacggcacctctcctcttggactggttttaaacaacctggtccgctttgtaggcgtatctgcagtccttccggccggcaatgaagccgggctccgccaccattacatgggacggctgttaaacgaccaggaatacgatgatgtagaaatacgggtggcaaacggggaacggggcttcttcatcgagctgtgggccacggagccagagctctataccgtgggcttcgtctccccgacaggagaggtgattccaaggcttcctatcggtctcggagcagagattaccgttccctttactctggaacaaacagtcattaccgtcaattaccggaccacggagattggttccggaagccagttcgtcctgatgcgctttgaagcgcccaccgccggaatctggcacatccgtgtctacaactccctgttcatcaccggaatctttcacatgtggctccctgtggagggcttcatcagtgaagataccttttttttgcgttccgatccgaacaccaccatcacggagcctgccaatgcggcagtccccataacggtcagcacctataaccacatcaataacagtatctatatccactccagcaggggctacacccggggcggtttaatcaagcctgacctggcagcccccggggtcaatgtatacggtcccggattgtctccgggcggagccggagagaccttccccatgacgcggcggaccggttcctctgtggcagcggcccatgtggccggtgcggtagccgaccttttcacctggggcattgtccgcggcaataataccgccatgagcgacgccagcgtacgcgcatacttaatccggggggcaaacagaaatccagcctatacctatcccaaccgcgagtggggatacggtacgctggatctctatcagacgtttttacgtatcagggagtaactcagtgatagcctctcatctgaatgagaggacctccgtttttatcgagatacgctctcgttatgacgacggaaccgatctcagggtcctttggaatttcatacataatatccagcatgaaatcctcaataatggaacgaagggccctggctccggtttctttcttcatcgcctgctccgcaatccattccagtgcgtcgtcctcaaatacaagctttacctcatcaagctccaacagcttctcatactgcttcaaaatcgcatttctcggttcctttaaaatcctcaccagcagctctttggtcagagactgcagcgtaaccgtaatcggcagacgtcccagaaactcgggaatcataccgaactttcttaaatcctcattggtcacacggcctaaaatgtcaggatccttatcgtacttatccttaagctccgccgcaaatccgatggaagacttattcgttaagcgttccttaataatatcttccagatccggaaatgcgcctccgcagataaataaaatattatccgtactgactgtagtcatgggggtcagggcattcttctgattggagccgaccggcacctccacattactgccctcgagaagctttaacagctcctgctgaaccgattccccgctgacatcgcggctgttggtatttttcttctttgcaatcttatcgatctcatcgatgaaaatgatgccgcgctgcgcccggtccacgtcgttgtcggcagccgccagaagcttggatacgacgctctcaatatcatcgccgatgtatccggcctccgtaagagaggtggcatccgcaatcgccagcggcacatccagcagcttcgccagagtctttacaagatacgtctttccgcttcccgtaggcccgatcatcaggatattggatttctcaatctgtacgttttcctcctctttcttatcagaatccaccagaaaaacccgcttataatggttgtaaactgcaacggagatcaccttttttgcctgctcctgtccgatcacatactcatccagcctctgtttgataatgtgaggcgccggtatatcctttaaatcgaattccggcttcttcgtctcagcagttctcttcttgatcttctgcttctttggtatctccacattctgctgattcagattgctgaaatcacttagatttaagttcatataaggcatgttctgaatcttcgacagatcaaaaccgccctgtgtcactgaatcaaatgccttctgcatacagtcatggcagagattcatcccgcccatggtgaccatgggaccggtcttgctctccggcctgcggcagacgtagcagattttttcatactcatcatcgtcctttgccggcttcttctctgcctcctccgacacagccctgtcttcttcttttctttccttcgcctcttccagatattctttatcttccaaaatagtttctccttttatatgtaatcgatcatctgctctgcaggcctgcatttccaccgaccgcagaaattaatctgtttccattacatgaacgctgttcggcccgcattacaccgggccgtccgccggacttcacactgccggcgcacctgtttattataaatcatttgctttcatcctacaagagcgccgccgcattttagacttttttaacaacttcatggttccggtctttttcccgcctgcaacgcgacagcactgccggcggcagctcggacagctgagaaaagaaaaagcgcgcgaagaagacacatctgccttctccgcgcgcctgcgcgctgtcactgtttttgaatcggtcatttcttccttatcagtttacggaattctctgccggcttcttatccagtgtgatatctacgtttctctccacatactgcccattttccagagactgcacggtaacggtgacggttgttccgccctcataatacttcagcatgttggttaagtcatcgtatgtcttgatactctgaccgtcaaatttggttataatgtccttctcgcggaggtctgacttggatgctgcgccgccttccacgatcttatagataaagacaccctgcggcatgccaagctgctggctggtcgccgcgtcaatattcttgcactggattcccagatagccctgctcggtatccgccacctgagtcctggtctttctcgtcatcagagtgtcgatgatgttctgagccttggagatcggaatcgcatatcccatgccttctacttccgttgacgagtatttggcagagttgatgccaatgacctcaccctgcatattcaggagtgcgccgccgctgttgccggggttaatggctgcatctgtctgaagaagatctctgctcacaccgtcttctgtctgtacagtacggtcaagtgcgctgatatatccgaccgttacggactggccgtaaccaagtgcattaccgatcgctacgacgccctgccctaccttgatggtatcggaattgccaaggctggcaatcgcgatttggctcagtgtatcagacggaatatccttaagcgccactgcgattacagctaagtcgctgtccgcgtctgttcccttgatggcggcatctacagcagtctggtcaatgaaggtaaccttcaattcctccgcgccctgtaccacgtgattattggtaacgatcaggagttcatcgtcattctttcctacaataattccggagccgctgcccacgccctctctctgcatcgggccgaaaaatgtctggctctcgtagattactttactcgtaatggcaactaccgacggcattgccttatctacaatcgcagatacgtccatgttcgcagaggttccagtgacctgccctgtcgtactgttcgacgatgcagctgctgacccatctgatgacggaagcgtctccgcctggctgatttccacctgatttttctggttgtagctgcctgctgcccagttaattccaaccatggtgcttccggctaccacaccaaacaccagtgccgctcccacaaccgctgccgctctcttagcaaagcctgatttcttcttcggcggctttggtccttccggaacagatccctgtgccattctctgatactggtgttcctggtaatgcggaattccctgctgtcctccatagggctgctgattgggtgacccctgctgataaccataggcggaacggtatgcattctggctctggccgttctgactgccctgataaacgttctgaccgccctggtactggttctgtcccatcggctgtgcagttctgtaaggctgctggttctgagtctgattggaattcataccctgattcatgctctgcccctggttcattccctgactctggttcattccctggttttgattttcctgatacatctgctgtccatatgcggaacggtcttcctgtcttgtgtattccggctgagagtcctttttctcatagccgctttcatgctttgtttcctccggatccggatccctcattgtaaagtttgttgttacaggttcttctttatgttcttcaggagtcatgcggcccagatcattgttttcattttcattatacataaaaactatcccctttcctgtttcctttgttttcttttgatatctgaagtttatcaatgaaatgtgactattttgtgataaaattatattgaatatgtgaaaaccgcaaaaaagacatcttccgggcttttccagtcctgaaagatgtctttttgattgtctgtcctatcgtttatgccgcattgggcggtggtaccgtaattacctcaccggactcagagccgcctggctgaacagtccctccgcctcccggccccggcgaaccgcccggtcccggtgatgtcgtctctggtgcactggtggattcatgaggtgccgttgtcggctttaccccgggtcccgtgctggaatccggagattccgtcactccgtctcccggtgaagaaggccggacagcttcggttgtctctccaggccttaccggattggaaggctttgtaccgtctgttgccgccgtctctcccggcttggtcccctctgctgccgtggtctctcccggtttcgtcggcttcgtcccctctgccgccgtcgtctctcccggcttcgtcggtctcgtcccctccgctgccgtggtttctcccggcttcgtcggctttacgggatttccgttctcatccgtctcctcaatcgacatgccctcggatgaagactcacgctcatcagtctcatcggattccttcgtagctttctctgtctccttcgtctccttcggtacatatccctcattggtcggaacgtgatcgacactgactccctgcttgtacataccggaatccgcagagatcttcgcactgatcttctttaccagatcagttggctgatagccctcctcattatacaggaatttatgaagctctgccacatttgattccagagtctggggaatcacgcagtctcccttcttccccataatcatggcatcacgggcaaatgggaagcctcccgtctcaccgatgtggtatttgccaatatccagaatcagactggtaaaatcactgaatgacagcgatgtttcaatctgctctacttccatcagaagaatccgatttaacagacccagatccgcctttttcgccttttcaaacgccttttgaataatcagacgctgtctctctgttctagcataatcggtatccatcagacgaagacggccgtaagcaaccgcctggacaccatccagatgctgaacaccagccgacttaagctgtgtcgacggaactcctgtcttctgtactgtttctgttataaaggaattgatataacggaattccggcttgctgatctcgacatcctcgatgccgcccagcatgttgatcccatccgctaccgccttccagttaaatgtcacataatccttcacatttaagtccagattcctgttcagcgcagacagcgcctgtacggcaccaccgtttgcatacgcagagttgattttattgtaagtgccgttatcattcgtattcatatacgtatcgcggaacacggataccagcttaatctcccctgtatcgcggttgatattgcaaagcatgattacgtctgtattcgtacctttatgtacgttaccgtcccggctgtccacaccaaacacggcgatcgtccagtatcccttcatatgctccgtcttctccacaggcaattctgaattcagtactttatccggatcgtaatcgttcgaatgcttcagtccgctgtttaaccgcagagcataaccgtaaaaaccaatacaaatcagcgtcagaacctcagcaactgccataacaatgattcgtctgatttttttcttctttgcagcctgcgccgccgaccggcttgcagccgttctgctggcagagtcctgaggccttcttccacccattccgccgtctccggtctgggtcccctgaagcgactgatatctcggctcataaccggaggttcccgacatccgccttctgttgtcatttccctgagactgcccactcccggctggtcttccggccattctcgatgctccggaggcgttccctccatccggtctcgcgccttccatccgtgccctgccgctgccatttccgggggcgccggctggtctggcaccgccctgaggctgcccgctgccgcttacccttgatccatttgctgaactgccctgcggtgcaccgcttccgggtactctggcatttctattctgcggaccgccgcctgcctgtctggcgttaccgccctgggggccgccgttccccgatggtctgacacttccgccctggggattgccgctccccgatggtctggcaccgccgccctggggattgccgctccccgatggtctggcactgccgccctgagagccgccgtttccggctggtctcttgcttgcgccctgcattccgctgtttccggcgggtctcacatttccactctgtgcaccgctgttcccggctggtctggcacttccgttctgcgccccaccgttcccggctgttctgcctgcaccgccctgggcgccgttacttccagtaggtctggcgtttccgtcctgagctctgccgttccccggcactctggcattcccgccccggggagcgccgtttcccggagttcttcccgtatcagcagaagaccggccctgcccctgcgtaccttccgccgggcggctcacgggtctgcctgcctgctgtcttccgtatgtgtcaccgcccgcatcactgtaacctgcgggacctaagtcgtcatcatattccttgttcatgtatataacctcatcctctggtgcctgctgtaccggactttcatcagtacgcatttttattgataaaccctttgaacacagtcaaaaacaaaatcttgaaatcaaatcccagggtccagttctcgatgtaatataaatcatgctcgattcgtttcgtgatagaggtgtctccacggtagccgttgacctgggcccagccggtaattcccggacggacctgatgcttgatcatataccgcggtatctcctctttaaacttctctacaaacagcggacgctcaggtctcggtcccaccaggctcatatcacccatcaaaacgttgaaaaactgaggcatctcgtcaatacttgtcttcctgataaaccgtccgatcggtgtcacacgcgaatcgtggggcgtcgtccatctgctcttctcctcagaaggcgcctggaccaccatggaccggaacttgtacatcttaaaaggtctgttatgaagtcccacccgttcctggctgtagatcagaggccccggagacgtcagcttaatgagcgcagcagtcaccagcataaccggcgaaaacagcacaatcgcagcaatggctccgaagatatcaacaatccgcttcataatcgcattgaccggatcggtcagcggtacgtgtctgatattgataaccggcagcccctgtaagtcctcggtatagggacgggtcggtatgatattattataatcgggaataaatttggtatggacacctgatttttcacaggaagccacgattttttccagatttgcatattcgtctatgctcagcgtgatggcgatctcgtcgagagagttgagcgccagaatctcatctaaatcgctcactttgccgatcacatggatcgacttatactcggttccccattccttatggtcatcgagaatccccttgacctgatagccccactccaggttctgctgcacccggtcgataaacccttccgcggcgcggctgtaaccaatgagcagaatatgcttctgattataccccttggagcgcatggaatgaagagcgtaacggatcagattccgctccagcgtttccagtataatattaatcgcgaagaaataaaataccattctcttcgaaaagttccaaaagtacggattcttgttaagaagaaacaagaccatggtaacaagcagaaacccgatcagattggccttacagatattagcgaactcatatcgcctctgctgcacccgcttcggagcatagagatggaatatgccgtaaagcagcagatatcccggcacgatgataatgagcgccgcaaaatagtactgcggtgccagcagcttcttctcagggctgaataaacggttccccataagcagaatgaaccatgccagagcataggaggctataataaccagcccatccagcacgacatgaaacccgttcagttttttctgattgtcctttatcatagcagcaaaaccttcctgtcatacgacgaaaacctgacttgtccatgataatacgcaataatttctcgtatattatacatgataatgtaccatgatgccattaaataattcttaaatcgccgtaagtttttttaatctgttacaattcacagccccgctgtaagtctccggcgtccggctctgccggtttacgcggcctttcctgttccggtttcgggcataagcacttctaaacgtgcaggatttttctaaaagccaggagtaatgcccaaactcgctgcgctcaaacaggtgggcattacccctgaacgaaaaattctgcgcgttaagaagtgttaatgccctgcaaagtcacaggaaaggccgcgtaaaccggcagagccggacgccggagacttacagcggcgccgtgaattatttttttaatcttcttttgagaaattcccacacatagagaagcgtgccggtaaagagttcccattcaatctgcagataattcccgatatgttctgtccggaacgccacttttttacatgtaccaagggtttttattccctcacaaaagccttccgcgtagttggcgccatagcccatttttttgaaaaacaggtatttaattccggtcccggccaggagaaacggcagattaaacagcagctgaagaagcggcatgttcttataattcaaataaatattgtttcttgccgccagttttaccttgaaggaattgtatttggaaccgctggttccgcttcccacatggtaaacctctgcagccgggcagtatacgttgtcatatccgtatatcctggcccggtagccgacatccacatcctctaaataggcaaaatgagattcgtcgaagtatccaatctcctcgaagacctccctccggtagatcgccgctgccgcacaggccgcaaacacacggcacgggcgtttatatccggtaaccggctgtccgacgcctctctggaatgcccagccgggcagactgtacatatctcccgcgtcatccatcagttccttgtgatacatctggagaatccggctgctcactgaaaatatcttcggggaacgctctatcatccggatcatttcccggatgtaatccggcttcggttccgtatcgttatttaaaaggattacatagggcgtctgcgcttttttgatgccaatattaaccgcgcccggaaacccgatattatcaggcaggaacacagaaggaatttcatgctccttcagccactccacgctcccatccgaagatccgttgtccaccaccagaacatcaaagttcttctcgctctgagccgcaagagccgcaaaacacggttccataaacttcagcccgttatagtttggaataacgactgttactttccttgacatctcatacctccagccgataaggctccccgattttctccctgcgcaggtcgcgtaaagcgaagttggatttgcgaagtgttaagttgggattgtaatacggatcgccattctttaagatatccggccacttgtccgcaaacatcttaatctcccggttaaaccgctccaccttctcaggcgtgtcctcgagcccccgggatttggactcatagtgatagaaaagcgcatacggcgcgtataccacaagcttccccaaagaccggatcttcatgcagtaatcgatgtcattgaacgcgacggccagttcctccgagaagccgccgaccgtttcaaacagcgattttttgctcatcatacaggccgcggtcaccgcactgtaatcctgagcacacatggcccggttgaaatagctgctctccgcccggtgaaggccgatgaaggtatgaccggcaatgccgccgaatcccacgaccactcctgcatgctggatggtatcgtccgaatagagaagtctggctcccgcaatccccacatcgtccctctggcagaatcccagcatctcctcgatactttcgggattgatcagctccgtatcgttgttcaggaacaggaggtactctcctgaagctgctgtcacgccaaaattattgattgcggagtaattaaattcccgctcccatgtaaccacatgcacaaaatcaaattccttctgaatccgttcgtaataatcaaaggtcgcctgctccgtgctgttgttctccacaatcacaaactccagattcttataggttcccttctcaatcagggaacgcatacacacatccagatccgcggcatgatccttattgggaatgatgactgataccagaggattcccggttatctcgaatttcgtatggtaaattccgtaatccacgcccttttccacggacagcgcccggattcccatacgctcataatgagcctgaatggcccgcgcccccgcctcaaaggcgtaaagcttgctctccggattgctggaggtggaattctgatggcagcgccagtgatacagcgccttcggcacgtggtatatcttcctggccttctccgtacaccggaaaataaagtcgtaatcctgggctccgtcaaactcttcttgaaagcccccgacctcgtctaataattcccggtttaccacgaataagtggcagatatagttcacactcgtcagcagatccgggttaaagtcaggtttgaaatgcggttcaaacagttctccgccgtcgatatccagcttgtcctcatccgtgtagaccacatcgatctccggatcactgttaatcgccttcacacactcaaacaatgcatccggcgccagcgtgtcgtcatgatcggccaaaacgataaaatcgcccttggccatatcgatggcagcgttggtgttgcccgcaatccccttattctctccgagaacaacgtagcggattctctcatcctttaaggcataccgcttcagcacccgctccgcgctctcgcctctcggacttccgtcagccacgcagacctcccagtttttgtaggtctgtgcccttaaggaatccagcatggccgccaggtaccgttccggcgttttgtaggcgggaatgaccacagacagcttcggcatataatcgaactccaccgatttctgcgcctccagctcctcgtcgctcgtcttcgttaactggtaccattccggataatcgtaatcactgtcaattccctgaagcttgtggcttgatttcaaaagaaatgcttttaagccgttttccctccagaactctatggcagaatgaaacgtctccttattcatcatactctttaacttcgcatgcttcttatgagccgagctgttgtgcttctcgataatctccgtattcagtttcaccttcgatgtctttccgtcacagcgaatgatcaggaaacggtcctcattctcatctctcacatagggaatacgaatatcgaaaccgaaatccttctcatatacagtcttaaaatagttctggcttacgtcgtcacggcgcaccggaacgtatttaaattccacatccttctgattttcatcctggactttgaattcggccttcgcctccgggctgctgccgattacccagccatttaatacgattgaattttcgcggatacgcgccacatcgatcttatatttcatacgttatctccatcctctaaggaagccgcgaaaagctccgcgtccccgcatttctccaagtcggcgtcttcccggtccgcgccgtctgctgccgcaaaattgagtctctcctcctcaatgacgagcggccgtttcatcaccctcgcattgatggacagaatgtattcccccataaggccgataaaaaagatctgcacagacccgaggaaacacatgcctatgagcaccggcgccatgcctgccgggaaacggtcccagtacatcagcttcatgaccaggtagaccacggccaccaccatactgatgagagaacagatgcttccgaaaatagttgccaggcggagtcccgccttcgtataggaagtgatgcttaacatcgccgcatcgtaaagctgataaaaatgattcttcgtctcccctgctcttcgtttcggctgttcgtagggaatctgcttgatcttaaagccgagctccgcaacgattcctctgaggaatggagtcggatcatccagattgcgcagcacttctatgaagtcacggtcatacaggccggaaccggtaaactgctcaatctgctccacatcggacagcttcttcatcatcttgtagtagcagccccgcagccagtacatcagccgattttccttgctgctggtcttaattcctatgacaattttatatcccttttcccattcgtgcacatactgcggaatcagctccaccgggtcctggaaatccgccaccatctcgatcacacagtcgcctgtgatctgcagcatcccgtaatacggagagttaaactgtccgaaattccgtgcgttaaagatcgccttgatctttggattctcattgcacagctctctgattaagcttctggtgcgatcctgcgagtcgttgtcgatgaatacaagttcgtaatcgtactccggaagatccttcgtaagcgtctttatgaccgcttcgctgatcggtacgacattctcctcctcattataacatggaatcaatacgctaattttcttcatcctcgtgctccatttctctctttatcatttccgtgataccgcggcggaacgtataacgctctttaaatccgcccgtcatggcctccatgcggctgacatcaggccgtatggacagtgcgccctcctttgcctgtacaaaggtgccaaactccagcgtaccgcgccgcccggcaatctcaaatatctcttccacaaatgatttcaaagctctcgtgtcacggctggcgatattgaccgccgcgcccttttctggctccttctctttcacctgctcatacagacagcccaccgcctccacggcatcatcgatgtacataaagttccattcgtggcggcatgcgcttaaggccacccggcctccgcgcggcagttctctcacaagcgtcgatatgatggaccacgggtggtcgccgtatccatagacgctgaaaaacctcagatgacagaaattcatgccgtacatttcacagataggagctgcctgccggaaaaactccagctttgccttcccgtattcattgacaggccggcattccatttcctccgtcattacgccccggccttctccggccgaaagcccggcatccccttcggccgctccaccgccgggagccccggccgaaaccactccatattccaccctggagcctgcatccatgaacacacggcaccccaggcggtgtgcagcctccacacaggccagagagcctcttatatttttcgcctgcacctccggcgaatcaatctcttcccggttcaccccgccccaggcgaaatgaaaccacgcatccgcatgaccaatctccttcacacagtccgccgcctcttccatggtgccgtatacgggaatcagattctcatgcaccggtaaatcctgtaatttagccgatcccggccgtaccagagcatagacccggtctccccgatccagaaaccaccgggccagatggctccctaaaaaaccggttgccccggtgatgacgatattttccatcaatgcagttctctcctttggttattcataacgattcagccgggtatcttcttgttttcgaaatacacgaaaacaagaagcccgggcgttccgccctatgtcagtttgtatggaaaagtgcttatacaagcaagcttgcaacacacttttccatacaaactgccgcacagcagaatcgttactgtaaattctcaatatggcggctccgcaaagtcataatttccaccttgtccccaaatctttcctttataattcccgcaatctcctccgtatatccgggagccacaatcagaataccgtccacaggctctttctcaaaatgatccggaggtacgatgggaatgtgggaagccggcgcaaaacgtccctgcttaaacggcgccgaatcaatcatgtatttcacacggtctttcaaaccggtggttgccgccagagtaaatccctggtggctggctccccagactgcaagtgtccggcctgtttcatcatattgctttaatatacggtcaacttccagttttaacgtttcccggctcgccgcaaatccggccacagcggaagaaatcagggagtccttttcagcctgccctgctgccgtccctttcctcacaacgaccgacagcgtatcccggttcaccatctcttcttccagcactacaaagcctgcctctgcaagcacgaagcgcagggtatcgaatgtatagtaagcgagatggtcacgaatcagctcataataaccgtcgtattgcaaaatatattccagactcggaacggtcacaagtcccaggccgtcttttgtcagattgttgtaaaggcatttcagcatccggaccggattcacctgatgctccaggaaattaaaggacaggaagacgtcataaggcccatgatatccggcttcctcattctccagaaccgtattctcctcttccgtaaactgcctccagacctttaggccgcggctcttcgccagttccaccagatccgctttatgctcgatgccatagacgtccacgggaaactccgtgagcacggataaaaactctccctggccgcatccggcctctataaatttctttccctccagatggtacttttcgatcagggctctgtactgcctcctccgaagatttaccatggtggtagaaaaaccgccggaacggatcacgtccttataatagccgacaggctcacagtcaaactgcaccagaccgcagaaatcgcactggtgcagatgcagggaaatccctttgtcctcatctcttccttccgcatcaggaatatcctgggcggaggccggcatgccatccagaacaatcaacggccgtttcggaagcgctttcccgcatgcaatacaaatcttatctctcataccacaaaaactcctgcttgtcaaatatttttctgtttattatgcgccggaggcagctgttcacggccccgtaagcagccgccggatcccctcctgaaagggtgtttcctgtctccatccggtcacttccatcagctttttcacattcggaatcaggttggccggcccttccgcgttctgaggccgtctgccgcagctgtagctgccatgacatccgcacgcctcatacatcagtcggacatactctttcaacggtctcgtctcatccggctctcccgcaacgttaaagactccctccgcgccgctttgccaaagagcagtgagagcctccagcaaatcgtccagatacagaaaattccacatctgcgtacactctcccagagagagataacccccagctggaaatgtcttcagacagctttccaccagtgaccacggatgatccccgggtccatagacgctgaaaattctggcatgaatatatcggaaaccatctgtcagctccatcgcctttctgcagaaatccaccttcgcctttccatattccgacaccggatttaaggtcgtctcctccgtcatggcatcctggtggatcccgtactccgcctgggagccgctaaacagaaaggtcctgcatcccagttttttcgctccctccagcgcttttaaggagttagccacattcttctgctgtacttcgcggttcatccggttcccgctgcccgcgccatcccagccaaaatgaaaaaatgcctcacacggcaccagtatctcttcgtccaggcggtcggcctcctgcaaattcttctcgattacgtgaaggcgttcccttcccgtaccgagtcttgcgcgattcttcgaagcgggacgcaccacagcgtagacatcatggcccattccgatcagtttgtcaaccatgggcgcgccgataaaactcgtcgcgcccgtcactacaatattcaacgattaaaaatctcctttatcaatcactcttacgccgttcttaccgttctcctgccaaacgcttaccgctctgttctcacgtgttcctcattcccgaatccgtggaataatcatattctcatccatctcctcctccggaaggaacggtgataaatcttccagcggcggagacaccatggttccgtccggaaggcgtttcgcagctgatttcggttcaaaattctgatcgcggctcacgaaaatctcacaaatcacagggccgtccgtccgaagtgcagtctcaatggccggtaccagttccccgttatggcacgccctgcagtaaggatagccgtaggcggccgccagcttctccatatccgggaagcttaagtcatagctgtccacaccgattccgacgagcggctcgccaaagaaattcttctgcgtctggcggatcgagtggtaaccgccattgttgatcaaaaagatcttaatgggcatccggtgatgaatgatcgtctgaagctcctgaagattcatctgaatgctgccgtcgccggtaatcagaataatatcgctgctggtgtcctgcaattcagtatcctgcgattcagcgccctgcatgcggccttcctgcgcaccgccttcccgcacggccatacaggccccgatggctgccggcagatcgtatcccatggaggcgatcgcagaatttgagataaaccgctgcccctgttttatgatgcacgcatggccgccgaccacacaggcggaaccgttgcctacgacgataacctgctcctccttcagacggctgctcatttccttcataaacgcatagacattggcatcttcctcttccccgtggtcgtaatgctttggaaggacgaccgggtacttttccttccacatgcggcaggtatccgtccaggtcatgcccgggaggccggcgcctccggcgaaaacaggctgcccgttcccgtactcctcatcgagcacccgttccagctgttccagtaaatccttcacgtccgcatggaccgccatgtcgatgtgaacggatggcttcttcagttcttccggatcaatatcgttgactatggtataggcagctctcgcccatgtactgtaattatatcccacctggcggatgcttaagcggcttccgagagataataccaggtcactgttctgtatggcaaaattgcccgcacggtcacccataccgccgccgcggcccgtatagagcgggtggtcatccggcatacagtcctcgctgtcccagccggtcacaacaggaactccaagcttttccactactctggaaaagacttcaaaggcatgtccgattctgattccgtttcccgcgttgataactggccgttgggattttttaatcttttctatgattaccctggccgtttcccgtgttacggctggcggaagcacctggcgcttctcgccctgccctgcattgtcggcctctgtcttcgaaccggaaggcgcagcccatccgtcccctcctgcttcataatcctcctgtgaaaaaccgatcagttcttcggtttcaatataagctccctgaacattgagcggaatgtcaagccacgccggacccgggcggccggaataggccagatagatggccttctccaggcagtagcgaattctcatggggtcgatgaccatctcgctgtactttgtcatacagtcgatcgccttcgtgatgtcaaactcctggtctcccatggctctgattcccactcccgaccaccttgccgtcgtgtcatatcgaacctgtccggataataccagcatgggtatggagtccagccatccccccacgactccggtgatggcattggtgccccccggacctgtcgtaacacatacagccgcgatgcggccctgaaccctcgcatagcactccgctgcgatggcacacgcctgctcgtgatgattatagaggcaggtaagcccttcctgatgccccagtgcatcatttaaatgcatcgctccgcctccggttacggtaaatacctgtgtgattccaaattccacaagtttttgggagatgtaattggatactttcattcgcatgatggattctccttacatataagataataatttaagatactaattgtctgtctaagtactcatagtacaccatggtcactaaactcatgaaatacctcgtcaagtgtccaggtgtgcattcgtactaagctcgataatacctcgctaagtactcatagtataccacaccccttataaaatgcatattgaagtttttcttactttttacccccttttcttaccagtctactacctggtcgacaatctgctgctgttcggagctggtccttctcaagtaaatcctcgttgtctcgatgctttcatgccccattaaatcggccagaagcgcgatgtctgagaatttctccaggaaattcttcgcgaaccggtggcggaaggaatggggatagaccacttccacgggtatcccgtagcggacagcgaatttcttcagctgcccggcgattcccctggtggtaatgcggtctcccgaacggttcaagaacagaaaaccgctctcgattccacggtatttaatccactgcatagcctcttcccgcagggcgctcggtatgtagatccgccgaatttttccgcctttcgagtagagatctaagtagcccgtctgcacatgctccgccttaatctgaaccagttcgctcaccctggctcctgtggcggccatgaaacggatgacaaaataccagaaccattccccatctcttctcaagcactccttaaaatacatataatctgcgtcgctgattacattttccagatacgtcttctgttgtaccttgacagaagacagtgccagtttttccttgccgattgcttccagataacagtttactgcccttatccgcagattcacggttttcggtttgtagttttcaagcagaaacagcttgtatttttggagattgcttttcgtcactttttcataccggctgcaatactgtttaaccgcatatagataggcttttatcgtattgtcggccagattgcttctgcggaggaacccctcaaattctacatccatctccatgttctgttatctccttccatatctgccatcaacccacactttcgctacccacctagcgtacgttataatcgcagagtaatgcaactatggattttcggccacgacaaatcaaagcgagaaaaaaggagagaaattttttatgaaaaagaatttaaaaatgatggctgtattatccgctgcggcagtaatgactgtagcagctccagagatgggcttaaccgcaggttcttccactgcatacgcgaaaacaatcggctgggtagaggaaaacggttccttcaaatattatgaagaggacgattacttcttaacagacacctggaagaagcgcggcgaagactggtattacttaaacgaagaaggcgaaatcgccacaaatgcacagattgatgaatattacgttgatgaaaccggcaaacgggttatggaccagtggatctccattgaaaatgaagacgcatgggactcccctgacgctgccgagtaccactggtactattatggaaaaaacggcaaggccgtgatctccagatggcagaagatcggcgaaagctggtattatttcaacgaagacggacagatgatgacaggaaaggtagaaatcgatgatgcgacctactacctgggcgaggcaaatgacggcgtgatgaagaccggctggattcagctggaaaatgagagcgacgatcctgaaatgacccattcctggtactattttgacacaaacggaaaaatggtagaaaatcaggttgataaaaagatcagcggcgactactataccttcgtagacggcgtgatgcagacaggctggttcaaacttccagtcagcgagcaggaggaaaatgcaacaccttccgacgccaccgagaatacagcagcaaccgtggccggatatcagtactatgagccggaaaatggaaaacgcgtaaccggatggagaaccatcgagggcgtcgaaggcatcagccaggaaggcgagctctataacttctacttcaaaaacggaaagccgtaccatgcagaaagcggacttcagttatttactgtagagtctaaaaaatacgcgtttaatacaaaaggtgaaatgcagacaggtttaaaggttgtcaatctggaaggcggagaagttgccaacttctactttgcagaggacggcgttatgagaaccggcaagcaggttatctacaatgaagatttagatgagaatcagacatggttcttctataccgacggttccagaaagggccagggcttccacggtattcgtgacaatacactgtacgagtatggtttaagaaaagaggcagactctgatttaagactggctccgatggcttacgacggaaaccagtatctggtgaacacaagcggttccatccagaaagcgtcctcttcctctaaatccgcagcaaaaccggagcttggaaatggctttaaggattataaagattccaacggcaagacctgggttgttgacgtaaatggtatcattcagtaagatacagagggttagatatagaaagtaacaagaaagagtaataaaagtttcatccgttcaaaccggcaggctgccttctatggcagcctgttttttatggtaccggtcttatggaaacttttggcggtttcgtttttaagatactcactgcctgcctttagagcctaaaatagaatgattgcatattttgctctgtatttagagcaatcgtgttaacaaatcataaaatttcgcgtttttttacaaaaagacgatatttcgcgttacaatttcatttattttgcgttataaatatagaagagtactgccattttgacaggaaaagcaaaaaaggaggacgctatgagagagctatccgtgtactattgttcgaaatgcgggtattatggatattaccagcttcctaaaaatgcggtatgtcccaaatgctccgtggacatggtacccttgtccatcagttttcaggactttatggatttaagctgtgaagagcgggacgatttactgtcgaaacagattatttctgcttcttctccttatgtcaagcgcctgatggcgccgcacaaggcttataataaccgggagttcatcgcccgcatgagcgatcgcatcgtcgaactggaagccgaaaataaaaagctgaacgaaaccgttgaatggatgcatcagacaatctgggatctggtgcgtaaaaacaaaggaatagaaccagccggcaagtcatcacttccatcagttgatgaaaactccaccgacggcaccggtaaatccgaaaatccggaatagtgataagagtgagtattattgggagtgcggggcactccccttaccctctgtcacgcaatcctgtcagaacttatgtaatgttcgatcagtctgttaagcgtctgattcaatttcgatatcaccctgcgcagcttaacattttcttccattaacctcatattctccatttccatgaacctcatcttttcagtatcagtcatgtggaaaaccctcctttttttgcttttcttgtaaccactataagacgtttccggccgtttgaaaagcaaaacaaatcgcaatattcgacaaaacggcccccctgcaaaaagtccggaaacacacggttaagtcaaaaaaaatcagcagtaccatatgtatccattttctccgaaaggaagtaccacatatatgaaaaatgatatcatttacgatttcgacaaaattatccggatcgatccaaatcctcctgcaaaaaatatacagcaggcctgctatggaatgattccaagagcctcctaccgccccggtgccttaaaaaacattctggaaaaccggtttgagaacaaacgaatcatactccacgccgccggagatgaacgggtgatcaaagaggcgctttgggtgctgggggcgtgtgggtattttgatgagattgtgattgatggggaagggggagagtggtagagagggaggtatgatgtgatttttggcagattaattgatgtagatggtaatatggtttctgattgactttctgatatggtttctaagtatacgttctgatacatctcctgataaagtttctgagcattttctgatcgaattcctgatatcgtttccgatgtattttctgatcgaattcctgaaattatttttgatgcatttaaagctatatttatcccaagcatttgtcctccagcagaggacacccctgggaatcataaaaggaggcttcctaactcggccgcccatctgctctgtaactgactcaaattagatcgtcaattaagattcctatattttgtttcaacatgtatacattatatttccaaaatagctctccctcctgcctccacacctgttccactgcttctctgcttatttttcattgaatatcaattattttcttattttatatggcctgtccggtaatagaacacaaaaaatattgttgtattcattactgtccccgtctcctgctctcaacatgcagcctttccacagcatgatcgaaaaatactcatataaattttctaaggcagctgccatctgtttttgtagcaatgattatccgacagatacgtccaatctggtaatcagtaaaacgactgaaatggctattgttctgactattattctaactattattttgactatcattttgactatcattctctatcttttgctcacgtttctaaacttcacgcggtgtgtaattgtttgtatttttcattcaattttgtccgtatataacatacatatgaatgtccgtcagttccttgcaatttactttttattcagatatttttaagatgataataaaatactcccgtgcggctgacgtgaagccctccttcctatatttccagaacgttgtacttagccggcttcacaggagccacggcactgatacaaatcaggtgttcattatcaatctcctcctgcatcatagtgtcacgttcaacattgtttctatagatcatgaatgttttcatctgccttccaaagttgttttcattttggtttagtttttttattctgttattgacataatccaaaaagtttgatattttagaaccagaacatatgttcgatattaaggagggagacttatgaatcatataatctattgtccggtatgccatcaacgcctgtttgacataaaaccgccgatcgccggaaccattgagatcaagtgcccgcgctgtaagaaagtacagcacatccatttaatcgaaccggctactctgaaatcaactacagaaaaaactacctagcaaaggaatgattcattaccaaatagcaggagaaaacgaaaaggccccagtgccggactcgttttctcctgttttatttacacaaataagaaagaaggggatcatcataaactattacatccgaatcgaacagcaaaatattcctgtcagtgaagaaatctataaaatttggcagcatggagagcgaaaggaacgttatttcagggagggggatattcggaatggcgtcttctcctacgatgctctggatggagaaggtctaaacggaagtgagttatttgcagacgaagatcgaaatcctgtagaacatcaggctgaacgcgacctcctgataaacgtgttaaaacaggcactaaacacactaaataacgaagacaaagaactgctggcactcatttactgccaggaagagtcgctgcgcagcatagcacagagtacaggagttccatttactacgctgcagtatcgccataaaaaagttattaaaaaactaagattattcttccaacataaatttttattattgtgataatactgtaacccatcagcatgtcgagttcaccatttaccagttgttcatacgaaggcaaaaccacgccgaagaaagaacaatgtacaatgtcagattctcgctcacaggtttattaaaacagacctggccactggcactcttgtcataaaaagagacgcaaacatagcatcagatgcctctcacgtattcatggcgacgcggctggcaaggtctgtttttagcctaccttagctgttgatgtgacagtgcggcttataagaggcttataagtattaattaagcccttctatgtccatctgaataattatggtgaatcccaagcttactattggctttggcgataacgcgctccgcaaagtcaaatccagcaagacagaagccataaaaaccttcttcactgtacttgatagctgcacagatttaaaacactacaataccatattcgaaatacttaatcagttaaatatcatgaatcctcaatccgaattctatatggaacacaaaactacagtgaagcataaatggattccttacgcctgcatttatatgtcgtatgcctctgattccagtctccagaattcttctggttccagcttcataattaaagcaactacccggtcaataacagcatacttcagccccgcgcagccatacatatccgtcaataggttcatcttaagcagtatcatcatagcagccgaagatggccgagtcttccaccatataaacttatccttcttccatgcgctgcagtatgtcatcgaaatctttgccaaaaaagtaaaggcatcctttcatttattatcttacatatttccttacaccattccaggcgtaacaaataaaacagcctatggacttccaccacgaaaatcccatataccggtataccttaaaagtcattttcgcagatttgaatttgctccccgactttccctgactgcttaagcgatacttcagcaatggctcattgatcgcacaggcatattgatatttttgcaatattttcagccaggttatatagtcctcatggctgtcttcgtgctccattggaaattcttctgccacctcccgtttcaataatacagaagaacaattaatccaattctgttttagcatcataccatatgtaatcgtctccctcacgggaatttctcttccagtaaggtttccatttatgtcaaccaattcccgtcccgttgaacagaggactttcttctctctttttatcagagccaactgtttgcttaatttctccctctcccaccagtcatcagaatccagaaatgccacgtactcccccattgccatgcgtaccccctcatttctcgtcctggctacccccatatttctatcatttttaacataacggatccgctgatcagaaagatattgttgtatcactctttccgtcccgtccgtcgcacaatcatttagaataattaattctaacgaaacattctgtgcaagaactgactcgatcgcctttgctatgaacttttcacaattataagcaggcataattactgaaacaactggcttttccatgttaatacctttctatatttattcatgttaaattatatcatcctggaggggatgggctcaacttaaatttttgtggagaatttatgaaggaatgggtgggagattcctataagcgcgattattagaacccatttatctctcacaaaaaacggcagtcgcagccgattttttcataacattacgcgcaaaacgaggataatactgtgatagaaatagttgttgatgcgaggactatgggaagccagcccagcggaatcggattttatttatatgactttttaaaaggtctggttcatgcagaaaagcttcatataaagctgatcactgatgtggcagagagtgagcagatccattatctgcagcagcaaaaagttcctgttatctgctatggaaaaagggtataccgaagcgcaggcgtttacgcatattttaaatttataaaaaactacttaatcaaagaacagcctgatattttctgggaaccaaacaatcttatacctatcaagctgcatggattttccgggaaaatagtattgacggtccacgacctgttcccgataacgaatcccgaatattttagtctgctttattgcttatattttcgacgcggaatcaggcagtcaattcatcgcgcagatgctctgctttttgactctgatgaaacccggagttttgtacaccattatttttcagaagctgtgtgtaagcgttcctttatttcttatttgatcattgatcgccacataaacgtggaaccacatgatggcggatactttctttatgtaggaaacatcgaaaaaaggaaaggcagtaatctgcttataaaagcttataaaaaatattgcagcgaaggcggtacaatgcctctctatctgggaggccgcatacgtgaaaagaagctccagtcactaatgaacgaagcagccgacaaatatccgatgcttcatcacctgggatacttatctcaggaagaaaaagaaaaatggatcgcaggatgcagctgttttctattcccatctaaggcagaggggtttggccttcctcctctggaagcgatcaagtatgggaaaagggtgatcaccagtaatctcccgatttttcgggaaattttatgtggaacaacagaatgctttgatattaatggttcagaggcgcagcagattgaccgtttgtgcaaatgcatgatgtcatatccggagccccttgaatctgacaaaaacgaaatatacgccaacgtattaaaaaaatatgatcctcagatacttactgagtcattaaagaactttatgctgagcctggaggataaccgtgaggatagcatttgatgcacaattattgttcgaaaaacaaaaaaccggcattggctggaattcaaaaaaaatgattgatgaattaattcaattgccggggaatgaatatcatttaaattgctttaatttcaggaaaaatccagaacgtgaccagttgatccggcaatatcgggaaaaaggatgtattgtacatgaatgcaaatggatgccagcgtctgtctataaccatttagaacggctgattccttttccctataggtttgtcttcggtgaaaagacagatattacacagttttttaactacacggttccgctgggagtaagaggaaaacggattacgtttgtccacgatatgtcctataaatcctgtcctgatacaatggcgcttaagacaaaacgctggttggaagatcatctggaacagtactgccggcgagcggatttagttattactatatcagaattcagcaaatgtgaaattataaaatacctagccatcccatctaaaaaaatacatgtagttcactgtggcgtggatttaaagcagtatcgtgaaatagataatataaagcaaatcgaggacgtaaaacaaaaatatggcattgtcggcaattatatactttatttaggcacattagaaccaagaaagaacctcgatagtcttttaactgcatatatgtacttaaaaaaagaacagaaatttgtcccaaatcttgtcttagccggaaaaaagggctggttatatgattctatctttgaaaaagtgaaagaatacggattgcaggaaaatgttgtttttccgggatatattgctgcaagtgacgctcctattctgcttagcggagcacttctgttcgtgtttccttccctctatgaaggctttggcataccgcctcttgaggcaatggcgtgtggaactccggttattacttccaatagttcttcacttcccgaggtagtaggagatgcagccatcttaacagatccactggatattcagggactaaaaaacgccatgcagaagttgattaacagcccggaattgagacggaagctaaaagaaaaggggaaactacgagctgaacagttcagctggagagcttccgcaaaaaggcttctgaatatttataatgaagtaaaaatggagacaggaaatgcagatatttagagaactatacgcttacagagaaatgatattcagcctggtaagaagagatttaaagggccgttacaaaggatccgtacttggatttctctggacctttattaacccgctccttcagttggctgtgtatacccttgtattttctgttattttgagaaacaacattgaagatttttacctgttcttatttgtcgcactggtaccctggatttttttcagtacctcggttgccggcggctcaagctgcatctggcagcagcaggatatggttaagaaaatttacttcccacgggaagttcttccaattgcttttgtaacaagccagtttatcaatatgcttcttagtcttttggttgttctggcgacattaatagttagcggttttggtatcaattttaaagcgctgctctatctgccgattattatgattatcgagtattcgctgtctttaggtatggctcttattacctcggcagttacggtttacgtacgcgatctagaatatttgctcggcatcatcaccatggcatggcagttcttaactccaatcatgtattccgttgagctcgttccggcaggcctgatgccagtttttaatttgaatccgatgactcctgttattatcgcataccgcgatattctgtattataaacagctgcctaaaatggaaacgctgcttcaagccacaatcttaggagtacttttaattgtaataggctggtggacattctcaaaattaaaacggcactttgcggaggaattgtaatgaagccagaaaatgcgatcgaagttaatcatatatccaaaaagtttaaagtttatatggataaaggtcataccctaaaagaaaaaatgcttttcagcaagcggcgaaaatatgaagaacgaattgttctggatgatatcagctttgaagtgaaaaaaggggaagctatcggactgatcggtcagaacgggtgtgggaaaagcactacattaaagcttctgaccaggatcatgtatccggattcaggaaatattgagatgtgcggacgtgtgtccagtctgatcgaattgggagcggggtttcatcctgatatgagcggtcggcagaacatttataccaatgcgtctatctttggtttgacgaggaaagaaattgaggctcgttttgatgatattgtagcattctcagagctggagcaattcattgataatccagtcaggacttactcctcaggaatgtatatgagattggcattttcagtggcaattaatgttgatgcggatattttgctgattgatgagatactatccgtaggtgattcaagctttcagacaaaatgttttaaaaaaattctggatttaaaaaaaagaggagtaaccatcattatagtttcgcacgacttacaaagcatacaaaaaatatgtgatcggt

SEQ ID NO: 542 - DNA, 1291353 bp, Hungatella hathewayii
  source 1..1291353: mol_type = genomic DNA
ggaacatatcactgtcccacagatgtgttaacttttcaccggctgcctgcaatgcatcttacatctgcttctattcaagcggactttcttccacaaacagtggtaattgctggtacccatctttccgttctaattttacgcagcattctgtatgtctggagtgggtgattctgatttccaaaaggcgtaaatcccccttggtgtgtctactataacactcttctagtacacctcaaaaaaattcattcatctttgataatccgcttaataagcagcccacttaagagatagcaatttaatacaaaaacatattttataccatttgatttcaacttataactaaaatggttcccgaagcaatgcaacgaaaaccattttatttaagctaaacatattttatctttctttatatcctttgatccatacatatatgatgttccaacctatagccctagaatattctattctaaatttcttcttcctctactaaactgctctcccgaattacttcgataggcggcaaagcatcaacatctgctcgttcggcaagtacattaaatttttgtataaaatctgttataaattcttgaatattttcttgattattgtcacaccaaaatcgaaacaaaatagtataatctcccaaaacaccttccgtttgtttataccaatttttatagtctaatgtattatactggtcactctccaatggccagtcactaaaacaaatatcataattaaaagttgtaacacttgaataatgttcttggaactgagtaaatttattatgctccttaagtaaaataaatatttctttttctataactaatggaagaaacaaaaaattacccgcctcggaaataactctcgcttttgaggcaaattctggtttagatgggacatcaccgtccaaaacaattatgttatttttaaattccggaacatttttctcatataattgtatataatttgtccatcccaagtttatatcgataaaattcatatacaattctaaattaatatttaatgctctagacaaaacaaactgtaagaatagacttgcacatgtatcctcacaatatatactaattcgatttccaacaccctgggctgttaagtttatgtcattcataacaatatttaattcactgttagagaaaatatttcttggcataattgttcgtttcccatctacaccatactgaggttctaaatatactatagaactattatacgcaaatggtggaagatctatacctttttcctgatattctctacgttggtacttattcacgcattttaatattataggagaatgtgttgtaaacacgatttgtattttataatcttttgcagcgttccacaaataatcaattaatttcctttgtgaaaatccatataatgtcgcatcgagttcgtcaattaacaaaataccacctttatactctctgctatactcctcctgtaaacgtttgaacgataacacagctaatataattcgcattatattgccttcacctgccgaattagtaaaaatatcatgattttcatcacttactcccgcaaaagtccttgcggccgtccccttttcaatcccaacagaaacatctcctccaatatcatgaatagataagatggttctataatttataatacaatattttaattcttcagacgttagcattgaagcaactgcctgtgtttttccagtttctcctattggaaacaacctacttaaacttaaaaaatacactggtagctgtatataccccgcaccactcgctcgactttcagcattccaaaatcttaacgtaggttcttgattacgttgcctacgtgcaatgctttccacagaataataactattttcgtaagctcctctgtgtaaatttaatttccacttatgctgaccaatcatatcatgttccggtgatatcttaaacttttctttgaactgagagcggaaattgtaaccatcaattgttttgcagccatacatagggtgcccttttgagattgtaaaaggctgccctatcatacctaatacagttgtcttctgtgttgcattgcgtcctgcgattgctgtaatgcgcctgcccagataaaaagaaacattttcaaatgcgcgaaatttttcaatttcaatacttttaataatcatatctgcctttcgtaccccataatatccctttatattatttttttaataatatgtataatgattgaataaacaaaatatttctgcttctcttgtcgcttttaatccataaaataattaattaatgctaatagccctttacgtggtaagtcaatcaggctttttgaatccaattggaattctgaaggtctatgaaccacccaatttagtgggtccaaattagtctgataatttccaaataagtttgtaaaatactgtctcatttcactgttatctatataatttggtaaatttttattataattttctataattttactaagtttcgaaatgtcttttatattttcccaaatatatttttcttgtccctgaattttatgttttttcgaataaaaaattatagaatgctctattactgaacgagtcaaaaatgctgctgataaaggatatttttccaccatttttctgtcagaaaaaagttgtaattctctacatacagcagatattccatgcgtatcagcatcattaggatctatagtgctatagttgattccttgaaaaaaatatggtaaatttttcataccacccttttcctctttctgactgataccttctttttctataatgctttttttactgacaatatcctctttatactgtataacattgtttacacctacagtagtatccatattttcagaagttttagcctcgttctttcttaaaacatccgaatcagaattatttgcattattttccaacgcaatatcttctatatcgttaaatatattatttgccactaattgaatatttttttcttcttccattcctgacattgaatctcttgtactattctcaagattaacataatgttctatccacggaatcagctcatcttcaatacttctagccttattatacaatcgtgttacagccatccccttagatttagcctcttccgccacccattttgaagcatttataactaatagcattttctcctttgtaaaactttcctcattagtgacatccaagccaattttctttttcacttctctattattaaaaattcgttgtatagtagtaaaaggcaacaccgaagttatatcaaaaccttcaaaatattttctcacataaaaatcaatcaaatattgtaaagtttttgcactattttgcctaactttaaaaatttctttttcccttggagtccattcttttacaccgcgacctttatcttcgcctgaatggattcgctccataataaaaaatgcttcctcttcatctgtcacataacacggcaatatactcaaattgtgaatactagttccgattttttttgctttgtcaatagttggtttatctaaaaaatcgaaatattctggatttaaaagtagttttatcgccgcaattcttcgattcccttcatatacaatatattttttcaatttatcagaatacaccacaactatttgctgattacctaaaagaccatttttttgaatatcctcggtcagattaagcatatactggatccctaccgcatcaaataattttttcagagtatctttctcattactacctactgtatgacgtggattttcgtaataattcaacaactcaccaacttttatcctttgaatacttccactcatatttttattctcctaatacttttaataaaccttcctcattaggccgtctcaacttctcagaaaaaaacattacctcactacctgcttttttactttgcagagaatactgtaattcaaattctaacctatccatttttgaatacatattttttatagcatttacattatcatatgtcacaatccattttctatgtttcatttttatcataatatattgagacaaattcacatgatctccatgcaaataaaaattcgtgtataaaccaggtcccttactataatatggcggatcaaaaaaagtaaatgatttcctcgtttttaatattacattatcaattaagtccaatgcttccatattatataatgcaattttctctctattctccgcaattttttttatttggtctatcaatttagttttattaaatctacagtctatactatagtctccatcttgattcagccctccaataggaccagctttatcaataatccctgatctattcgttctattcaaaaaaaaagtagaaaaacctatatccaatctactatgtgtattaatttgctccctaattactttttgcctattccattcttctatagttacatctgtcaaaagaaccttttgaataaactcgtctgtacgattcaaaatgctatcccaaaagcaatatattgtaaaatcataatcatttataatgattttgtttactacaccttcaaaaagcaagcctaatgccaacgctgcaccaccacaaaatggttctatataagtcgtgcaattatttagctgcactaattgaaccacatatttatataacttatatttccctcctggatagcgtagcggcgatggattcatgttttatctcctttagcgaaattactgattgtatatattttactatattatcataaatatttcatcactaacttttaattttatttaaataacaaatagaaaatagaattcttttctttattactccatttttcttatatatagccactgttctataacttaccccggccttctgtgcctggcttatctgatccttcttgtctatcaaatacaccttattccccttcttgaaccttgctccagtctacttgaactaaaaaggcacatcatattccacacactgttccatagaatcaagtatccaggcaaagtcgtagactcttgcctccggcctgaactctccgccgcaggtaatcccttctaccttccctgtagccaaatagtttccacacggaggcaccacagggcattctggaataaagtcctttcacattttccctggatgagaatggtactctttcagtcacgcggaaagatttcagtcttttttctatcatctctatcctatattccggttttggtagagacagggatacatcacttccgttcagccggaggtcaaggatgatgggactgttttttcgtagtagggaacaggcaggttctgtccatcatattgcacttctaaattcccccttcttaacaacgtgattctgccagtgtttaactagttaaaatttttccgcgaatttattggcgcagattactaacagacgataccacctttgttgatccgcgtctccagattctcaggccctattgcgtctaagatggcaaatactgtcccctcctctgccggcgtagatggcagcttcagtcatactccttcctccgatttccttgtcaaaaatactttaagcatcatatcctgcattttatacatatcctattgcggcagcaaaaaagcggcctcgctctcctaacccagaagaaagccaccgcttttcaatgttttccgtttctggcctcaccctatccaaaaatctgccgttcaaattcatcaagccagctcatatccgattcctgtgcatggtagctctctgcttccaacgtgtaccccatctccttaaatttataatctgcctcatggaccatgtgttttgcaaaaccctctgcctctgcttcgcttgtgtcattgcagcagaaactgtattttgcaatgactgcctcatccccaaggaactctatgctttcactttccggtatcatgtagtcgccattaatccctttcaggaattccacaatcccttcttcaatttctggctgcatcagacagttaaactctctgtttttaaatgtaattttcaattttacgtctacatcaaagtccctttccttatcaagctctgctcccatgctttacctccatattcttttttcgtttttatggtgttgtttttatccatttttcactgtctaaatcccatcacccaatttcatttatatcacgtaaaaaggccagccaatttttcgtcggctgaccttgaatttttcccatatatcactcaaataccttcctgcatctgtggaaggggctaaaaatcggggctaaaaacggccattttttgccctgttttttgctcgattttcgctcaaaaaccactatatcttgtggtttgaacctctattttttcttaaaaccacaattctgcatcattatcaccgactccacatgggtagagtgcggaaacatatcacaccctctcaccttcaccacctcatacccccgctccgccagatacttcatatccctcgccagcgtagcagaatcacagctcacatagaccacccgcttcggtcccattttaacaatcgtatccagacagacctcatcgcagccttttctcggtgggtctacgacgatcacatcggcatatacctgattcttctcatactcccgcggcagcacctcctcggcttttccgacaaagaattccacgttctccatcccgttaattcttgcattctccctggcgtcgtcgatggcctgaggcacgatttccacaccgtaaaccttctttgccttctgcgcaaggaatagtgatatagttccaatcccgcagtataaatcccacaccgtctcaccgccggtcaatcccgcatattccagtgccgtggaatagagtttctccgtctgcaccgggtttacctggtaaaatgacagcggggaaatacggtatttgacaccgccgatataatccgtgatataacccggaccgtaaaggttgatcacctgattgccaaggattacattggtttgttcacgatttatattaactgaaatactcgtcattcccggaacctttaacagctgctccgtcagttcctcctgatggggcaggctctttccattgatgacctgacataccatcagctcgccggtgtgaaatccctttcgaatcagtgtatgacgaatcagccctgaatgagacgcctcgtcgtatggcctgatatgataacgctccaggtgatttttgattattttcaggatctctcggttctcttcaatgcctaacagacagtcctcattttcaataatggcatgggtacgtcccgcatagaaaccggttataatcttcccagccttatcggtcccccacggaaactgagctttattgcggtatctccagggctcttccatccccataacaggaagcatcggaacctcatcaaatccgccaatccgtttaatattgttgtaaattttccgttctttatattttaactgctcttcataatccatagcctggagctggcatccgccgcactgacgggccaccggacatggcggcgtcacacggtttggcgatgcgttgacaattttttctaatcgggcataaccataagactttttcgtcttcattaccttggcttccacctcatccccgatcactgcatcttttacaaaccaggtgaaaccatccgtctttccgattccttctcccgtgtctcccatatcctctatctttacttgaatcctgtcgttctttttccattccatcttaatcattctctcctgtttttatactctccactttattccacatcaatggcatcatcagctttcattctttcgctgtggtttttgccgctctcaggggcatgtattccttttcagataagttttattctatcctctttcccatcaatacgcaagaaatatctcatccgtcatccattctgccaaataaaaacggttgtatacagacgctttattcacgtccctatacaaccgttttcgtatatctcaagatatcatctattcagacatttttgcctcttattgcccgttcgtctcatttcgtcagcttcggctgtctgcttcctattttcccttgccgccgttagccttctccatatgaatattcttacccttgatcttgacatccttcattgcctgaagtaccgcatccgcgttttctctcggcacttccacaaatgtatacttatcgtacatatcgatgcttccgaccatcttgcccggcattcctgactcgcctgcgatggctcccaggatatctccaggcttcacattctggttctttccgatattgataaacagacgggccatatcctcacggccgccttcgtaccggctgtcacggccgccgccgtttctgcctcttccgcgtccgtttccattacggttttcgcccctgtaatagctgtctaattcatcgagagagcgtggttctctcgtatcgataatatcctcattttcttcgcccatcatcatctttaacagagctgccgccagatcaagggacgtataatcttcttccagaagcttcttttcaagaatattaatcatctcacttaaatcggattcttcgatggtatccgccacattctctaaaatcttatcgactttaatgccggtaacgtcattcagggaagggatcgcctgaggaatgatcttggtcttgcagtaacgctggatatcacgaagcttgtaaacctcttttccaaccacaaagctgaatgcgataccctcgcggccggcacggccggtacggccgatccggtgtacgtagtactcatcatcctgcggaagatcgtagttaaatacggcttccacatcatctacgtcgattccgcgggcagccacatcagtagctaccagaatatcggttctgccgttacggaagctgttcattacacggtcacgctgaatctgcttcaaatcaccgtgcaggccttctgcgaaatagccacgtccctgaagtgcctgtaccagttcgtccacgcccttcttcgtattgcagaatacaacagaaagctttggagcgtacatatctaacagacggcacataacctctacctttgtcttcggctttacttcataataatactgggttaccttcggaacagtcagttctttcttaaccaccttcacagtcacaggctccttctggaacttgtgcgcgatgtccgcgatcgcctgaggcatggtggcggagaacatcaccgtctggcggtcttccggaagctggcttaagatcgtctccatatcctctaagaatcccatgttcagcatctcatccgcctcatccataaccacggtatgaatatggtcaaatttcaccgttttgcggcgcatatgatccatcacacggcccggtgtaccgatgataatctgagtgccatcctttaaggaacgtatctgtttaacaatgtcctggcctccataaatcggaagaaccttgacaccatgcatatattttgctaatctacggatttcgtcagccacctgaattgcaagttctctggtgggacacagggcgatcgcctggagtttcttagattttggatctactttctgtaacagcggaataccaaatgcggccgtcttaccggttcctgtctgagcctggccaatgatgtccctgccctccatctgtaccggaattgcctgcgcctgaatcggtgaagcctcctcaaatcccatgtctgctactgcccgcaaaattctttcgtctagctgtaattcatcaaatctcaatgtctccataaataaataagtcctttctaggcctgccgggttctactgttgccgacggccgcacacacacacttttcgcaaagaaaacgagaggtgtcaggtatacgtttcagaccttcatcctctcgtttcacaagtttaaactataacagaaatatttttttatgtcaaggagttttctctatatccatgatatctcaactagatatttttctgtagtacacaaatcccatgcgctcttaagcagtccaaaacctcctgcttttccctttccgtctgaaatgcccagaccggaatatttaaaaaatacggacctttcgtaaaaataaatacctcttttttactctccactaccctgtaaatcatgggataagtcaggttccactgttccttatccgtacagaggctgattccggaccggccgaaggaaatcacctggcgtccggttctgtccggcaccgttttcccgcgttttaaggcccgttttacgccgcggtaaatccctctcctgctgcaaaggatctgatatgcaataccagtaaacagaatcataataataccatagaccacagcagtcaccggatccctgtcccgtataaatgataagatgccaacgccggtaagcagaaacaacgccagtatcagagtcatgctttccggcattttaagcgcaaaccccgtccgcatcatataatacttgcccgcagtcagtgcctccagccattctgcctcctcctgaatgaatgcaaaggaatatatctgctcttcaggacttatgatctccgcctgttggtccaggggatccataaaggcctcctgctgctgcttttccttcagaaaggcaagacagcagtccatctcatcttcgccggtaaatgcggaatccggaagtgtcagaagcgtctttaccgtcccgatccgcttcatataaaccagaatctgatgcctcgtcttttccgcatataaaatagaggcataaggataacagcttacgccttcctctgtgtacatctcaatccgatgctcttcaaaccgcaccagctgccggtgcataagcggaccccttatgattctgaagtattggactgttttaatgagaacagcaagcactacggcaatgccaagccacagtccgattccggcacacagatcggtgagccaccagagaatggatgggtcatgaccgccgagcagcagcccaacgcccacggtgtagatcagggatatgaaagcaatgattagcataactgccagaattttcgattccttcatcccgtccttcttaagcctcatatccgacatcatgcgccgaatatctttatttgaaagctgaacctccagttcacgcattggcgctgcctcctgtcattctattatttctcccacgctgtagtacctcttcacctcattatatatcacagaagtaactgccgcaagtcataatgccccatcgcaccataccgaaaaatatctaatccagaaaaatattcagaaatattttcttgacagaaattctctctgcatgttactattagtccgttaccggactattttaacgatatggaggttcttcgattatgtgtgatattttgactgaacagctgcagcactacaccgtactctggcgcgaaaccagcgccctgtacgaagaatgggcaaaaagacatgctctctcctattacgaactcctggttattctttccatcatgaacccagacggcccgtgtcttcagaaagacatctgcacccactggcagctgccaaaacagacggttaacaccatcttgaaaaactttgccgggcgcggctggatcacgcttgtaccttctgcagaagaccggcggggcagggtcattctgccaaccggcacaggccggttattcatggaagcaaccgtttccgacctgcaggctcatgaaaaatctgtctggcagaggatgggacaggagaatgccagggcactgttagagagcaccgcactctataacaaactatttaaggagactgactcaaatgaaactgcataaagaattttttcactgcgtcattccttccatgctggcctttgcgctgtcaggcgtctatgccatagccgatggcttttttgtaggcaacgccctgggcgacagcgccctggctgcagtcaatcttgcatacccgctgacagcgtttttacaggccgtcggcaccggaatcggcatgggcggtgcgatccagtacgccatcagcgcaggtacggaaaatcacaaacggtgccgccagtactttggcatgtcactttttatgttaattatttccggactttttctgtcgattctgctgttgttcagcgcccctgtggtcctccgttttttcggtgcatccgggacaatcggagagctggctcaggagtacattctctatattgctttcggtgccattttccaggttctggggacgggactcgttccttttattcgcaatatgggaggcgcggtttcagccatggccgcaatgatcgcagggtttctaacgaacatatttctcgattatctgtttgtatggcatcttcccttcggtatgatgggagccgctgctgcaacggtgatcgggcaggcagtaacctttctggtatgcgcggcatttttcattgcgaaaaaaaagataccgctgctccggttcggaggaaatggtgcctttctcttcaaaacgattctgaagacagggctctcccccttcggacttacattttcaccgaatatcacgctgatcctgattaataaaagcgcagctttggtcggcggtgctgcagccgttacctgctatgcgccggtcagctatatttccgctattataatccttctgctgcagggtgtcagcgacggctgtcagccgcttatcagccgctcctacggtgagggacgccacgaccgcaccagacagttccggaacctggcgtattgcttctctgccatggtttcactcctgtgtatgggactgctgtttctccttcgcgggcaggcagccgcactgttcggtgcctctcaccagattacagcccgcgttgcagatattcttcctgtttttctgagcggctacttatttgtcagcatatccagggtgacgacagcatatttctacgctgcagacaaagacttgcaggcctgcatgatgatctacggggaagtgataattctcttcctgctgctgctcattttgccgccaatcatcggtatcagcggaacgtggctctcagtaccgctctcacagctggcagccatgtgtatcagcatttatctgattgtaagggaaaagaagaacgcataaaattatttttatatagaaaactattgacaaactgcttttttgctgttaggatgttcaataatttattaatttcaatatttttgaacatactatcattccaatgcacaccacaaggaggacaaatcatgaacggattggacaacaacagcaaaaaagcagaagcagaccagataatcatacagatgggtacagagcagccagcagcagaagaaacctggaagcagatctggacacgcaagggaaaggcagagggcggcatagagaatcttcttgccttcgatggatatgagcgaacccaggttaatatgaaagaggtggctgctgagatcagccgccgcctcgatattcaaaaagaagataaagtactggaggtcggatgcggcgccggagcgctggctcagtacctggactgcgattataccggcatcgactattcccctacacttgtcagacgccacatcgagctgctgcacaatccggtcttggtaggcgaggccgccaatctgccgtttaaggataaaacctttgataaggtcatctgctacggagtatttctttattttgataacaaaaaatacgcccaaagggccacagaggaacttttacgtgtggcgaaaaagggcgtactgatcggtgagcttcccatccggtcccacagaacggaacatctgctttttactccggaggaatttgagggctgggatatcagcgatgggttttatgatccctacagaaaagacagattcaacgcggtgctgaccttctgacagggcatcggctttcttccttgttacatggaaagttatctgtaaaagactgcctgcttatccttccggtaagcaggcagcctctgtatattctgtattctatttcatccggtaaaccggatccgccggatatccgccgcggatcttctgcattccccgctgaatggcatccttggactgcttccagtccgcatcgcggtttaagtaatcgtatttctcaataaaccagtccacatctgcggacaggcgttccatgttgcgttccatcacctcgaagatcatgggataaaattctttgcgctcggcatcatttaaaaaccggtccgcaccggcgcacagctccgcaaaatggtgcaggcagaatccttttccgttcttaaccttctcccggaaagccgcatcctttttatacagatgaaaaaatgtggcaatatatctctcgtagacctgattaaaacggtcacagatgtaacaggtccgctccttttcgctcacccacttctcaatggggttcccgttcccgccgtcccgtttcccggcctttcccgtgatccggtccatcatggaggtttttcccggcgtataatctttaaactcggctttcatctcctggattaactttttataatacgtctttaaaatccagccgttccccagcgcatttccatagtcaaacatcttcttctggtgaacccggcagaaaccggccttgtccgtcgcttcccttgtatcgctttccatataggaagcacaggaaccgagaacgaaatccattaactcctgctctgttttccgttccacaaagcagaatgggcattcatcgtcctcgtccatagcgtcattcattggtatttcatacagtttttctttcattttgccgctccctcttacaccttaaaccgataccccacaccccatatcgtttcaatgtactgcggctttgccgtattaaactcaatcttctcccggatcttcttaatatgcacggttaccgtggcgatatctccgatggattccatatcccagatcttactgaacagttcttccttggtaaacacatggttcggattctgtgccaggaaggtcagcaaatcaaattccttggtcgtaaagctcttctcttctccgttgacccatacgcgtctcgcggtcttgtcaatctttaagccgcggatctcaacaatctcattgtccggggttccgctcccgatcagtctctcatatctggccagatgagccttcacgcgggccaccatctcactcggactgaatggcttcgtgatataatcgtctgcccccagccccaggccgcggatcttgtcgatatcttctttcttcgcagataccatgataatcggggtattctttacttcccggaccttgcggcagatctcgaatccatccacgcccggaagcatcagatccagaatcaacagatcaaagtcctcatgaagagcctttgcaagcccggcttctccatcattctcaatctccacctcaaagccgctcagttccagataatccttctcgagctctgcaatgctctcttcgtcttcaataatcagtatcctgctcattctgcaataacctcctggtattttcttagtacaaagtgtatctccgtgcctatgccttccttgctggtcgcccagattcttccgccgtggtcctcgataatcttcttaacgatagaaagtccgataccgcttcctccctgagatgaatttctggaagagtctgtccggtagaaccggtcgaaaatgttgggcagatccttggccgctatgccttttccgttatcctcgatctcaatctggataaaatctcccacgtctttaatccggatattgataattccattcttcttatcaatatacttcacggaattactgacaatattgttgatgacgcgtctcatctgctctgcatcggcgatgaccatcacgtcctcatccacatagttaaaatatcccagttcgatattcctcgcttccatctccagccccacctcatcgacacagtctctgaagtagctggccacattgatcttggaaaacgtatagggaatcttgttcgtatcgatcttcgagtagaaagtcagctcgtcgatcagcttatccatgtcattcgccttattgtaaatggtccttatataccggtccagcttctccggcgaggacgccactccgtccatgatcccttccacatagcctttgatcgccgtgatcggggtcttcaaatcgtgggaaatgttgctgattaattctttattttccttgtcatactggatcttctcttccgcgttctccttcagcctcatgcgcatctcttcgaaatcctggcacagctggccgatctcgtcgtcattctccacttccagtgcaaagtccagattgccgtccctgatcttcttcgtggcctcctggagccgccccagcgggtgcaccacagaactgtagacccacatcatcaggatcgcgtccgtaaacacgatgatcagaatgaccgccagaagcatctccgccatcatggccttgatctccggcagaagtccgtctacattggatacaatgaacacactgccctttccctcatccgggtaaaggaaatccatctgcttgaccagatgctgcgtatccccatccagatagatggctccgtcaatactgctgtccacatcttcatacttgggcagctgatcgaggagctcctgggtcacatgactgtttccgtcaaatacgatctgatcgtctttccgcacaatcatatatgcatatttattcgaaagcttttcattcagcttctgcatatattccatatcactaaacttctccggactgctgtctaaaatcttttcgatttctttctgctcaacctgggtcatccggttaaaaatctgaagggaattaccggaaaagagatttacctgctccgttaaattatacgccttgcggaaagatttcatctgataattgctgagtcccgccacaaccgcataaatcagtgccagcggaactacggtaataatcacaaaagcgaccgccagacgtgtccttaattttagtttcacaacgcacgtctctcctctgcttatagtattccattttatacaaaaatattataacacagattgaagaccgcatttataaaactattataaaatttgcctgtacctttataaacttaccggaatacgatcctgattacacaaaacaggtgagaaagaattttcaaacgccttccggcgcacttccaattctttctcacctgtttttccccggccggataccgggcgtctcacgctatttcatttatcaattataaatacttcttcaaaagttccaccttatccagcttctcccacggcagatcgagatcatttcttccgaaatggccataagcggcagtctgcttataaatcggtctgcgcagatccagcatgcggataattcctgccggacggaggtcgaagttttcacggataatctccaccagcctgtcatcgcttaatttacccgtgccgaacgtatccaccatgatggaagtcggatgggccacaccgatggcataggacagctgaatctcacacttgtcagccagacctgcggccaccatgttcttagccacgtaacgggccgcgtaggccgcggaacggtccaccttggtgcagtccttgcctgagaaggcgccgccgccgtgacgcgcatatccgccgtagctgtccacgatgatctttcttcccgtcagtccgctgtctccctgcgggcctccgataacgaaacgccccgtcggattgatgaaaaacttagtctcctcatcgatcatgtcagccggtattatcgcgtcaaatacatactttttaatatcctcgtgaatctgttcctggctgactgcctcgtcgtgctgggtggataataccactgcttccagacggattgggcggccgttctcatcgtactccacggtgacctgtgtctttccgtccgggcgtaaatacttcaaagtgccgtctttgcgcactttggtcagctgaagcgccagtttgtgagccagagcgatcggataaggcatatactcctccgtctcgttgcttgcgaaaccaaacatcatcccctggtcaccggcaccgatggcgtccagctctgcctcagacatcgtgtgctcctttgcttccagagccttgttaacccccatggcgatatccggggactgttcgtccagggatacgatcaccccgcaggtatcacagtcaaagccgtatttggcccggtcatagccaatctggcgaacggtttcgcgaaccaccttctggatgtctacatatgcgtgagtagtcacctcacccatcaccagcacaagtcctgtggtacagcacgtctcacaggccacacggctcatcgggtcctgctttaacatctcgtccagaatcgcatcggaaatctggtcgcacattttgtccggatggccttccgtcacggactcggatgtaaataataatttctccatgttgtcatttcctccttatgtacatgggggaataacaaaaagaaaagcccgcagcaatgcggacttgatcaatcatgtatcaaatcctcttattgctcgatttctcgctcaggttggcaccttccgtcctctcctgactgcacaccagtgtgcgtcattcaggccggggttgccgtgacttcacagatccttttatctccatcactctgaataagggatattacgtacttttcaattgttattctgtttcctgttgtttctgttgcgatattaatattatcgtatgaacgaaaccttgtcaagcatatcttcacaaaacccggctcccgttcaaaaatttattgactgttcaaccgccttcaaaagtgatatgatagagtcagtaattacaaaaagtgtacgaaaatgtcaaaagcaggaggaaatgaaactatgagattagtaacacgttctgactttgatggtctcgtctgcggtgcgcttctaaaggaagcaggcgtcatcgaccattggaaatttgcacatccgaaggatctgcaggatggtctcgtcgagatcacggaggatgactgtctggcaaatgtcccctttgtagaaggctgcggcctttggttcgaccatcactccagcgagtttgaacggctcgaactggaaggcaaatacaagggggagagccgtctggctccgtcctgtgccagaattatttacgaatactacggcggaaatgagcgtttttctcattttaatgaaatgatggaggctgtggataaggtcgattccggccacctcaccattgacgaaatccagaacccaaagggctggatcctgatcggatttctgatggatcccaggaccggtctgggacgctggagaaactttaccatatccaactatcagctgatggagcgtttaatcgacgcctgccgcaccatggataccgcggaaattctgaatcttccggatgtaaaggaacgaatcgacgtctattttgagcagacagaaaaatttaaggccatgattgcgcagcacacaagagtggaccacgacgtcattatctccgatctgcgcggggtcgatcccatctacaccggcaaccgtttcctgatctacagcatgtatccggagcagaacatctccgcatggatcgtcaatggaaagggcggcatcggctgctcggtcgcagtcggatacagcattttaaaccgtaccgcctctcttgatgtcggaagtctgatgttaaaatacggcggcggcggtcataagaacgtcggcacctgccagtttggcgatgaaaccatggaagaagagcttccaaagctcctgcatgacctggtttatccaacgctttaacaggagccccttactactgtttgggcggatattcctctgccgtcatacaacaaaatcccgggaagaagttcttcttcccgggattaaacttatctgtatccgtttggattattggactgccatctccaggaatcttcacacatctcgtcaattcctctttctgcttcccatcccagttctttctttgcaagcgccgcatccgcgtagcactcggcgatatcgcccggcctccgtggtttgattacatatggaatctgctttccgcaggctttcgagaatgcttcgatcatctgaagcacactgaatcccttgccggttcccagattatagatacgtacatccggctccgactgagccagtttatctactgcctttacgtgaccgatagccagatccacaacgtgaatgtagtcacggacgcccgtgccatccggcgtatcgtagtcattgccgaatacgcccacttctttcagtttgcctacggcaacctgagtgatgtatggcgttaagttattcggaatgcccgccggatcttctccgatcaggccgctcttatgagctcccaccggattgaagtagcggagtaagatcacgctccattccgggtctgcagtatgtaaatcggtcagaatctgctccagcatgctcttcgtctggccgtaaggattggtaatcgctcccttcgggcagtcctcagtaatcggaacgaatgccggatctccgtacacggtggcggaagagctgaaaatgatctttttcacgccatggtttctcatcacgtcacacaggacaagcgtgccggtaatattgttatgatagtattccaacggctttgccacggattccccaaccgcctttaagccggcgaaatgaattaccgcgtctatcgtctctttgctgaagatctcttccatggcgtctttgtccagtaaatccgccttatagaaggtcacgtcttttcctgtaatctgttttaccctgtttaaggattcctcggaagaattgcataaattatcgacaacaacgacttcctgtccctgattcaacagttccacacatgtatggcttccgatatatccggcgcctccggtcactaaaattctcatttactttcctcctgccatccttaatatttacgcacaatcgcttccatatcggcccatttcttctccatgtctgcaacaagggcaaactgggttctggttctgtccaggttatggttctcacggctgatgcggaaatacgtatctccctgcaggaaatccgtcaggaaacgcacgccgcattcaaaggtcataagcttggcacccatcggaagcatatcgcgctccgccttggttaagctgccctggcagccttctaagaatccctttgtatatatctcaaacaacggaagggaaagggacacaagacttacatccggctcatcctcgtcggctgtattggctccgaaccggatggaatcaccgaaatcgaaaatggacagccccggcataatggtgtccagatcgatgatacagagagcctctcccgtaatgtcgtcgatcataatattatttaatttcgtatcgttatgggtgacgcgcagaggaagcgtcccctccttcagcatattcatggcagctcctgcctcatcggcgcggtccatgacaaactgaatctctttctgcaccagatgagcgcgtccgcacacgtcctcttccaccgccttcttaaatgtctccagacgaaccggtgtattatggaagtttacgatcgtctcagtaagctcctccgccggatattcggctaactggcgctgaaaatggccaaaggccttgccgctctggtaaaagtcatccggattgcgcaccttgtcaaaacaggtggctccggagatgaataagtaacctctccagtaatttccgtcgctgtcctgcacgtaatccctgccatcccttgccttaacgatgtttaacgtctcgcggtacggatctccgccctgggcagtgattttctcacgcaggaaggaggtgacgccggcgatattccgcatcagagacaccgggtccgtaaagatctcatggttaattctctggagtatgtatagattttccttctccccgtctctgcataccagccgaaacgtatcattaatatggccgcttccgtaacgttcccaggaaacaggctccccctcaaagcttaagaggccgattgcctctctgatcttaccacactgtgcgtctcccattacgcttcctcccataatttttccggatagcatccggcttccttcagtccttttatggcgttcactaccgtttccttatcttctttataggtaactccgtaccagcggtcgatgctcttaagcaccgtcacgtctgcttttccctcttttaacagttcatctaccacgaagggcaggaaatactcgcatttgatcggattcttcggcagttcccggtctaagaaggcggcgaatctggcgtcgatctcctttaacacgctggccgtgaagccccacatgttcatggatacgatcgtctcctcaggaagctccgtccatgtagcaccgtcgtcctccgtaaattctgcgatgtcgccgtgtttttcgattctcgtcctctcatggatgtccaccaggcggctgttctcgtccgtcgtgcagacgccgcgcgccacatggccattctctgtcagggtattataaagcttatatccaaccatcgtgtactgatacttttcattgtcagaatatgcaaccagctgatcgtaaatggattgaaaggcgctcttgccgtagtaatcgtcggcattgattaccgcaaacggtccgtctaccacatctttgcagcataggatcgcatgagccgttccccatggcttcacacggccttccggtacgctgtagccctcaggaagcttatcgagttcctggaacacgtattccacctgcacgtattttgccatgcggtctccgatctgctccttaaactcctgttcgatggctttctttataataaataccaccttctcaaatcctgcttccaccgcatcgtaaatagaaaagtcaatgatcttgttaccgtatgggtccaccgggtcgatctgcttcagaccgccgtaacggctccccatccctgctgccataattaccagaactggtttcttactcatcgcaactgcctccttcgagaatttcatacacttcttactaactccagtatagtgaatatccagcaaaatatatttgcactatctgttattttatttgcattatcgtacacatttcactattttaccacagaatgtgatatactgtaaacacttagcgaggtcttttcacgaagggaggcagtcatggaatacaagagcacggtgcttcggcccagtgccgttgtacacagagttatttccatacactattttgaatacatgagcgatttctcatttccgggagagagtcacgatttctgggaattcgtctgtgtggacaagggagtgattgacgttatggccggtgagaaacggattcctttaaaacgcgggaatattattttccatcaaccgggagaatttcataacattatcaccaacggcgaagtggcgccgaatctggtggtcatcggatttgagtgccattccccctgcatgaaggcgtttgaagggaagatactcactgtatcggagacagaacgggaactgctggcgagaattatcatagaagcccgcaatgcgttttccggtcggatggacgacccatatcaggaagaactggtacggaatccttctccccttgcattcggagctgaacagatgatcgccaactacttggaagaactgatcattcatctctaccgaagatacttcgaaaatcccgggcagtttaaaaccaggcggcagccggaggtgcacattaagagcgacgcctacaaccggatcatccgctacatggaggaacacatcggagagcggctctcccttgacaccatctgccgcgatacgctgacagggcgttcccagctccagaaaatctttcgggaagcgcatgggtgcggggtgatcgactatttttcttccatgaagattgacacagccaaacagctgattcgagacaatcacttaaatttcaccgaaatatcggaccggctgggctatacctcggtacactacttttccagacagtttaagaagctgacggggatgacgccttccgagtatgccacctccattcggcgcctgtcagagtacagtacatttggaaacaggaaagaagaaggctgacagaaagattgagaaatacagaatatttgctttacgtcagaaaggagttattatgtcacagaacagagaattaccacctaacattgtcctcatcatgaccgaccagatgcggggggattgtctgggcatcgccggacatcccgatgtcaagacgccctatctcgattccatcgctgcaaaaggaatcctgtttgatcacgcctattccgcgtgccccagctgtgttccggcccgggccgcactgcataccggcatgagacaggagcaccacggccgtgtgggataccaggatatggtaaactggaattatccccataccatggccggtgaactggcagccgccggctattatacccagtgtgtggggaaaatgcacgtgcatcccctccgcaatttaatggggttccacaatatagagcttcacgacggttatctccacgcctaccgcgatccggcagctgcctgggaagagtcccagaagcaggcggatgactatttctactggctgaaacaggagctgggagccgatgcggatgtgacggacaccggcatggaatgcaattcctgggtctccagaccctggatttacgaagagaaataccatccgaccaactgggtcagcacgcgctccatcgattttctaaggcgacgtgacacgtcgaagccatttttcctgatggcctcctacttaaggccgcacccgccgttcgatgcaccgcagtattatttcgatctgtatcgggataaacagctgacaccgccggcagtgggggactgggaagatgaagattttacaggggattaccagcgtctgggaagaatctatgattccgcgaccggccctgtggacccggaactgatccgccaggcccagattggttactatgcctgcattacacatttagatcaccagatcgggcgtctgattcaggcactggtggagtataagctgatggacaacaccatcatcctgttcacctcggatcacggcgaggagttgtgcgaccaccatttgttccgtaagtccaggccttatgagggaagctgccgcatacccatgctcctttccggccctgagaggctgatacatgcggctccgggcaccgtatgccacagtgtggcggagctccgggatgtgatgccgacccttctcgacgcagccggtgctcccataccagagaccgtggacggaaaaagtatgatcccgaatcccgacggaacgctccccgtgatccggcaatggcttcacggagaacatgaggcgggagtcaactccaatcatttcattgtcacggaacacgataaatacgtgtggtactcacagaccggccgggagcagtattttaatctcgacgaagaccggcgggaactgcacaacggcatcgccgatacgcagtatcaggaacggatcgggctgctgcgcggattgctgatcgaggagctgaaggagcgggaggaaggttattccgatggtcagagactgatcacaggaagggagaccacggtactgcttcagtccgtgtttggaaccatctgacccgcaggcgctctcgttttaaagtctcctctcaacccgctccagtccggcgttcagcacaatcgccagtccggccgacagcacggttccccagagtatttttactacattcagcgtccgcaggccgtcaaaaagaattgtgcccagaccgccggcgttgatggtggccgcgattgtggcgatacctgtcgtcgagacgatggcaaggcgaattccggtaaagacggaccgctttgccagaggcaggcggatctttaacaggatctgcatcgtcgtcatccccatccccgcagccgcttcaatgacagaggaatcgactccgttgagccctgccgtaaaattgcgcagaagcaggtactggttataaagggtaagtacaatcaatgccgttttcgttcccagccctgtgacgggaatcagcatggcgaacatggccaggcttggtatggaatagatgacggaaaacagatggatcagaccattcgacaccgtcttaaaatacatggcgcagaccgtcagcgcggctgccagaatcagggagagcaccagcgtaacagcaaccagcattagatgctgtcccagcgccccatacagtttttcgggatatttaagcgcatattcaatcaatggtcatcctccagaattcttcctgctccctggccgaacggatcagggaggccacaaaatcatccgccggattcttcacgatacgggcgggagtatcgaactgcctgaccgttccctcattcatcacaatcacgcggctgcccagtttaaatgcctcattgatatcgtgagtcacaaacaggaaggtcttcttaagcccaccgtggattcgaaggagttcatcctgcagcttcatgcgggttatcgcatcgatcgctccaaacggttcgtccagaagcataatcttcggatttactgccagcgcccgcgccagccccacccgctgctgctgacctcctgagagctgggagggatatcggcgcttaaattcctccggcagaagtcccaccagatttaacagctcgtccacccgctcatccgtctgctttttgtcccagttaagcagtttgggaacaacggagatgttatctgctatggtcatgtggggaaaaagaccgatctgctggataacgtaaccgattcgtctgcgtactttgactacatccaccgtagatatatcctcgccaaacagaaaaatctttccctctgtcggctcatataagcggttcaccatcttcagcagagtggtttttccgcttcccgatgagccgagaatcgtgataaactcgccttcctcgatggtcagactgacccggtcgaccgaagggagggcagcattattaaattttttcgttacattctgaaattcaatggcagtctgagacatgagtccctcctctccttagtttagtgaatcgtaatattcccgggcgacttcctcgtattcccgcttgtccacgtcgacctccgcgtttaacgcggtaaccgtatccgtgtccagagacgcgctgatcttattcagaatatctgcaatccccggattcttttcgagtacatcgtcacgaaccaccggagccagattataaggcggccacacctgtttgtcgtcctccagaagcatgtacttgtccttctgtgccagctgaccttctgtcgtatacgctggcgccacatcagcttctccattagaaagcacttcatactttaatccgccgtcatagacacggctggatttccagtcgaaggctccgtacttctgttccagtgccggaagaccatcctccctcgcgtcaaattctccctgggaggcgaagcgcagctctttggcatgcttctgcaaatcagaaatggtacggattcccagctgttctgccacatccgtccggatcaccagtccctgtccgtcgttggctttcgaataatccagccatgtcacctggaaacgcttttcatattcatccttaacagtccggtatacttcttccggatccgttatcatgtccatctgcagaatcgaaagcaggccggttcccgtatactccggatacagatcgatctcgttgttaatcagagaggtgtgaaccactgatcccgcaatgtcctgttttctttccaccttatatccggcatcctgaagggccagcgcgtagatttccgaaacgaccagactctcggtaaagtctttggagcccacccggatgacatccttcccggaagaggaagccccgcacgcagtcaggcttgccgccatcacggcggtgagcaccagggctgccgctgtttttatactgctgtgtcgttttaatccactacttctttttattctgtcctgtttttttaatccatcgtatgcttttattccatcctgttttttcataaaaattctctctttcttttttgtttctgccatccctgatgcggcattatccccgctgttttccttctgtctaaagtctcccggcctttctcctccccctgattcttcgtttcggtgcagtctgaagatatggagtcatcattttctcgatcccgtccagaatcgctcctgatacaagagacagcagtgccacagagattccccccaccaggagtaaatccaggcggtttagtcccagcccggtaaagatcaggcctccgagcccgccggctccgatcttggcagcaagagcagcgctggccacgatctcaatcatggcggtctttacacctgtcataatgagtggaaatgccatcggaaacttcacgcggtacatcacctgtttttctgtcatcccaagcccgctcgccgtttccagcataaaatccggtacttccgtcaaccctgtaactgtattgagcaggatcggcggaattgccagcaataccagtgcgaccagggccggcttcactcccgtccccagaaacggaatgagcagaatcagaatcgccaggcttggaacgatacgcagcgtctggaacgtacctgtcagccatttttccagcctgggagaccggacgcagacatatcctgcggatattcccagaatcacggatattgccagcgccatcaggctgatcgccacgtgctcccggagtacggtgagatagtcgtccatatggctgccgaaatactcccaaattaatgatatcgtatcaatcccctcctttcctatagaaattataggaaaaaccattgacattcttaactgtaatcactataataacagttaagaaactgtaactatttttattacacatcttattatacgtcaggaggcaaaagtttgcaagtacaaaatggttatctcggaacatatttctctgcacaaagtgccggtatctaccgttttcagtttgattctgataccggtatcataaccgaaccggaattgtattatacagcacccgattccaaatacttatccctctcccatgggctgcttgcatccccgctgatcaaagaggggagagcaggcgtctgcctgattgacactacaggagagcgcccgcttctggcaggtgaattatttgaggagacgaaaagcgcctgttacgtcattcaggatgacacatttatctacacagcaaattaccatgagggaagtatccttatttaccggaaggaagcccacgccatctctcttagcaaacgcattgagaccggatatcaggcgggctgtcaccagattctgtttcacgggcatatcatgatggttccctgccttctccgcgaccagatcctgctgttcgatatggaccgtgattttgccccggcaggttccatcacattcccacagggaaccgggccaagacacggagtctttgaccgggctcacaggcgctttttcctcgtcagcgagctctccaatgaactattcctgtatgaagccggaactggaccgcaatttacattaagaagcgtacaaaagattcttccggagggcagagtctggtctccggccgctgcctcagcagctgtccggttatcccctgatgaacgctttctctatctgtcaacccgttttgcagatctcatcacggtttaccagttagatggctttcaagctgtaaagatccagcagacggaaagcggcggctcccatcccagagatttcatactcaccggcgacggccgatttctgctcgcagccaaccgctatgaaggcggactggcgagcttccggataaatcccggcaccggtatgattaccgggctgtgctccagaatcgctgctcccgaagccgtagcggtggtccttgacgggccccataccctttgaaagcaaaaaagcaaaaagaacctcagaaatgaagaacctcataaaagaaaggacgtacccctatgaatgaaaatttaaagagaacaacaccggaacatgagcttttggatatcggcctgatcggtttatccgtcatgggacgcagcctggctctgaacatggccgatcacggcttccgggtggccggttataaccgcagccctgaagtcacccagaaggtcatggaagaatacccgcatcctaatctgacaccatttttcagtctcccggaactggtatccgctctgcgaaagcccaggaaaatcatggtaatgattcaggccggtgctcctgtagacgctgtgattgaccagctgatcccacttttagaggaaggcgattttatcatggatggaggcaactcctatttcggagacacgaaccgccgggccgcgctgctgaaagaaaagggactgcactacctaggcgtcggcatttccggaggtgaggaaggtgcaaggttcggtccttccatcatgccgggcggctcccgtgaagcttacgaagctgtgggccagatccttcaaaccattgccgcaaaagctgacaacaccccctgctgtgcctatatcggtcctgacggcgccgggcattacgtgaaaatggtccataacggcatcgagtacgccgatatgcagctgatcgcagaatcttaccttctgctcaaatatgccggcggcttcaccaaccgggaactggcggaaatctaccgtacctggaatgagggagagctgcacagctatctcatcggcattaccgctgatatcttcctcgaagccgacgacatggctgacggagatttaatcgatcatattctcgacagcgcaggtcagaagggtaccggccgctgggccagcatcgaggctttaagacagggtgtggatatctccatgatcaccgccgcctgcaacgcccgcatcatgtcaaaccatctggagcggcggcaaaaagcctcctcccttatcgcagcccctgtcatcacggctgccggggataagcaggctttcacagaaatggtgcgtgaagcactttacatcagtaaaatcatcgcctacgcccagggattctccctgttgcaggatgcctcccgccgttttggctgggatttagacctcggcagcattgcctccatcttccgtgccggctgcatcatacaggctgaatttttaaatgatatcaccagggcctttttaaaggcgccggatctggagagtctgatctttgacgatttcttcttatcccgcatcaaccggtatcaggagaatttaagaaagacagcgggtctggccgtctcctccggcctgcctgttcccgccctcttcaatgccgtatcctatctcgacagcttccgcacaaagacggccggagccaacctgatccaggcacagcgtgaccttttcggggcacatacctttgaacgcaccgacaggaaaggtatcttccatcatgaatggagggccgtccatgaattatgacgtctgcattaccatcttcggcggaaccggcgacttgaccttccgcaaactgcttccggcgctgtataccatgagccggacgagaaaactgcccgtccacagcaaaattcttatcatcggacgccgcgattacgataccgccgcctatatttcccaggcccgggactggatccgcaaattctcccgcctcccctattctgaggagctgctggaggactttgccgcccatctggagtattaccggatggatttttcagacagatccgcctatgaagggctgggacaggcctatgaggccatgcaggcggcatcccacatcttctattttgccgtcgccccccgctttttctccgtcatcgcggcaggccttaaaacgatcaccgggttaacagacgggaagatcatcattgaaaagccctttggggaaacgctggcctcagcgagagagttaaaccggcagctggaatcctgctttgggccggacaacatttaccgcattgaccactatctcggcaaagaaatgataagaaatattcagacaatccgtttttccaaccctgtatttgcaaacgcatggaatgggaaaatgatcgaggcagtagaaatctccgcactggaagatgtgggggtagagacccggggcggttattatgacgccagcggcgcgctcaaagacatggttcagaatcatctgtttcaaatcctgtccattctggcaatggagcggcccgaagctttcacaggtgaggaaatgcacgcccggcagctggaggtcttaaaagcattgagaccggtatcgccggaggatatcgaacagtctctcgtcctgggacagtacgacggctaccgaaaggaacctctggtctcaccggaatccgtcacggaaacttacgcctgtatgcggctctttatcgacaatgagcgctggagcgggacgccgttctatatccgcaccggcaaaaagactggtctccgtgaaaccgaggtggcggttatcttccgccgccccgatgcggagacagagcccgatattcttctgatcaagatccagccgacagaaggcatctatctccggttcaatatcaaacggcccggcgactccgaggaagtgattaccgccagtatggacttttgccagaactgtatattagaaaatcaggtcaacacaccggaggcctacgaacggcttctcaccgcctgtatcgaaggcgaacgctcctggttctcccaatgggaccaggtcgagatcagctggaattacatcgaacagctgaaacagctggcggcctcccggaacctgccgctttatccctaccttcccggcaccaggggccccagagaggcggaaacactcttaaatacctttggccaccactggctggaataaggaggaactcatgatgccagatacaaaagacaaacagataaaagaacagaaaaaagccgcggccgttatggccgcgggtgaactgcgtgacggcatggtcgcaggcctggggaccggtacaaccgtatattatctgatacaggaaatcgccaggctggtaaaagaaggacttaccattcacgtcctgccaacctcagaacaaacccggagtcttgccagtcagcttaacatccctctgctctcaaccgataccgccccggccgctgacttggcaattgacggtgtagacggtgtggacagccatttctggtccgtgaaaggaggcggcggcgcactgttccgggaaaagctgatcgcctccaacgcccggagggtgatctggatactggatgagagcaagctcttaaaccatttaagtgaggttccgctccccatagaggtcgtcccctttggcttttcttatgtcatgaaggaagtcgccgctctgggtttccggcccagactgcgcttaaacgacggtatgccctttctgactgataacggaaactatattttggacctggccggtgattcgtctatggattacagggaaaaatcggcattgctgaagtccttaaccggcgttgtcgaaaccggactgtttccggatttctgcgataaagctgataatcggcggagcggacggggtcagagtcctggaaaacaggtgaagaggctgacagacaatctatcagccccattatacttttaatctacctgacccgttccccgttcgcacggaatatttcgatcttatcctctgttccactcagggagaccggtatacgccaccggtctcctggcttaagatccggaatatcaaacatccgtgctccaattctcaactggtatccctttacctcatagcatggcagagtatttctgcataccagactgattccaccctcctgaattattacctccaccggagcatactctctttgcacagcataataggaaggctttgcttctcctttaagtccggtggatccatgcacccgtttcttccattttccttttccatcttctcccatctgggttctatagtcattcagacaaaaataaacagtccctgctatattaggatatttacgatagcagttcagtttctttaaaaatatctcttctctgcgcttgtctccccctgaaaaggcaggctcacataagccaaattccgaaggtataaccggtttacccggattggcggcaataatacggtcccattccccttcctgatccaaatcgccgtgccaagtaccaatgtaatcattcaccatcataatgtctccataagcagtaccgtccaaagcaggatccctaaaaattgaattagagacatagttagccaatctacccgaatccagccgatgtgtataagccactgccttcttaatgtactgaatcgtttctccagcctggccatccagctcattccctactccccacgcaaaaatagatggatgattttgatgagcactcaccatttcctgaatctgctctttaaatatgttccattggggttctcccgctacggcaggatcggcgccccagaagggaacttcttcctgcacaagcataccgtgccggtcacaccagtcatataccatgtcatcctgctgccagtggaaacgagtaagaatactgttagattccttcaggcacagcaacattttttcaagactttctttggattcagccattccatattcaggatctgatcccggcatccactctgtaccggtaagacgaaccggttccccatttaaaatgatctgacttcccctcacacgaatgtctcgaaatccaaagacaatagactgccggtctgtaatcgtatcaccaatctgtaaggacagctttacggtatagagattaggactgtcaaaatgccagtaccttatattatccagaattctccccgaaatctccgtttctcccctcttacagttaacgcagcccccagttaccagggtttcagcgccatcacaaccctcgtatagcttccacgccagagtgagcttttcatccattctcccatcaattccagtcttcaggccaaatacggcgcttccttcatcctgcctgcaatcgcaggcggtaatcatcggctttgccgttacgctggggcttaacaggaaactctcacctgtaatcagcatttctacaggtcggatcaatcctccgtcattggcccagtcaaaacttctttcataagggagcatgtcagatgaaaaacgattatccaccttcactgaaagtaaattttcctccccaaatttcaaatggtccgtaagttctaatacaaacggcgtataaccggagtattggtggacccccactttctctccattcagcaggacacacgcatcatgataaacagcatggaatagaattcgcactctcttattcctccagttgtcctgcggaataaacgtataagcataccagcccgtcccccagtaatcttctgtcccttcttctacattccatgtgtgaggaatcgatacctttgccgcctgttcaggacagcttatctcattgcctgaattaaaataccagttttttaaacttattctttccaatgccataatgtttactccttattgtctaaactacccttttaccgctcccgccgcaattcctttaataaatgttttggaacaaagactaaatattacaatcattggtaaaacagacagtgccagagcgcacataatggcaccataatcacttctgaaggagttggataagttgtttaccatcaaagggattgtgaacagttcctgtttattgattataataaccggcagcacataattgttccaggaccacaaaaagaccaatgtagaaagtgtgagaattcccggtttcacacagggaacaacgagccgaaaaaagattcctggttccgagcagccatccagacgtcccgattctaaaagttcgtcaggtaccccgtcgctgataaactgagtcataagaaaaacccccagcgggtgggctgcccatgcaaatatcagaggaagaagcgtactggaaagcctcagcgttctcatctccagcatatagccaatcagggatatctggccaggtatcatcataatagccataacaaaagcaaaaataatcttctttcctttaaaattatattttgccagagcaaatccaatcatagtagatataaggacactgatcgctacagaacagacagatactataatagagtttaaatatgcctgaaaatatcctttcgatatcaccatacgaagattattcagcaagtaattactcggcagtacaggcattgctttaaaaatatcttcactgtaatatgtgcccataataaatacaatatagagtgggaaaaacataatcagtgtcataaaaaccagaaggaactgctttatgactgaactcatccgtcttcttactttattattcacctttcccatcctttcctctgctgagtctaaagccaactacagaaaacagcataattatgataaacagtgtataggccatagcggaaccataccccagtctggaatcctgactaaatgcatcattaaagaatttccatactgttgtaagcgccgtatgaccaggtcccccggtctgcccattccccagagaagcccagccgctgaataaaagctttggttcctcaaacatctgcagaccaccgatcagagatgttataattaaaaatctggttgtattacgcagcatgggaacggtaatctttgtaaatatcttaaagttaccagccccatctaccgctgcagcctcatagacctctgatgaaatggaggtcattgcggccagatagatggtcatgtaatatcccagataccgccacacaatcataataacaataattaccttagaggctatctcacttcccagccaaaaaaaaggttcatccagcgcgcccagccagatcatcagtttatttatatatcccgactgccagtcaaacaggtaagaaaagatgaaaccgattgctacaggagtagtaatataagggaaaaagtttattgtctgatataatcgctttccccgcccaatgtcaaaaagcagataggcaacccctaaaccaagcagcacagtgataggagtagaaaaagccatcaaaataattgtatttccaagagatttcagaaacagaggatctttggtaaacaggtctaaataattcttaattcctacaaatgtctttgccccaaacccgttccagtcataaaaactgattttcagagaatacagcatggggaacatgctaaacagaaaataggcggacagaaagggcagacaaaacagataaggccatttattcgctttatgcagggcactttttttctttttttccattatggactccaatctgtgcatttatcacacatatgaatcaggaaagctgccattcccggcagctttccctttctatcaccacattttgtcaatcttcaaatgttcgctctattttaaggtcgcattcggaatcaatgtctgagtttctgcttttaatatatccagcgcctgatcggctgtcatggatgaattggcagtcatctgggcagccacacttctcaaagcagtcttcacattagcctcatgctttgtctgcacctgtccctgagttgtaacagctattgtattgataaagtaatcagccagtttctggcccccaaagaattcgtcatactgccctttttcagagaaaaagtaggaattttcatcttcatatggcgccttgaagccagtcataaaaccatactgctcgtatgcctccttcacaccgtcacccgtacagtagacatcctgaatatactcccatgcagcttctttatttttacttcctgaatagatacttacagatgtccctccataagtaaatccgtttcccggagccttggtcagcccccagttaccagaaccattgggatcgttgctggcaattccccacttcacgctccacggagcgcaagggtaaaacataatctctcctgccgaatagctattattatatgccggtgtattgtcctcctgttttcccaaaagtcctgcctgattaaaccgggcagccgtttccaaaacggattgataccgccctgtaaggtcaaccgtatccccatcaatatagttgctgacattttgatttactaaaataccgtttagaaagatcgtcattccagggaatatcgttacctttccgccgctcttttcctttatctgctgtccaacttcaaaaactttgtcccagtcggaaatcatctcacttatttcatccggattatcggttcccaaatattctttagccagatccctgcgatacgcaaaaccgctcggacagatttgctgttctacgccgtatagctctccatttggtcctgctcccagttgggtaacaaaatcaaacatatcatctgcttttacattgtacggttctttgtaaagatcttccagaattcccaaatcaaacaccttacctctgtaaccgatctcactcaatataatgtctggagcaccgctgccactcgccagagcgctctgcagtttctgaaagtaatcgtctgttgagactaccagcgtattaaaatttacatttggatggcgctcatgataccattccgtcatatgagtcagatgagcctcatcccagtcccaaatggtaagagttacttcctccccttcaccgcctttggtatcggataatgtactttcttccgcggttgttgttgttttactttcaccgctttcattgctttgacaggcactgagagacgacatcaccatagccgcagtaagcaaaattacaaacattcttttcttcatatacaattactcctttccttcctccttataaagcttgataaaagttaccgtttctgaaatttacactaaatcttttcatgttccttcctgctttgaataaaacaagtatatcattatttttgcacaacaaaaatgatctatttttccttttaatggactattttacacaacgctacaactaagggccgccttttcctttcggaaggcagcccttttcttctaaattaccatatatattttatcgcaccagttcttcaatcatttctactccaacactttgttccgggtcaaacctgtcagaatccatatagagatatattgcggacaaaagcgccctggcttccggatactgctgcaaattctgaagccccagcgaagaaaccatcagccttccaccgccgcatcggcattccatcagctggatcattggacgcatataagcatagctgtccatctcagtaataatcgccttcatcggctgaggcagtatcacagctctctgacctgccataggccaccactgccagtttgtatgaaattctgtaggaaaattctcaaacagaggatgtttctcgtcaattagctgtcccataccgccttcctgtgcggcaaaattaccaacagaccagaagtccgtggtaaactgggcctgaatagaatgaggcagattctcctctctggacggcggagtcagataaacatgtccccctgctctcaggacctcttttgccttgcaatcaaagctttccgtctcatagacagacttcgggcataccggaaccccggcaggatagacccagacaggatacgtattgctcatatcgccaatttttacagttaaatccagacggactgccttttcaaccatattcaaaggtacttccagtgtgccagcatagcttacttctcccatagggcaatacgtctcgctcagagtaccttccacgaaaataccgtttccttttaacacatacatcggcttttcaaaaatatcctgcttgccgaaatttgccgccagaatgtccgccttcagcacttcatctgtattgtatgtgtacctctccagctgcaccagaggaagctggtcccgaaaaaatgcctggaatcgctctggttctgcaaagtgaaatggcttggggttaagatgtgaattgaccatccctacaagggcagtaccctgaccgggaaaatcctgcaggcctaaaagagaaataccggacagacctcttgtacgcatagcagcttcaatctcctcccggtatccaatccgggagagttctcccgatgcctccacataccgtttccagattggtaacaatccaagactttccactttttcctgaattattcggaagttttccggggctgatattccctgaaaagcagtgagttcatcaaaatcgggaagaacctcaaactggcctacctcaaagctaaatacaggctttttgtatgtctgccgcagcttctccatagaagtatcgtaatttgttctggcattgggatactgattgttaatgtacccacggatacgcccaatctttttctgcggtgctgcttctgccgcaaaggttccgcgcagaggttcgtcaaaataggactgagacgtataaaaatcactgtccggatcgcacccgattcttccataatgaacattggacccattagcatagagccgggtactgtccagtgtatgggcctgatccagcatacatttcatccttttatgtcccttctcgccagtgcataattcatttccaaaggtcagcataacaaaagatgggtgattggcaagccagtgtacggttagggcaagttctgtctgataataagaaaaactttcctctgactcaaaggcatctttaggattccagtgtgataactctggctgcatcatcattccaagccgatcagcagccataaatgccgcttccggtggacaatgggaatgaaagcggacacagttgataccataggatttatacgtattcagtatacctttccattccgcctctgtcataggcggatatccggtttctggaaactcggcacagtttgcctcacttcttaagaaaagggttctcccattcagcgcaagtctcccgttcccatcctccccgaaatttctcactccaaaagtgacggttttacctgtcttatctcctgacagtacggcagacaattcatataaatttccttcatattcatcccagcgtcttatatgatccgccagcgctaagtcctccagacagatctcattcattccttctgataacgtaatgggaagggtgacacagttctccgccaacgcttccgactgcagggtaatcgctcctttccatggcgcggcagtgctccccgctttattgccctttcctaccgatatctctacagccacagccagagtctcctgcacaggaaatacccgcaaagatgaaataaatatcgttttttctgtgcggagccttacatatcccagtactccattccagttagtctgtgtttcatctgtagctgccgaggaaaaaacaatggcgtcatgcggcaatcccggataactgttatccgaaagaagtgtcacttcagtctcctcattaagcagacccgtcacttcgaatacgtaaggcgtgttgatggagactggaaaaaagggaggaatctccttacctgctaccagtaatttcaggcagcgtgcacgctcagcctccagaaatacccgttccccctccttctgtttaaaggatatcctgcgggtgaacaacgcttctccttcatacgtatagtttctggtaaaccgggtggcaataggcgcgtccgggtcaaatcctgcatctgcatcctgcgcatccgaatgccactgattcattcccagatccctgtgtccaagcctattttcatctaacgttcccggcagtcttatgctgccctccgttccgtctctcagaactgccttccaaattccttccaatgaatgatacatattccgctcctttctctgaattattcaagtccgcttccatacagctactgtaactatactataaacaaacaatactgtatttcctaaagttgcggattttatttcgaaaaaatgcggttatatacgaataattatgcggtcgtgctgcggtattctgtaggtgtaactccattttttttcttaaacgccgtgcaaaaggcactctcactgggaaatccggcatcaaggctaatatctttgacggaaaggctggtatttttcagcatgtattttgccgcgctaattctaatattaacaatatactcatgaggtgtacagctggtatagttcttaaacatgcgaataaaatggtactggctaagcatcgcctgctccgccagtgtctgaatggtaattttccctgtaaaattttcattgatataagtaattacattctccattcccacagaatccccagcccacgtagtggctcttccgactttcttcccgccgcttttttcagatccatccaaaagcagggcagtccatatatctgtcagctgtttggaaagaagtgcctcacggatcggtcttccccccgcaaacgtctgataaacagcagtcagcttattcagcaccggatatgcgtcgataagggaaaatacagttcctagctgggacactgccaaattataatacgctttagccatctttccatcaaaatgacaccagatgctctcccatccagtgtctgaataataggcatgaggccgatagcagtccaataaaacaaaactgccggcagccacagtcttctttattccctcatattccagtataaactgtcctttttgtatgtacatcaataaatagctgtcgtaggatgtcctgtgcagctcataataaggttcatagataaaatggccggtacatatcggataaaagaacgtattctgtgctatcacactgggagaataaatataataatccgattccgcggcaatccggctttcacttactttcaagcagattcactcccttcggatctgtcattccttaaaatgaaagtaatcgctgtttttatattcctttggtgacattcccaccacattcttaaaaacccgggaaaagtaatactgatccgaatatcctagattctgagctacttcatagatatacatatccgtagtacgaagcatcgcgcatgcctttttcattttcagatgaataaaaaaatccaacggcgcatgacgggtatacttctgaaaaatcgaattcagataactcctggacagttcaaattcctccaccagagtctcaagtgtcagagtctcattcaaatgtttatacatatatctgattacattggttacatgtcggttctgttcctgggttgaattgtgtttctccctatcataagtctctgccaggatcagggacaatacctgcgaaatataaataaaattacccagtgtatagtttgcctccagaacccggaatagcagttcaaacaaaaaaagcatacggttagtggcattttgggtattcagtttcaccacacggtactctcttaaaggaaaatactgcacatcctctcccttaaaatgcacccacaatatactccatggatcttcctcacatgcatagtaacggtgtcccgtaaactgtggtatacagaacgcctcattttcatggagtacatatttgcttcccgctacttcaatggtaccactgccctccgtacagtaaataaagataaactcttcaatcccatcccttctctcccgataatggtgtgccgcacagggaaaaaatcccacatcagtcagatacattcttcgcacctgaggatgctcaacatagtcccggaaggattccgtaggaagcacaaacatccgttctcctttaaacccatctcttttccagcccataaaattgtccatgaaccgagaatatcatatttgcggaatattgtccatctttattcatgataaggcatttctatttcactttttaccatgataaaatagcgtcataacaaagttatagtcggcaatttactaagaaaagaggaattcattatggcaaatcatgtaagaatctgggaggaggactgtatcatcccaacctattcgatggctcctccagaaaaaagtcctttatttatcgaaaaaagagcttatcagggaagcacaggcaaggtatatcccctgcctgtcacagaaaaagtactggacgataagaaagacgtatcctatcgggccgtatatctggagaacgaatatttaagagtctgtgttcttcctgaactgggcggcagaattcaacgggcatatgataagaccaatggatacgatttcgtctattacaatcatgtgattaaacctgccctcgtcggactcactggtccatggatttccggcggcatcgaatttaactggcctcagcatcacagaccatctacttattctcctgtagattacacaaccacagtcaatgaagatggttcctgtaccgtctatgtaagtgaaacagataaaatgtacggtacaaaaggcatggccgccatatccctttatccaggaaaagcctacatagaaatcagaggccagctgtacaatcacacagatcttccccagacttttttgtggtgggcaaatcctgctgttccagtcaacgattatactttttctgtgttcccaccggacgtcaatgcagtcatggatcacggaaaacgggctgtctctacattccctatagccacaggagaatactacaaatgtgattattccgccggtgtagacatctcacgctataaaaatgtaaaggttccaacctcctacatggccgcccattccgattacgattttatcgggaactatgatgagaatctggaagcggggctgctccatgtggcagatcatcatatatcaccgggcaaaaaacagtggacttggggaaatggtgatttcggccgtacctgggacaggaacttaacagaaaccgacggaccatatatcgagctgatgacaggcgtatttactgataatcagccggattttacatggctgaaacctcatgaagaaaagactttcgtacagtacttcatgccctataaaggtgtaggaagagtgggaaacgccaccagagatgctgcggtaagcctggctgaaagtactgatgggactgcagttctaaaagtttacaccaccagtgtatatgaacaggcaaaaattaaggttacacagaaaaacgttctactcccactttatgaacacactgcaaacttaagcccggaagcctgctataccgtttcatttcccgcaccgctcggattatgcggctgcaccgtaaccatcttttccgggaataagacattggtggaatacactgtttataagaaaaagctggaacctgttccagcccctgcagagcctctgaaagctcctgaggaaatgaaatccacagaagaattgtatctggccggcacccatttagagcagtaccgacatgccacttctgaacctgccgactattatctggagggactaaaaagagattccacagatatccgattgaataacagctacggccttcttctctataaaagggggcgtatgaaagacagcatttcctatttccgtgccgccatcaaaaaacaaacgtggaaaaatccgaatccctattcgggagaatgctggtttaacctggggctggccctgagagcaatcggtcagaacgaagaggcctatgatgcattctacaaagccacctggagtgcggaaacacaaagccctgccttttactggctggcctgtctggcatctgaaaaaggagcttataaagatgccctgaattttgtctccgaatccatgattcgaaactggcataatatgaaagcccgggcattaaaagcggctctattacgtaagctcgggctggattcctctgcgcttttaaaagaaagccttgagattgatccgctttatatgagctgcctctatgaacaggccataaacactggattcctcgattactggaaagaaaaaatgcgtggagaacctcataattacctggaggtttccctggactatgtaagcgctggtttttatgaggatggtctctgtattctcaatgcctgcagtaatcccaatcccatgtgtctatattacgaaggctatttccatagccggctgaataatcatgaagcagcaatcaactgctttacagaagctgaagcggccgcgccggactactgttttccaaatcgtatagaagaaataaatattctggaaacagccatagagctcctcccagtggctcccatggctcattactacctggggaacttattatacgataaaaaacagtatgagtcagcaacagcacactgggaaaaagcaacggagcaaaagagtaatttagccttagctcatcgaaatctggcaatcgcttactttaacaaacagcaggatggagaaaaagccgaacatgagataaaaaccgcctgcaccattgatccagattatccgcgttttctgttggaatacgaccagctggcagcaaggcgaaaccagtctgtcaaagaacgtctggaacggcttaaatgccatccagcactggttcacaaccgcgacgatctatatttgcgctatattactcttctgaattgtgacggcaaatgggaagaggctctggaggcactatgcaaccatcattttcatccatgggaaggaggagaaggcaaggtcagcgctcaatatcgttatgcactgattcagttggccaggcgcgaattaaaagcaggacaccctgagaatgcacttaaacatctgaccgcctcgctctcctatccggataacctgggcgaggggaaacttcccaatgtgcccgacaatgaagcttactattacatggggattgcttaccatcaaatgaatcaggataaaaaagccaaagagtattttctcctggcagcctccggtccacaggaaccgggaagtgtcctttactataacgatcagccttcggactttattttttaccagggtctggcaaatcaggaacttgggcgcccggctgctgctaaaaaatcgttctatcaactaattttctatggagaaaagcatctgtttgatcaggttacttatgacttttttgccgtttccctaccagaaattgaagtttttcaggacgatatccagttccgcagcacacagtactgtaactatctgcgggcacttggttctcttggactgggtgaaacagaaaaagccgctggactttttcggacacttctggagaagcaggcggactatcagggcgcgctggcttttctcgacagaatcaaataataaaagggagtgccgcaccaattggtatggcactcttttttattaagcagatatacaccttttgtacaaaaagaaaaaaggtctgaaaaactcagacctttaccgtggagcatatgggattcgaacccacgacctttcacatgcgaagcgaacgcgctcccagctgcgctaatgccccttaccttgcacagtatagcacgattatccaaaatttgcaatcctgtttctgtacgattttatattcattcataacaaagagccgccgtattgaaaatcagatatctcttttcaacacagcgctcctccctttttcccttactgcttttttcaatcactcatccgaccttcagcttgaatttcttcgcatctttttcggaatccactttctcaatcatcgctcccagcccctgaagcttctcttcaaaacactcataaccacgctgaatatatccgatctcttccacgatcgtatatccctctgccgccagccccgcaatcacgagagcggctccggcgcgcaggtcaggcgcgtttacagatgcaccggtaagcttctttacgccgtcgatcacggccacattgccttctactttgacgttgccgcccatacgggacagctcgtctacatagcggaaacgattttcaaagatactttcggttacgacactggctccctctgcaagagcaagggtcaccgtcatctgcggctgcatatcggtcggaaatcccggatatggcagtgtcttgatatcggtatgtctctgaagcgtctttcctaccacacgaaccgcgtcgtcgaattctaccacttcacagcccatctcaagaagcttggcggaaatagcctccaaatgcttcggtattacattctttactgtaacgtcgccgcgggtaatcgccgctgcgcacataaaagtccccgcctcaatctgatccggaataatggaatattccgttccatgaagctttctgacacctttaatgcgaatcgtatccgtaccggctcccttgatattggcgcccatgctgtttaagaagttcgctacatcgaccacatgaggctccttggccacattttctaaaatggtctgtccttctgccagcgttgccgccatcataatattaatcgtcgcaccaactgagaccacatccagataaatatggctggcaaccagatcgatggcatgcgcaatcactgcgccgcgctcaatcttcacttccgcgcccaacgcacgaaagccctttaaatgctggtcaatcggtctgctgccgatattgcagccgcccggaagcggtacctgggcgctcttatattttcccagcattgccccgataaaataataagaggctctgatcttacggatatattcgtcatccacggaaacttcgtggatatacttcccattaatacggacggtatgtctgtcaatacgctcaacatcagctccgatttcctcgatggcttccagtaatacattgatatccctgacatcaggaagattctctatcactacgtcttcgtctgtcatgatggaagcagcaagaatacccagggcggcattcttggctccgccgatggttacttctccggccagcggattgccgcctttcataatatattgttccattccacacctctgattatgatctaatctattacaaaattattaagtttttcttttgtgtctttaatgattataacatatcctgcggatttgtaaagagaacgcactttcttattccgtaaataagccgcagacgaagtcatttccgacactggaaaaatactgagaggcgtcgtttaagcccattttacgagcttcttttgtctccggattaaaaatggttacattgtactgatcgtatccggcaatcagctcgtaaccgccgttttccgtatacacagccacgggacagcccttgctgataaagtacagaacctgatttaaaatacagccgcgggcatccagcatcaaaatcccatcatcgtagttcttacttccgctgaattcttccatatgccggattaaaagtgcccccttgttctccggatccttgatattacgggcaggcagacggttgacacggttccatacgatctcctggttttcatccgtcaccactcccatcttgtcgtatgccagattgagcgcttccgtaaagcttctgctgcttcccagataatggccgccgccataggcgtaaaacagattttccgtgattccggtggcagactttagctccaccacctcggaggactcatacgccatcttcttgggtacgaaaactttcacatcgtgagaagcggcctccttatcgagctgaacaaaatacagctttctccggtcttcggaggcataccagccgattccctttaaaggatcttccttcagcgcttcattgcagacaataatatcatcttttaactccgtataggtctgatccccggttctggcaatcttcgtcagacggatccggttctcctccacttccacatcggcaatataggtgtcgggatattcgtaccggttgacgattgcgcccgtatcgtccatgatctccagacggtacatgggggcatccttcactcgtccgttttcaatccacatgtcgccttctctcgccagaccgtagataaaatcatctcctacgaagcccagaggccggcagagactgccgtcttccccggtaatctccttcttgcttcccgtgtctaagtccatcagatgaatcacccgggaaccgtagggatcatttccctcctgccatgcaaaacgccgttcgcttctgcttaccgcgaaactcccctctgtaagggaatctgccagaaccatgtactcgttgctgtttaaatcgataccgtatacggcgttatctgccatcatatacagcatcccattgctccccagatgagccagcttatcaatatcgcctttcagcatctcgaacgactgcgttaccggtgtaaagaatttctcgttgatggcgttctcatcactggtgtactggtacatggcaattcccatggccccctcgtgtatgccgcggttcatataaccgtatacgataaaattcacgtcaccgttatcgccgatggacagaatcctgatatcatgctggtcataactgttccggatctcatcttcatcgccgctgcggaaggaaaagatcttgactgccttttcggaagactggtcataagaccacaaatctcgattgaccacatacgcaatgtggcggccatccgggcttgctttcgttcttacctcgttatcattcataatcccgagcataatgcgttttccggaaaacagatcgcgctggccggaaaagatctggttggtactgcgctcaaaatccatcagataaatgcgcttgctgtcccatttcatggtgaaatcgtcttccacctcgtagagttcattcatgccgttgtccgcagttcgcgttatctgataatccaggcggacattacacatgattccgtccagatccttcagcgttacacggatatcacccacaggctttacatctaaaccggcccacgtaagctgggaaaaactggaccgtatggtcacgtgtcccagggagctgttgtcctcggatgcattcgtctccagataggtcgtcagttctctcgcctggtcatagtcaaaggttttcgtggtgaaattcacggcaaaatcaatcatctctttagcattttcattatccgtccacagaatccgggtataataacgtacctctccccgctccgccgtatccagagagagaatcagtaaatactccctgtccttggacaggagattctgtatcggcagaacagcagtcgtattcccatccgccgtatcccattccgtcagactcgtgcgctccacgagacgctccaggtttaagcttctcacctcgtagctgatcccgcgtatactgccgtcataatccgcgatccgtatattcagcgcgcggtcaggcgggagaacggtaagcgaatctctcgccgccgcctgcttcatatcctgcgtataaccgtgcagaaaattaacgtctctcccgtacatggtggctgagaccaccggaagagccgcttcatccatggcagtatacacaatggaatccggtttttccgttcgtttctggttccatacaaagtagattgcaatggccgcaataaatataataaatagtattcctatcttttttcctaatcgtttcatgtcagacttcctctattttccctatgtttcccttttattctatacaatatccaacaaaactacaacttaaaagtttattaatctgcggcgcggaagggggataaagctgacattttccggcagcatcacgtttttcgttcttctgggacaggtacgaaaaattcaccgtaatccaccccaaaaatccgttttaatgccatcatttccgtagccctgatgtttgccagcccgacctcaatttttgcataattcccccttgttatgttgcattccatcaactgcattttcgccaccgtctgttcctgcgtgagacccgtccttttccttaatcttctgatattgtagccaattaccatatcctgcttaatcttctgctccatcctgttttgctccttataacgaacattttcaattgattctatcttatccaggttctataattgctctatatacggagcattattcatttactattttaatccagtcatattttgtccgtttatgtaatatattagtgatatagaaaggattgatacagcatgataagaaaaaaaacgggagaactcacaccaaaagaggagagggagctgatgcaggaatttgatcgcgtggacgggtactgtgataccgcaataccgcctgctcccaaaggtgaattcgaaaaaataattgcggagatgaaaaaaagaaacatcgtaccacaaatcagggaagaattaagaaaaagatttggcagatcataaaagttgtcattaactgctgttttatacataaaacaattcacatcacatgatccgtattgtatacgatcgcttgaatgcctgcggctgacacatctgcttccggtttcagagggcagtcgttacccacggttttttacggcgcatgtgtttttttgctgctctttactacggaaaagagttatatcaaatttttaagtttctaatgttttattttatcagttttatgtaaaactgtatattttatttggaaaaatttagtgcttccaacatggctgtttatgagcacacagtcgtcacaagataccatatcttctgaaacccggtaagaaaccggctcccgttctatccgcctccgctcaatttgatttacacatcatatgaacttgacttccccaatgccgttttgagggcataaatggacaaacagacgtgaaatatggcctgggatatcctgtaatgaaaaggaaatcccgggccatatatatacggcttttttctttaatgcttaatctgttatctgcaggctgccgtctccggatattctattataatgccattttaaaggatatctagaaacagatgcctgaacggcaccgtctgcgatgcatctcatttaaaagcagaatcttaacaatatcattcagccagttatttcccggattctgaggcgggcgcggcggctgcggctgtggacgaggcggtggtccccatggcggcggcccccacggtggctgcggctgcggtgggcgtggtggctgcggctgcggtggacgcggtggttgcggctgcggtggacgcggtggttgcggtggacgcggtggttgcggcgggcgcggcggctgcggcggacgcggcggctgcggcgggcgtggcggctgcggtggacgcggcggctgcggcggacgcggcggctgcggcgggcgtggcggctgcggtggacgcggcggctgcggcgggcgtggtggttccgggcgcggtggttgcggcgggcgcggcggctgcggttgcggacgtggcggcggaccccacggcggcggaccttgaggcggccgctggcctggcggcgggccccatgccggcgggttctgcaacaccacctgctgcattctccaatctgcatcctgcgtattgacgctgtttacctcgtacacctctacttcttccacctcttctacagtttccgcagtttcttctcctgtctgttccggcgtattctgcagtccaagctccgatccgttcaccactccatcttccagaatctgccggcttacggaatcgcacacctgattcaccataatgcggtccggaaattcatcatacatcggactgtttttataatccagacgatcgcaggctgccatcacatattcctgaatccgcttcatatgtcccggatacattccctgcagatactctaaatcctgtaccatatgttccctctgcatcttcggcagatcctccacagtacttctgtctccatacaacatatacggttccagaacctggaagctgtttccataagtatgctctaaattatcctgcacagcggttatcactccctgcttctttctatacataatcatcttatgcacgtttcagttggatgtgatgagaaacaggactttttccctttattttatctgtcttccagtattttcatacggcccctgaagtcattcaaccggaaccagaagtaccgttcatttaagcagcccctcctctgtccactatataatatccgtatgcctgccgcgcggatatacgaaaaagggtagattttattacatttttatcctataatgaatttttgtaatattttttcatcataataaaatttttacgtgtaattcccgtatacggacatcctttaccgtggattaccccagtaaacagcctcttattataattccgggaatggcgaaggccttatctggaaataatagggggatagaaaaacattgaaagataaagtgaggcaatatatggaactgcaatttatagatttagactctgacgcactgaaaacactggcaccccattttacattcagagaaaacaaaacctgtgacagcgtcttcttaggcctcttcctctggaaggattactatcaggtgcgctatgcgatcggcgctgaaaacaacatattccttcgtatcactgccgacggaaaggagtacgcagctcttcccatctgccaggcggctgatctgccccactcctttgacgtgctgaaggattattttaaccgaatcctgggattaaagctgaatatatttctggcagatgaagccgcagtccgcctcttaaatctgccgcaggatgaatttgagatcgaagaactggaggatgcccgggactacttatactccggagacgcccttcgctctctggccggcagaaagctgcataagaagaaaaacctggtcaactccttcgtaaagagctgggaaggccgtttcgaataccgcagactgtcctgtgcggacggtccggaaatcaagagtttcctcgcacgctggggcctcgccagagaagagcgtatggaaggccagctggagcatgaaattctgggaattcacgagattctgcgttgctgctccctcctcgacattaccatggcaggtatttatatcgatggcagtctggaagcatttacgattggcagctacaaccctctggagcagatggccgtcatacacattgaaaaagccaatcctgagataaaagggctgtatcagttcatcaaccagcagtttctcattcacgaatttcctgacgcggtccttgtaaaccgcgaggatgacttaggtgaccccggtctcagacaggccaagctgtcctactgccccatagattttgcgcgtaaatacagaatccgccagcggtaacatgatttccgccggcggatttccccgctgtcacgatcaggattgctgcgccaactgcctgattttttttgtataatcagtcagaagctcctgatactccttataatagttgcagttctcaaacaggaatgactccggcatgcggctgactctctcccagccccaggcgcgcagctgcggtttcaaaatctgttccttttgaagcgtatacagaagcgccctctggcggaactggagcctgtatttcagttcctctgccacctctcccggaaagaggccgcacatggtttccaccagagaccttcccatcgccatctctccgtaatgagtccattttgtacggatttcctttgcaaatctcatccattcagaatcatccttcggatataccagccccataaactgtgcatccttatagcaccacagggtccatgatacaccgtatttacagaataaatccagcgtatcctccaccatctccatcacatgccccaggctgtgtcccgcaatatcatatccggcctcgccgcagagcagggggcggttaaaaggcagaagactctcaagcattgtccggaatcgctgttcaaatacctgccttctctccccgcgcggataatccggatcgcataaatcagcttcccacaccgttggatagaagtggaaagttaaggcggtctgctcatctctgatctccttcaagcaggagaaatccatggcaaaggaatccccctccaaaaaaataatatggttctgatccacctcacggacagcagccgtcacccgctcataaaaccgctggagtttcccttctgccgccggcatgagaaatggctcatttaagagatcatatcccagcagatacggttcatctttgtagcgggcagcaattttcctccacagggaaattatctgctgctgaaacacatcgtaatgccagaatgcaggcgtccccgtctgattatcggaatgccagtccggattctgacctcccggaacgctgtgcagatccggaagaagataaatttcatacttcctgcagagatcaagcagccggtcaaaataccgaaacccctcttctttttgaagttccggattctgatcgtccagaaacaggcgataattaaacggcacacggattaaattgattccggtatcctttaaaagcttaaaatccccctctgagcagaaggaacagacaaagtcatcaaaaaatacggccgatttttccggaccgaacacctccgtaaacgcttccttcatctgcttttccggcgtcggaattccgagcataaaatgttccagattcagccagctcccgatccccaggccggcaaaccggatgctctgcccctgataaataaattcatttccctttactcttacaaactccatggttcctcctcgattttcctcacttatttcctgtctacagctaaattccagcttctccattccgttcagcagccggcggtgtctcagcgctgccggtcttccccttttctgacagtccacagtccaagacgctcatactgctctgccggcgcctgagcctccctcattcctgcaatcagcttccggcacatggccgtctccacagcttcgtccgtcatgggatgctcctgggcatagtcccgttccaggtcgtagagacaggagtcctctatgaagcgtaaatctcccatgcagtttgtttcgttatgaaccgggatacggtaaaccggataattggtatgggggagaaaacgccccatttccatctcatcggcatactcttcccccaaaaaacgccccagcgtcgtcggaactgcacaatactggtaacacggccggttgtccggtgacgcaggcgcccggaaatacgtataacggccgtcgtatacattgacagcccggccgaaccagccatagatgacggcatctctggaaggagagcggcggagaatcatttccgataaatctctcccctttacactgaccggaaccggaattccgtggtgcttcagtatagtaggcatcagatcaatattctgtgtcagttgttttcgctgttctccggcacattctccatttggcattttcacgaagagagggatatgggccatctcattatacgcatgcatataattcttaccggtaaatccgtgttctcccagcatatggccgtgatccgtagtcaggatcaccagtgtcccatcatacagcccgttctccttcagagcgtcgagaaaatgccccagccaccgatccgccatggtcatagtggccagataacagttccgaagatgtaatacggcagcctccggctccgtgataggcgcgtatcccggccagttaaactcctttccgctgtaatgatccccgtacagttcatggtaggaaaccggtgcatcaaacggttcgtgaggatcgaaggcctcaaccatcagaaaaaagttgtccgctccccggttctccctggcccagcggcaggccgaaagaaaggtggccggggtcggatacgtcttctcttcccgggcatactcctgccggtttaaaagatgctgaaccgatttgcgtccatacgaatccggctctttaaaaggaggggacaccctcgatatccagggatcattttcctgtccccggtggtagtcccaggtatcgaacagagaacagtagttttcccctcccagttcaaagtaatgggcatgatccgttgtaatgtgggtatacactccatggctccgaagttccccctgaagcgtccggtcatacggttccatccctccccagctccgctccagaaaattcatacggccggtaaatatatcccgcctggcaggcatacagggagcggatgcaatgaaatgattgtcaaaccggaccgcctcctctgcaaatgcgtccatattcggtgtgattccctctgcattttcatgataggattttaaaaatctcctgtttaaagtatccatcaggatcaatacggttctcatacctctccggcacctcctgtttctcaattctgacttcccgctgcttccggaaattatctccggtgattcttacttttccagccgaaacgacgctgcattctccgttttgctgtccgttccaataaagacataaaacgttcccgcctcgctgtcccagtttcccggtccctgatagaatctcaactgttcttcgctgatggaaaaaacaacttctgcctcctcccccggcttcagcgtgatgtgcttccagcccttcagctgctttaccggcctcgctgtgctgccggtcacatcccggaggtagagctgaacggtctcggttccttcccgccgtcctgtatttttcagagtcacggaggcttccatcgtttcccccagcgacagtaccgttttgctcagccggaccccggaaagctccatctctgtataggtcagtccgtatccaaaggaaaacagcggatcggccgggatatcctggtatctggaaacgtaccgttccggctttccctcccggtaaggacgccccgtcatcaggctgtcataatgaaccggtatctgtcccacacagtatggcatactcatgggaagcctgccggaaggcgccctctttcccgtcaggacatccacaatcgccggaccgccttccatacccggcagccacacaaaaagcacagctttggcatgccccgagagaaaccggagatccaggggcctgccgctgaataccacagccaccacattggaattcacttcgcagaccgcgcggaacagatcctgttgaatctccggaatctcaagaaacgcccggctcgcggcttcccccgactgaaagcagtgttcaccaagaggcataaccaccacgtcggcctccccggcggcttttaatgcctcctctttccagcaggccagttcttccccggatgcgctgcagggcctgtacctgtcaaatccttccagaactgtccccggagccagcagaggacagccggtgtggtacgtaaccggccatccagccagtgcctcttccgccgccatccgtatggtctttaccatctctgtcccggctcctcccgtaaaagaccagcttcccattatttcctgcgattcggtatacggaccgataaatgctgtcttccgttccggggaaagcggcagtacgccgtcctcatttttcagcaatacgaaggattttaccgccgcttcatacgccagctttcgatggtcctcacagagatacgtaccggactcctttgcctcgtccgcaccgtgaaacggatcttcaaacagccccagccagtttttaagctccagcactctcaggacgctttcatcgagaagcgcctcgtccagtcttccgctcctcaccagcccggccagacactccggatatacccccgacatcatatcgatatcgacgcccgcttccagcgcacggacggcggcatcagccctgtcctcagaaaccccgtggacaaccgtctcaccaattgccgagtaatccgatatcagcacaccgtcaaattccatttctccgcgcagaataccgcgaagcagactccggtttactgttgcaggaatgcccttcactgtttgaaatgcggtcatcaccattctgcttccggcttttacggcactctcataagccggcagataaaactctcgaaacgtttcgtcagagagttccattgtctggtactcccgcccgccttccggcgcgccgtaacccgcaaaatgcttgacgcaggctgccagagagtccatgccgccctgctgcctttgatagccttccaccagagcctttgcatacaggctgtttaagtacccatcctctcccgtggattccatcacacgcccccatctgggatcgcgcaccagatccaccatgggagaaaacgtcacatgaagtcccccggccgccccctctttcgctgccatagccgcacagtcgccggccaattccggatcgaacatggctcccaatgccagcgggatcggatagatggtcttaaatccattgataatgtccagcataaaaagcagcgggatatggtggggctggcgttccatatacgctttttgaatcttttttatactggcagcaccatagactcccagcacagaaccggccagatggccgtaattcttcctgattttggcggtctcctccgcctccggccccgtctgctccaactcttttgtgccgtcaaaccagtcgcctgttacctgaaaaagctgccctgctttctcctccaggctcatatcgtttaacaaatcaatcagctgcttctgctccatttctctgccctcgcctgtactatcattctgccgctttcaccagcataacccccgccgcatcaattgcaaacgcctctcccccgtgaatctccctcccgctcagcaaatccgttccgccggcggagaccgccagttcctgtctcttcccggaatgattcagcagaaaaaggtattccacaccgtctttttcccgcacggttatctcgattcccttttcggataaagcggccgccgtctccaccgtatcatgggaggccgtccgcagccccttttccttacatctgtcagcaaaaaaccggagatagaagtcctctcctgaccgtgttccaacgtaataggccagtccgtctccatactggttcctggtaataatgggcgtgcctgcataaaaatcctcacggtaacgggcaagcacctccgccccctccgtgtgcataatatcgcacagcagtcccgccggatagagttccccttcatagcaaaaggaattctgctccgtctccggcagggaatcggtctcttccacccagattccgcagagttccctgagttttcccggataaccgcccagagtaatccggtcattctcgtccacgtatccgcttaaatacgaaaaaaccgcagttcccccagtcctcacgaactcttccagtctctcggaaacgccgtttttcaccatatacagaagcggcgcggcaatcagttcatatccacaaaaatcgtcctccattccgattatatccaccggaatgtgaagttttgacagagcccggtagtaattctgaaactcatccagatagttaagcctcacgctgggccccgccgagcactccagcgcccaccacgtatcccagtcaaagatcagcgcggcctttgccggaacacgggccccaaccaccgctttgcccagtgccttcagttccattccaagggcctggcattcccgaaacacacgggtatttccatggcctgcatggtcgatgacagccccgtgaaacttttcacagcccgctctggagcgcctcatctggaaaaacatcacagtatccgccccatgggccacggcctgatagctgagaagccgcataacgccggggcgtttcaggcggttgtcgtttagccagttgcaggtgctgggcgtctgctccatcaacaggaagggctggccatttttaagcccgcgcatcaggtcatgattcatcgcggcagcggcagaatcagctccctcggccggatagttgtcccaggaaataacatccaggctggccgcccactttttataatcaagcggcttatacgcccccataaagttggtagtgattaaggcgtccggaatctgtgcccggatcgcttccgcctccgcctggtaattggccagcatgctgtccgaattaaaccgtttatagtccagtgttatggcctgatacatgcttctggcttcctcaaaatgttcactcaccatactgggggccacaatctcgtcccagtcatagaaggtatggccccagaatctcgtattccacagccggtttaaattatcaatggttccgtaacgcttcttcagccagacacggaacgccttctcacagttttcacagtaacatgcgccttcatattcattgcttacatgccagagcacgatattcttctgttcccggaaatgctccgccagcttcccggccagccgcttcgcatacttcttaaatacagggctgttgggacatgaattgtggcgtcctccgtatttccgcctgcggccttcaaaatccgttctcaggacctcgggataccgtttggccatccacgccgggtgggctccggtagaggtggccatgcagatggccatcccctgttccgtcacccgtttcaccgccgcgtccagttccgcaaagtcatacgtctcctccgacggctggagtgacgcccaattaaagacattcagcgtcaccacatcgattccggcctgcgtcaggagttccatatcctgttcccatatatccggcgtccactgctccggattgtaatctcctccatataaaatcttcgataccctgtctgaaaatgccatacgttttaccccttcaaaccagaaaatgcaattccttccaccagatacttctgccccacaatgaaaatcagaagcatcgggatcagggcgcacacggtgcctgccataatcaggccgtactccgagccgtactgggtacggaaggaggccaggccaatctgaatcgtcctcagcttatcagaggttaagtaaatcataggagccatatagtcgttccacataaagttaaatgtaaacaccaccagcgtcgccagccccggtttgcacatggggaatacgatctgagaatagattttcagttctccagccccgtcgattctggccgcctcggacagctcctccggaatccccatcataaactggcggagtaaaaatacaccgaatgcgctgaatatattgatcaggatcagggaccagtgtgagtcattgagccccagtgtcttaatgattaagaactggggaatcatgatcgcatgccacgggaccatcagcgttgctaaatagcacaggaatatcttatcccttcccggatactgcattttgctgaaggaatatgccgccagggaacaggtaatcacctgaccgatggtaacaattaccgccagttttaatgtatttaaataatatgtaataaatgggatacgttcacatacctccacataattggaccaccggaatacctctggaatccattgaatcggataggcgaagatttcattattatttttaaaggaagacgagagggtccagacaaacgggataatcatgcagattcccaaaagcagcataacgataaacagaatgccgttcgataccttcgtctttgttttatacgattttgtcatcatttttttctacctccccggtttacatgtaattaacccattttttctgtcctcggaactgaatcagggttataaccatgatgatgatgaacaggaaatatgccattgccgacgcgtatccgaactgaagcttctggaagccctcctgatagatgcggtataccagcacattggtggaacgccccggtcctccctgggtcatgatattgaccagatcaaacacctggaaggaattgataatacttaaaatcgtgaccataaacatggtcggagacagcatggggagcgtgatcttaaagaatttttccacgctgtttgcaccgtcaatggaagccgcctcgtagagctgggacggtatggactgcagcccggccagaatgataatcatatagtacccggcctgtttccagatggcgaccaccatgacagagcccagggccgtcttcgtcgaggacagccactgcggcggatttgcgatgccgagcgccatcagaacctgatttaaagggccctgggttggattaaagatcatggcccacacaatacctaccgcaaccatggaactgatattcggcaggaaaaacatggttttaaaaaggccgctgcccttaatccccttattaacccctacagccaggagcagcgcaaacacgatggtcccgggcaccgtcaccagagtgtagagtaaattgttcttcatggaaaccgtaaagtattcgtcatggaacatatttatatagttcttcagacccacgaaattaaactggctgaatccgttgtaatccgtaaaggatatcaccagtcccataatgatgggaagtgccataaaaacgaaaaaaccgatgaaattcggaaggatgaagaggtatccttttatgtatttcctgattttattattcttttccatatccatatcctctctctgccggttaagcggtgataaccacccccgcatgctcttacacccggtcagccgtgataatcagatggggaaacaatcagactgtcgattgcttccccatgccgaatccgccgtatgataccggacagattatttactcatgatatcctgtctctgctgttcaaatttatccatggtctcttccagagttttttctccgtacaggtacaattccgcattctctgcaaatgcaaccttcagatcattgtacttctcataagaaggcgcctccggaatcttcttggagttaaaggcaacagaagagacactttccttgccgacaacctcgtcaaacgcctctttggccgcgtcaccgccgtacgccggaagcatgccgtatttcggaaggacctcggaaccgccctcaccgcataaatacttcaggaagtcatagctttcctgcggatatttggcatcctttggaatcgccgcgaactggaacgccccccaggttgcgccgggatccgcgccctccggaattggaagaggagccacttcccagttgacatccgtcttgccgtctttttcatccgtcatcagcatgttaatcagccactcaccattggggagcatggctacccttccgttttcaaagtcagataaatactggctgtcgttggcctttacctccgctaacggcacatgagacttatcctctaagaagaatctgcctaatgtggccagcccgtcttttacagccgtgatatcgtcgtcatttaggtaaacccctttctgtgttccaatacactggtagatgttccagtctacccagcagccgccgtacttcgttccgtctccgctggtcagctgctttgcgatatcgccatattcagaccatgtcatctgcttcgccatatcaattcccgcctctttcatgatatcggcgttatagaacagcatccagcagctggatcgcatgggaagcgcggtaattacaccatccggataacaggtatcccacatggaaccgaacttgctgatatccaagtcgctgttctttaccatatccgtgatatccttcatggctccggcttccttaaactgcatgacctgatcgagggaccggacattgactatgtccgcatcgcttcccgcagacagcatgacctttaatttgtcatcatacgtctcgttcggcatgctgatcacttccacatttacgccgtcctggcttttgttgtagttgtccacgatctctctcgtatagttctcaccgtcactccagatataaaactttaagttcactttttcaccggaagccgcctccgttgccgcttcctttcccccgctgcagccggcaagcgtccccgctgccagtactgccgccagtaatactgcacttactcttcttaacttcatttccaatctcctcctgctatgttcttctggtaactctccccggtaattccctgatgtcatgttccattgctgtgctgcaatgtctgtggttcgtgataaccatacgatatcacggaaatctgacgccggacaggttgaaattttatcctccttttcttcgtatgcgaattgtgatactatttactcatggaagggaggggaaaaccatgttctatctgctgttattactgttcattctgatcctgtacacgctggttcagagaataaaaggaaatcatgattttctcatgattttaattctgccgtactttgccgcactctgcagcatcattctctatgtgtcaaaggatacctactattataatcttatcaaagattatttttaccttccagattttctgtggagatggctgttctttattgatatcggcaagagcaatatcatacggatcatgaatgcctccagcttgagtatcttaataatcagtgtgtatctcgtcttccatttttacgagcccttttccatacgggttcaaaaaatggtaaaatatgtcgtatgggcttactgtctgctgcagttcatcctctatgatcccttcacgaatttaaaggcctactacttcttttatccggcccgcctgacggtacagcagtacattcagctggaagacaggatctacgggatcacccatgccatcaatattgccgttgtccttctgtgctttcttggacttctggctgcatttatcaaggctccaaagctgaagctttttcgctataaccacctgtttttggccatcagctatgccaccctggcatttgtatacatttactttatttcatcctctccggacttctacttgaaggtctccagaatcgcgggtacttattcctaccgttccctgcagcttggaagcaatgcctttatttaccgggcccttccttatattctggttcccgcggccgccgtcatcacctactgtgcctacatgctgacccgcctctcgggacaggccagtttaaaggagctcagtatttccaaggaaatcagttcctccgagacgacatcaaagatcttctgccactatatcaaaaacgaaattctggccatccagtccgaggtggagacgctggccttaaacgcagatgataaagacgaagtaaaagagacgtcggacagtatcataaagcgctgccacacactctatgacagaatcgacgagattcaccgcagcaccagaaccagcgaactgaacttaaaacagtactctctccagacactgataaaggaaacgctctccatcttttcccacgagctggaatccgtaaacgtccggctaaaccttccgccgcagccgattctggctatggtggacccggtctatatggaacaggcgcttcacaacatcattaagaactccattgatgccatggaagacacccccgctgaaaaaaaagagctcaccgttactctcggcagctccagacagtggatcgcagttgacatcaaagacacaggaaagggaatatcgaaggaaaacctggaaaatatctttctccccttttactcctcccatccctactccaaacactggggaatcggcctgactctgacttacaaggtaattcacgctcacgagggaaaaattgtcgtaaacagtactccgggtgcaggtaccacggtagaagtcctgctcccgaacatcacaccgggaacgagttcatctgaaacaggaaaagaggtttaaaatcatggaagaaacgataaaagtgctcattgcagaagatgtggaccctatccgcaggcgttataaagcggtcctgaaaaagtgtcccgacattgaggtcgtagccgatgtggccacaggcgaagaagcctgcaaagccgccagagaactgaatcccgatgtcattcttatggacattgagatggaagcaaaagatgcgggaatccgtgccaccggagagatattatctgaaatgccggatatcaaaatcattatcctgacggtttatgaagaggatgagctggtcttttccgcatttcgtttaggcgcctgcgactatgtcctgaaaaatgcctccaatgaggagattgtaaacgcagtcacctccgcctacagaggccagtctcctatccggccggagatcgcagataaaatacgcagcgagttccgccgcgtcaagacgtacgaaagcagttttctcttcatgcttaatatactctccaccttaactcccaaggaactggacacactctatctcctctctaccggctataacaaacaccagatctgcgagatgcgctgcgtggagatgagcaccgttaagtcccaggtacacagcattctaaagaagttcaataaaaagaaaatatcggaaatcatcaccaccgagtccgacagaaagctgctcggcagtatcctaaacaacacagaccaaaaccgttaagccactcacagagactggtcacaaaggctgcctataacgctgcccataaaaaacaggtgtggcaggaaataaattttgctctccagataccggtttacaaaatccgtttcctgccacacccattctatcctcttaatcttcgaacagcttctccggataaactccgtctgccaccagttccttaatcgccgccgctaccgtcggcttgtcttcccggtaagtaacgccaaaccacttgtccggcgtctccagaaccgtcacccgtgcacgccctgtacgtacaaggcggtcgataatccttggaagcaggtactctgtcttgatgtcgccttccttcagactgtctaaaaactcagggaaccctctctccagctcctctaaaaatgaaggcgcaattccccacatgttcatggatacatgctggccgatcggcacttccaccggattgccgtcatcgtcacggcctctcgccacatccttgtccctctgaagctcatacgtctcagtgacgtctatcagcacgccgttctcatccacccggcatacgcccctggtaacaccgccattctcgctcaacgtattgcccaggataaatccgcccatacagatgtcgaacacgtccgattccgtatccatctcattcaccatatactcgtgaatcttcttaaatccctctttgccatagtaatcatccgcattgataacgataaacggttcatgaatcacctgcttcgcacacaggatcgcctggccggttccccatggcttcgtcctgtccgccggcttctcatagccttccgggagatctgtaagctcctgaaatgcgtactcaaccggagcaatcttctcgatacgacgcccgatgatctccttaaaatccttttccagatccttccggataatgaacacgatcttgttaaatccggcctccagcgcgtcatgaatcgaatagtccatgatgatctcaccactgggtcctaccggttccagctgcttgattccaccgccaaacctgcttccgatacctgccgccataatcactaatgccgtattcttcataatgcttctcctctgtttttttattaagtgcccctagtataacacaaaaaaaccgattattccacactcttaagcgactccaccatatcaattcccttcagcttatcatacatggcaaggttgacaaacgcggaaaacgcatacgtcatcaaaacgctgtacgcgtagcttacgggcctgatctgccttccgaacatcagcatatccacttctacggtagtcatgacgtatctgtgcaggaaataccccatgacgattcccaccatgctgcccagtattgtaagcataatattttcccggtatacataggcagccagttccggattatagaagcccagcaccttcatggttgcaagctccctctggcgttcgttgatgttgatattgttcaggttatagagtaccacaaaggccagcagtcccgccgagatgataagcacccagatgaccacatttaagctgtccagcatgtcgtttatctgcccccgcatggtaccaataaaggtcaccgccatcacggaatcaaaggacagcagttccgtccccagccggttctgtgtctcctcattcaaatcctttagattgagaaacattgtgttatactcagacgcctctccatagaccttttcatacagagccggtgtcatatacacgtaatggtgaagataattctccgcaattcctcccaccaccaccggatgatgagttccttcatcctcctttaagaaaatggtatctcccaccttcacatccagcagtcccgccattttctccgtaatcagcacgtggtcatcatccagaacatacggctctctgctttccctgctgcgcagatgaacaaaccggttcacctcatccagattttccggtacaaacagataggcttccttcgtcacatcacccgccgacacatccagaatcgtttcctccacccggagccacgcctccacatctccctgtgatacaaaggaccggagcttctcctgctccgcctcatctgcctcgtcgtcagtctgaaccagcacatcgtacgtccagatatcgttatactgtttttctcccagtgtggatatggagtcattcaggccaaatcccacgaggagcagcgccatacagccgccggttccgaatatcgtcatcagacaccgttttttatagcggaacaaattgcgcaccgtggccttctggataaacgtaagccgcctccacagcggagtcacgtattccagcagcacccgtttcccctgctttggaggaacaggccgcatcagcgcagccggtgacgacaaaagctcccggtaactggaaaatacggtagccagaactgtacacgccagcgccaggccggaggccagaagcgcgtaatggaggttgaacggggtcagcatcaccggaaggttctcatacaggataaagtacgcagtcataatcacgtagggaagcagcttttcccccgctgccgctcccagaatacttccggccagggtagcggccagggcgtagccaatatatttggaggcaatactccatttcccgtaccccagcgcctttaatgttccgatctgcagacgctgttcctcgaccatacgtgtcatggtagtaaggctgacaagagccgccaccaggaaaaatataaacggaaatacctttccgatcgcgccgatgcgttctgcgtcgcttccgaactccacataagtctggatggaatttctgtccagaacgtaccactccggctccttaatgtcatcaatctctttctgagcgtcgtcaatcttctttccggcgtccgcgatcttctcttccgcctcacgcctggaatcctcgtatttgcccttcgcctcctccaagtccgcctcgccatcattcagcttcttctgcgcttcctcaatatccgcctcccctttcgcaatgtccttctccgccttcggaatcttcgcctcgccgtcggcaatgtcccggtgggcatctgcaatcttttcttccccatcggcaatatcccggtgggcatctgcaatctttgcctcgccatccacgatatcctgcttcgcatcctctaccttctgctcaccatcgatgattttctgtctggcatccgccagctgctcttctccctcatccagtttacgcctggcatttttaagcttcatttctccctggtccagcttctttttgccttttgccagttctctttttgccttagccagttctttttttccctctttcacggccgcatcaccgtaagtcagctcctgataggaggcctgcagcgtatgtaccccctccaccagcattgccccctcaccgcccggtatcatctccagccagggtgcatacgcgtcaatctcaaattcctccacctggatacggctgatttcagaaggcgtgatatccagaggaacccccatggcgatcagcccgtttaaggctttctttaaattccgttccacctcaggcgcatttttccggtactctttccagccctccttcagggtttcctgctgttcctccagctccgcctttccatcttcgtattcttccagcccaatctcgtattccagccatccgtcatccagctccatacgggcccccggcagctcctcgtcgaattttttacgggcatcctccagctctttttccttgtccgttacttcctttttggcgtcctccagctcctgctccttttccgccaatgtcactttcccgtcttccagttcctgttctttctccgccagcgttaccttagcgtccgctaactcctgttccttttccgccaatgtccgttttccgtcttccagatcgtttttggcattttctaaatcagttttccctttttccagatccgcacggccctttttaatatcgtcctttccctcgtcgattttcttctgtgcatccgcaatctgccgggccgcatcatccagcttccggtcggtctccgccgtcttttccgtcagttcccttctggcgtcatttaacgctctgttcgcctcgtctgtcacatcgcggtaccgtatcgcggaccggggttcggaaagcgtatcctcaatctctttcgttacaagatcgatatagtcctgatactcatcggaataggacagaaacgattttccctgtttcgtctggacatagatgtccgtaaatacatccatgctgaaattatcgggcgtcacggccataaaggtatcgagactcccattcccaatcgtcgtcgtcccccgctccagcgacaggtaccgggaggacataccgatgcccacaatcgtaaaagtatcacatttcagcgtgtcggagagttcctcatccgtaccggaacagactttcaccgtatcccccagtccaaactggcctttataagcctttccccggtccatcagacattcccctgcccgctccggcatacggccgtccagcagcgtaaactggttaatctgcccgctcatcgaaaaaatccgtacggtctgctcccggtccgggctttcacagagcacatccgtggtataggcgccttccgcatgctctgtctccgggagctggcgcaccgcctccacatcatcctctgtcagacccagggtgccgacaatacggatatccattaaatttgtatcatcatagtaaacatcagcagagagctccatgtccggccttgtagaacgaatgccggcaaaaaacgcgactccgagcgcgacaataaaaagaatcgataaaaaccggttcatgctgcgccctatttccaccataaagtctttgcgttttgcattcttcatacaaacaccatccgatctgaggcattccacttaccactcgatcttctccaccggaagcggtttttcgttcagcacaatacttgccgtcttcccgttcttaatctgtattacccggtccgccatcggtgccagcgccgagttgtgagtgatcacgatcaccgtcatcttcttctccctgcacgtatcctgaagcagtttcaaaatagcctttccggtctgataatccagcgctcccgtgggctcatcacagagcagcagtttgggatttttcgccagcgccctggcgatggacacccgctgctgctccccgcccgaaagctgcgcaggaaagttgttaagtctctcccccagtcccacatcgatcagaacccgctccgcgtcgaggggatttttgcagatctgaagcgccagctccacattttccagagctgttaagttctgtaacagattataaaactgaaatacaaagccgatatcatttctccggtaccccgtcagctttttctccgggtacgaagcaatgttgacgccgtccaccagaatttcccctgaggtagcagtgtccatccctcccagaatatttaataccgtagtctttcccgccccgctgggccccacgatcaccacgaattcgcccttctcgatggcaaagctgattccgtccaccgcatgaatggtaatctcgcccatatggtaactttttcttacatccttaagttcaacaaatgccaaaaagcaccgcctttctcacttacattttatcggtcacattcgctgccgcgttcttattctgagatgcgatttcactcatatctttcttcttttattatattttaatatgacatcagattcaagtgtatccatcttaattcaccaggccttaacccttttttcaccggattgggatattacttcttcaattttcccatgacagaccagccacccgcaactcccgtcaccagccccagaatcacagatgcagccgtcagtttcggaaatacctccgccggcggcagcagactcacggtgccgccggacagactgagccctgctgccaccagctccagcccccagcggtaccccgccagcaggagcagaaggggaatgcacattcctgcaagccccataacgagtccctccaccagaaagggaacactgataaattcctccctggcccccatcagccgcataacccgggtcttccccttctgagattcaataccgacagaaagagtgttgtgaatcagcagaatggaaatcagaagcagaatcgccgcactccccgcagtcagtctcgatatcaccgtcttgatacgaagcagcgcacgcaccgtatccgccgaatgtgtcaccttgcggaccccttccagccccttcacatactccacgaagccctcctgctgctcgattcctttgatatagacctgatagtgattggacgccgccagcgggttatccccgtcaaagactccatctaacagttccccgtcttcaaaataatcattccgaaatccttcccaggcgtcatctgcagaggtataaaccgttcgctcaacctccggtctctcacggattaaatttccgatctcctccacccgttcgggggctgtcgtttcctcaaagaataccgccacatagacatcttcctccgtcttcgtaagcacaccgtccaggtttaaaacagcaatataaaaaatgccaaacaggaaaatacacgccgccatggtaaggacggaggccgccgtgtacaccttgttatgccacagatttttaaatccaagccggcataaatacagccatgtcctaacagccatacatcagacctcccctgctgctgtccttaatcacctttccatacctaagcgcaatctgacgcctgtgcatgtacttcaccagctcctgattatgggataccacaagcacagtcgtgccctgacggttaatcttctccagcaggcgcataatctcttcggcattcttctgatccagattccccgtaggttcatcagccagcaaaagtaccggctggtttaccaccgcacgggccaatgccgtccgctgtttttctccgccggagagctgccccggataacagcctgcttttttctccagccccacctgtcccagaacctccatcacccggctgcgcatccctttatggtctgcctcaacgacacgctgggcaaacgccacattttcatagacggtaaaatcgggaaacaggcagaaatcctgaaataccataccaatataccggcggtaacggcagacctgccgttccttcagctgcctcaaatcaatgccgttcaccacaatatttccctgatccgcctccgtctcccgcagaatcagttccagaagcgtcgtctttccggccccgctgttgcccacaaggaagacgaattcccctttttctatctgcaggctcacgtcatcaagcgctttttgccccgttccgtatgtctttgtcactctgtcaaatgaaatcatagtgttatccacagtactccccttttccatcgcagttatccacgaaataaacagtctttcttcgggatcagatgtctttcttcttcagcttataaacaaaagcaagcacctttgccaccgtctgatagaattcctccggaatctccatatccacctcaacgctggcatacagcccccttgccagaggtttgtcctccataatatagaccccgttggcctctcccacctctacgatcttaagcgccagatgatcggcgcctttcgcaagaaccaccggagcccggttggcattggaatcatatccaagggctaccgcaaaatgggtgggatttctgatgatcacatctgccttcgggacattctgcatcatacgcatggacgccatctggcgctgtttctccctgatccgtcctttgatctgcggatcgccctctgtctgcttatactcgtccttgatttcctgtttactcatgcgcagattcttctcatactcccaccactggtagagatagtcaaaagcagccagaaaaataaaggcggcccccaccgtgttcaccagcgacaccgcagtgtccccgacatacacaaaagccgcctgtaccgttccatccatcagacgtgcaaactcgtggattctcccctttatgtaactgtagatcacccaggccaggatggtaatcttaatcagcgcttttaagagttccaccaccgagcggatagaaaacatccgcttaaagccctttaaaaggctgatccggtccattttaaatttcatgacatccgcagagaacgacagtcgtgtctgaaagaatgtcgtgacaaccgccaccgccaccccgataaaaagcagcggcagagccgcctgcccaaacaggaacatggcttttaacagcttgtccggcaaatcctccgctgtcaatggctccgtcgaagcggcataagaaaagaacagttccatggacgccttcagcgttcggtatatcatgggtgccagagcgtttaaggaattaaacagcaccagaagagagcagacggcaattacgtcgctgctctgaaacacatttccttttttccgttcgtcctgccgtcgtttcggtgtggctttctcggtcttttcatctgccgccacgctcatcactcccttctgtctgcagactaaacccttaagcgtctatgatgcaaacattatcatgaccttttgtacctcgctcatcatcattccgaaataggagtcgataaacgccccgatgggacgcgcaaacagcatcatcaataaaatacccagcagaatcttcgactggatattaatcacaaatacatgaatctggggaatcagcttcataagcacacccatggatacctccagcacaaactctgccgccacaaacggcagagccagcttgatcaccattaaaaagacactgccgaatatgctcacaagataccaggcaatatcctgagtcaccagcctggcggctcctacgggtatcacctcgtacgtataggcaaacagcttcaccgtcagaagatggcagcctgtcgcaaagaaatacaggaaaaagaagacatgaataaactgtcccagaatcgcggtctgtacgcctcccgccggatccatgatcttgcccatggacagcccgaacaccgtgtccatcaaatctcccgctgcatagatcatatagaaaaacagctgaaacacgcttccgatcaccagccccatgatcacctcgcgcatcagtgcctccgccatctgaaaggtactgtaggcctgtatggcggcgctgccctggaccgctgtcggcgcgatcaccaggctgagcgtcagcaccagccccgtcttcaccatggcgggaattcccctcctggcaaacaccggatgaacaaagatcagtcctcccatccgcgcaaacaccagcaaaaacacatcaaaatactctaaaacgccgctatccatcacatattccccgtgttaaagcgatgccataatcgcaaacagctccaccacaaactcatccatcaccttaaacatccaggatcccagcgccagaagcaccagcgcaatcaccagcagcttcgggacgaacgtaagagtctgttcatgaatctgcgtcgccgcctgaaagatcgctacgatcagccccacgacaatactgatgatcaacagcggtcccgctatttcaaatgcaaccatcatggcttccttcatcacttccattacctggtctgcagtcatactatgtaccccctcgtcatcggaatccggtaaccagcgtcttaatcacaagactccagccatctaccagaacaaacatcataatcttaaatggcagcgcgatcatggtaggaggcagcatcaccattcccatggacatcagcgtgctggacaccaccagatcgataatcagaaacgggatatagatcagaaatcccatcgtaaacgccttattaagctcactcaaaataaaagacggaaccagcactgtcaggcccagcttcatatagccttccggtccccccgatacatcaggaacctccgtctttgagatggaaagaaataaatccagactcttcttctctgtctgttttaacataaactctttcatgggctcctgcgccctggtaaacgcctcttccctcgtgattgctcccgctttatagggttcatacgcctgtgtattcactttggcaaacaccggactcatgataaacagtgtcagaaacagcgccagtccgatcatcacctggttgggcggggactgctgcgtccccagtgcattgcgcagaaatgacagaacaatgacaatccgtgtaaaacttgtcatcataatcagcagcgatggcactacggcaagaaacagaaacaggaacatgatatccagcatgtccatgggctttccgcttccggagcttccctccagtgtcagagaaatgtccgatgcaaacgcgatctgtccgcatgcagcggacactctgataaacgccgccaggccaagtacgcccccggcaattttccttatccccttcatcatagatctctcccgtttttcttctgtcgttcgtcctgctgccgcccatcttttttgaccagtgttttgagctgttccgtaaatacagacgcaaagtccggcgaaacctccgccggactctttctctcataagtttccagttcctccagtctggtgataccggccggagatactcccacaagcagaatccgtccctgaacatcaacaatcatcagatagctgtcccgccccacggccagacggtccagaatcttcatatcgccggactgctgtcttccattcattcctcttcccagcatccttgtcgtcacgtatgccagaataaggaccagtatcagtacaatcagataaaataacactttaagaaccgccatattaatccctcttgccgattatctcaataattcttgcggcaaacttgtcatctgtcactaaaacatcgctttttccgatcagttttccattgaccaccacatcagcaggcgatcccgcctgtttatccagtgttagaatctgtcccttctgcagcgccagaatatctttcacactgcataccgtgccgccaatcctgaccgacacatcaagtgtaatatcccggagttttttcctctcctcaccgatatgatccacctgattatccaaagggacatacttaaattccggaaatgacacctcccggaacgcaaccgtcttctcttttttcctgaaaggcagctcctccgtatgcaccgcttcctctgccgccggctcctgtcccatgaccggaatcccgaaaatctcctgaagctcttccgtggcgatgcccaatacctccgctgacaaaacgccctcaatctccaggtggaagcggatcagcagcagatgaggcactttatcccacaggctaatcgtatccagaatccgttccgcactgtcaaacgccgtaacgcgtgtcagtacttcccccatctcacgccccagaaaatcacccagattctccatggccgcacccatgcactgggacgcgacttcttttaaggtgcttaaagcgatctcatcaaggggactctccgtattcaccggcagacccataataaaattcgaaatctttaacatatccgcccggtcaaatacgtacagctgcggaacccgcagcccttcagccgtccgctccgcctcgatcaccacattaaaatggggcagatattccgtcagggtctccctatctgtctcgccaagctctgtcaccgccgccctggcatttctgccaagaagagaagccagcgtattgcagacaggcaccgcctccatatccagaagctctgtcaacgcttcctgatccaaatatcccatactcttcctcccggctataataccttattaatctcaaccgctttgcgcagcttcgtgtgccccagcctggcctcgaagcaggctatatcctcgacgtaaatatcaatgctgctgtccacttttttattgagaggcaccacatcccccggctgcagctggagaatgtcctgggcatccagtgaaaattcatggaaaatagcccgcagttccacctcagattccagcagatgctgttcaatatagcctctctttgccagctgcttcgcctcatccttcttctggctgaccgcatatgtataaccgaacttcgaagtcagttcctccacattaggtgcaggcatcaccagatttaacactgccgaaagctgatcgatccgcacctccagctccacctgtatcaccacgtcctcgggggcgctcacctgaagcagatgaggattcgtttgaaggccggtcagcgccgcatctacatccagatattccttccaggagtcgccgataaattccgttatcttcccaagtaaatactgcagaatcgctttttcgatatccgtaaaatcacggctcagttcatattcggtgccagcgccgccgagcaggcgttcaatcatgaaaaaggccagtctggtatccacttccagtaccagaggagcctcattgtaatccttgttgtccgggatcagggtaatcatgccaaaaagagaccggtcaggaacagaattactgaattcctgataccgtctctccacgatccccgtcacacttatctcacagtaggactgcatcagtcccgtcagatacggtgcaagcgcacgtgcaaaactgtcatataagttttccaccgtgctcatgcgctctttcgtaaatttcttgggcgatttaaaatcgtatgtctttatcactgcgctgtaccttcctgtcccccgctcatgtccgccggcatgtcaaccggaaacagcggatccatcgtctctatcccatccaggttatcctgggagacctcatagtcgttgcccagaatgatcatgtccaccctgcggttcagttcacggccctccttcgtgctgttatccgcgatgggataatacttgccgtaaccgcggcagatcagctttttcggctccagaccgacgtgatcctccagatagattgccacattgtcggctcgctcagaagaaagcagccggtcattgatcagagaattggccgcctgggcggtgtgtccgttaatatagatcgccataatctcatcctgcctgtccttcagcatgatcccaagggcatccagcatggatttgctgttctcctgtaagaccgcgctgtcaggtgcaaacagcagatcattcttaaaccggatatagaccgcgttctcactgtcggaaacaaccgcatccaggttttccatctggaaatacgactggatatccttcgccatatcggccatggcaagagaggaggcagaccgcgctccgccgccggttccggtgttaaactgagagccttcgccctccggagcaccggcgccctcactgatactgggatatttcagatcctgcggcacatcctccaggtcattggtcgattcaattcccagctgacgctgcatcgccgccgcgatctcttccagcttgctgatatttacattggaaatactgtatagcagtacaaagaaggtcaggacaagggttatcatatccgcgtaggtatttaaccactcctgacctcctccttcttctcttcgtttcttcatgttatttcccaatctccagggcttttaatgccatgctttttgcaatgttcagtgctgtcacattggcctcataggcacgggtggcggccatcaaatccaccatctcctcggcactgttcacgttcggcatcataacatacccgtcctcattggcgtcgggatgatccggatcgtagaccggtacgagaggattctggctctccaccacttcctccacatagactccgccgcggtctgcctttgtcatggctttgcccagctcggatttgaaatccagctgattttcccgcagcaccacctgttttctacggtaggggcctccctctgccgttcttgtcgtattctggttcgctaagttctgcaggataatgtccgtgcggaaccgttccgcagtcagggccgaacccgttatattgagagaatccaaataccccataagccgctccttttatttacccgtattgttaatcacatatctaagtgtggaaagctttcccgacatccgggacgtcatggccgaatactcggtatacgccttccataagtccagctcctctttttccacctgtacattgttcccgtccggcctggcctccgtatcgttatccgttccgacaaccgccttatagacaggaccgcttccgtccgccgcctcttttaacacctgtttaaattctacttttttcgctttaaatcccggcgtctcaacattggcgatattatggccggcaacctgctgcttcagccacatggcgtccagtccgctctgcagcgcccgaaacgccgcatcctcaaataatggcatagatacactccttatctcatcctgtgtgtcccattcgaacctgcttatccgcctgggaaaacgcttccttcagctcggcaatcatggggagcacttcttccaccggttccgggctcttcttaatattcgcctgaagaatctgatagttaaaatattcataaagggaggccagtcctcccgccacctcatactggtgatccagcgtggaagacaggtgggtaacgatggcctgcgccttcttaaaatgcgcattgcttccctcataatcattctgctccaggctcacaagccctttgtttaaccggttgatcacctcgtcaaacagcagattgatcatatcgccctgcgtcatggtcatgacagactgctctttatatcttgcatatgggttttgcataattatactcctttattatgaagagaactgctgggtcagccaggaactctggctgttcatgttggaaatggcctgctccatggcgttaaactgcttccagtaacgggtccgctccagttcatacttggtatttaacttggacagtgtctcggatatgcgcttcatctcatcatagatcgtattgctggtaatcagtacatccttggtacccgcgtaacgaaccatacttcccggacttccgctgctgacattcgccgcatccctgatcgcctgctgcagctttaccgccacgccctgctccttgtccgtaaacagcttccggatattatccgcattggtagctaccatggactttaacgtatcttcgtcaataaccagttttccgttgtcgcgccagttgtccgaagtctcgatcccgatatcgtaaagcgcaagccccgcgtcctctacactgctgtaaagcaccattctcatatcactcaaaaagctggagacgttggaatcgttatgaaggagccccttcttcgatttttcctcccagagttcgatctcccggtcgctcatctctttcttctgggcgtctgtaagcggagcgtacttcttgtaagtcgcctcctccgatacataactgttcagttcttcaatcagagtattataatcctctacaaaactctttaaactatctattattttatcagtatcccgggaggtagtcaagctaattggggggtctccggcaccggttgtgcccgttaattccatggtaattccatccagctcaaatgtgttggtattacgctccatggtgacgccgtcaacggtgagttttgcgttctggccggcggtgatttgggcggtcatttgagggctgaatgtataattatcagttccaaaaagctctttaataaactggctggttgcggcatctgtaccggatatagtagcaatatttgttccacctgtaatagtcagtttattatcaccattgaattctacgatcccaccagttgcttctttaacagcattcttaaaggcatctaaatccggagggctgctgctggccatattaaccataatatttttattacctgctttaacataaataatccctgaacccgggatagatgatgcagcgttagaagtgaaactgccatttactggtgcaatcgaaatattttctacgccaaacagtttcttcaatgcagcttttccatcagcattatctcctgaaatgctaattgttgtattcccgcttatttcaattctgccatctgcagaatatgctgctccagctcctaatgcattaactaactcgctgattttactgctttcagttaaagtaacaccattaattaccattgtaccagtaaaccctgctgctcttaaggaatttcctgttccaagaaggttattgatcccatccgaaaagccaagtgctccagcgattccattatccaaattatcttgtacaaagctgatcttgtgattcttagatgctaaaataatagtgtcaacatcggtacccgcgttattttttgtttcaattgtaaaacaaacagctccagttcctaatttcttatcaagctgagagtttagtgcatcaatcacactctgattcgtcttgtaattactgctcccattttttccttccagggtaacttccacagttttgtcgtccacctgaaatacaaactttttatcatgcccggcatttaaatccgttctgattgaatccagaacttctgcctcaccgcctgccaaccgttttgaaaacaacgatgactgaactcccttcgcatccacgccaaacatggttgtaagtaatgttccatacgtttgtgacatcgtaatatttgatatatcaccggtcgaagtcgattccataataaacttatccgccgccgaagaatacgacacctttactcccgctccgctgttattgatggcactgatcacatcactcagagtagaatcctcagtcaatcctttaatggttacaccattaatctcaaattcgtatctgccgccctgcggtttattggcaaagttcatgtttttcagggaggtgccatagtccagtttattggaaaatccagtcccgaatccgagattctccaccgtaccggcatccccggaggactgaataatgactcttcttgaagagtccacgggaacatcggttaggtttccagccgcatccagctgcaccagctccatcgttcctttatcacttcccgttccagccgtatatttcataccgactgccgtaccaaaattccggtatagtgcctggttaatattctttattgtatccgcatcatttgcacctgcagtaaatgtgatcgtccggttcaccccgtccagtgtcgcggagaatgagtacgtatctccattggtaaactggctcatatcagcgccgcttcccactggcgttcctgtcaccgttcctgccgttttcactgtacacgccgtagccagacgctcaatcgaatcaatcttcatactgctgactgcgtttcctgaaaccgatgtaaccttaatattcgatgaactgctgacaccagtcatcgtattatataagctgctgctcagcagattcgtatcgccgcttccataataggaaaagtatttgtcactgaacgtgttgatcttcgtaataaggctgcggtagatatcctgtttccactccagctgctgttttagtcccgtctgtttgtcgatcttggactgggttccagacagcatgctctgtaccatactttccgtatccatgccggaagcaagccccgctatatagtttttattgccgctgttgctgactgtattaattgatgacgtcgatgacatcacgcctccccctatcttttctgattatagagcatgcccttcgttccctggtccatctgctttaaataaccggtgaacctggtatttgtgttgtttttcctgattttatcctgaagcaggtttctgactcgttccatctcagccagggctccgggctccagctcccggattcgggtcataaccgtaaaaatttcctgtccttccgaaaaaagtgcctgctcctcttcacttagcttcctgaaatcccacctgttttttgaaatctcaaagagccgttctccctcctccgaaaagttcttcattgccttcagccgctcatcaatcccgtctatctcttcgatcagctgctgtcttgcagcaattccggcctcaaactcttccgcctctctgcactcctgtgaggcaatccggcgtgtctcctcctcatactgaagaaagcaggctttcttctcatggagcagtttccgcatctcatcaatcatctccatgattttcctcctgctgcttctcttcctcttcctcagatgacatggcccgtaaatttctggacagctggaacacctttaacaagtcgaccttatccgaagcttctttattattttcaaccgttaaatacaactctgtacggcagatcttcatgtcctcgggagccgatatccccagacgcaccttgtctccctttacctcggttacaaatatctcgatatcatcaccgattttgatggactcacccttttttctggttagtatcagcatacgtcatcctccgcttcctcatcgaaaatgggctgccgtatggcatagtcctgttccagaatcacctgtaccgccagatttgtcttatgattgatgataatcggactctttaaattgactgtagatttacggaaggtttcccctatgaccataaggacccagcagtccagatcatcctcgggtaccgcctgaagcataatcagaacgtcctgcatgaccaccggtgcataatcccgcctcacctccagcggattcagcatgataaaacagacgtttttctgttcaattgactgcagccagcagatcccatttcccatattggaatcattgaccagcacgaactgggtgaactcctcaaagccaaagatcggctgcttaaacgttatgatatttttctcttctatttcgaggattccaaaatcccttgtctcaatcttcaagtttttccctccgcctttttaacccctgttattcctcgtaagccgggtttgcactcggcggaacatacatgggctcacctatgtactcgatatccactttgggatactgctccacatttacattcagctcgccgggtacgtagaccgcttccgtcttctgtaccatcggcttaaaatccacggaggccggtataaaatcaacggccagatccgctggagtccaggaaatatctgctcccacggaggggataaaaccgattcccgttgtcacactggtctgggcaagcatctggtttttcatgatatccgccacagtgactccatcctgaatctgcatcatctgattgccgacccgcgaatactgggcagttgcatcggcagccgctttgatccccgcctgggccgcatcgctcatcagtccccgggccgtcttaaatcccatgctgtctctggaacgtgaggtatcgatgtttactttaatcgtttcggatttcatattcaggcgtcccgggttctggataataccgatttccggatccggaatctggctgtccagcctggctcgctgtgacgtcatggacaacttgatgggtgtagtcgtaattttcaatacattcatgtaatgacacctcttctcctgatattatttcataaaatcaaaaatcgagggtggtatgatgctggaccccagctgcagtgttaccatccaggcagtctcataagacttgttgttaacggcctccgtctccacgcttaccgcttccagattcttctgtgtctctttgagattgacaagaccgctctctaaccggtccttggtgcggtctaagagtttttctctggtaccgatttcagaggtcgctatcgaaatattgctctgtttcttcttaagctgtgagagcgtatccatggctccgctcttatctccgtcctttaactggctttctatcttcccgatcagactgtagatgttattgggaattccctgatcatcggtgccatagcccaacacatcgacaccggatgtggatatcctgattccggttcccgccgtatttgtgccgctggcgtaggttccaaaaccgatatccagatacaccggtttattttcattgaaatgggtagccggatcatccggtttataagcatctaccgccttgccgttaaacagcagatttccctccgcatccagtgtaaacggtgcctcgccgttcgctgaaccggaaaataaaaatttatctccatatctggcattcatggtctgaagaatctcttccttgagtccgccaagctcctcggcgatcgcgtccaggttgtcctgactgctggcgccgcccgccctggtcgccttctcaaagacagtctccagaatcgaattaattgttgcaatattggaatctgcagtatccagctctcccaccgcatttttcacggtgttgatatgttcctcgctcctggcgatctgatcacgcacggtaaatgccttggccgccgccgccgggtcctcggaaacgtgattgtactgtctctgagaggtcagcttcaggtttgaggacgccagattcgctacatttctctgaagattcctgttatacattgccgtcatcatattttctgtaattctcatacgcccctctttaccttcctaccagccccatctggttgattatcatatccagctgttcatccatggttgtcatcagtctgcccagcgccgagtatgccttgttatacgtcatcatgttaatgccttcttcgttcagcgacactcccgatacgcccatgcggtctgattccacgctctccgcaattgcaagagacgctttcagtctggaatcattcgtctttttatcggttcccagtgtattggtgtatcccgtaataaattcgctgaatgttccggtaaatttgtcgctgccgtcaccgaattcaaaatccttctccagcgccgccttcatggcaagaatatcttcattgtccagatctccgtccggattcttttttcggattatgtaggaggaatcctttgtccacagatcgctgatccggatgctgccggcgctgactttcccgttaaaatccccctgtatcagagtcttaaatgggccgggtttatccggatcatcctcgtgaaccatactgttgaacacatttgccatggtctgcgcgaactcatccagcttgcgttcataataggggattcccgcattcagtgaattgtttccggtcagcatatcttcaaatcccctgatcgctccggctcctaagttggccgccgttccgtctccccaggaaagcgtcgtgccatccagtccaatccttattgattcattgctgcagcttccgccgttggcgtctaccaccagcttgccgcctaatttcacctgaattcttccctgatcgagagaaatgacctccagttttccatatcgcgataaatcatcaaggatggtatttctctgatccagcagatcattggggccataatttacaccgtcataatcggcgttgacaaagatctcatgggcaatggtctgattcagttcgctaagctgctgcagcttcgtgttaatgtcatctaccgcgatcgaaagatcatttttcgtctgttcctccagactctttaaattggtatcatattcattcagcacctgcgtcacgcctttaaatgcattcagcacaatattggcgttagtctcctgatatggatgctggctgaaatctgccagagcctgggaaagcacggtcagcgcatctttgataccggttccctccacctcgggatcactcaaaataccttccatctgctccataatagcagccttctggtcaaaatatcccacgtcggaatactgttcccggaatttcgtgtcgagatacggatttctgatctgacttacgcctcttgcatccacaccctgtcccgccagcggtatggaactgtactggaacctgtcactgccgtaaacctgcacagaaaccgtatcgagccgctgtctcgtatagccctttgtattgatattgctgatattgttgccaatgatatcgagcgccttctggtttaccatcagtccgcgtttggccgtctccagccccataaatgtcggtctcaattcttcactctcctataccggtcccgcatcagacctttttctcgaaccgctggcccttggggcctatggatttcccgtaaattccggttggatttcccaccagtctcgcatccagccccatcttttccagctctgactttgccagactctctgccttttcattgtaaaaacggatatttccgatagccccatccagacgcctgtataagtctgtcagctgtttccgttcctctcccccgcacagttctgcaacctcctgcagtgtcttaccgttaagacctgctttcgcaaacagttcctgacgccgctgctccatgttctgaagctgcttatccatagcctgctgcatcataatggattcctcgatcttgtcgagctcctttgtcatcagaagtcccagcttttccacctgcttctgttccattttttcaaacatttctgtatattccgtcagaaaacgaattaattcttccaatgtcttttcctctctataaaccgctcatcagccttttcgcaatctgttccgccgacacctgatacgtgccttcggacacctgctgttttaacgccgcgattcgatccgccggggcgccctcgtccatggacttcctgagcgctgccgcaaatgacgacgcctcgctctttttcgcgccgtcactgctgatgcagatggcgtcaccacgcacttttttatcggccgatgccgggacagaaacggatttttctgcatgcctgccactgtttaccgcgttttgataaacggaataattcctcgtaaccttcacatccatatccccgacttcctttctctcactgcttgatctgttaactcttatagtatttatcgtacgttaccgtaaatactttacagtttgcaggaattttttttatatttcacaaacaaaaaacgaacctgatcccgcagtgtttgctccagggctgtttcccgaagccttcaccatctgtctggtccgtttttcaattacttattccgtttcaatcagcccgtcagatttgaaactgttctctgcagtttttaatgacgaggctccttcttcaccatcaaaattgcctggatcagcgcactggtcacctccgaggcatacatctcctcattctttcttctgtgatcctcgtcctgttcactcatcaccacataatgtggttttaagcggttcagcgccagggctgcaatgtcttttttacacttatcgcatttacagcagttaaaacgatccagagtggcatccagttttgataagaccagttcctccatcaggttgatcagaaccatattctgttcttcctttaccggtaaggatacggcaggccgccgaatggccttcgccatactggctgccgtcggaaccgctgccgtactccccataagcccggcagcccccatgtccacggtgacggcgctttcatctggtccggaaacagcattcccgctcttcttccccgcggaaggcataatcttccggtacatcatctctttatcaatctctgatctgcttttagccatttgcttcaagccccctttggaagagttcgtccgccagcttttcgtagtccttcaccgcgttgcatccgggtgcatattccagcaccgatttctgcagcgactgggcttcgcggagcgccacgctttcccggatataagtgttcataaccgaaaaatccaaatcagccgccaccatattcagcgtcccttcgacttccctgctgaaccgggttctcggattatgcttcgttaaaaacgcccccagaaccttaatatccggattacagtagcttctcacccgctcgatggtctcgtttaactgcataattccctgcaggctgaaaatatcagacagcatcggcaccagaatatagtcggccgctgtaaatgcattcaccgtcaaaatccccaatgccggcggggaatcaatgaatatgtaatcataatagggcttcagcgaatccagagccatctttaaaaggaactctcgtcttgctcctgtaaattcaagttcaatactgctgagcaaaatattggacggaatcaaatccaccagagatgatttctgaactgcatacttgggttttaattcccccttcagaacatcgtagatcgtcgcacagccatccgtttcagcgcccatactgaagcttaaatttccctgtggatccatgtccacagccagcacccggtaacctttggatttaaaaaccgaggccagtacgtatgccgatgtcgtttttccaacaccgcccttttgatttgacaacacaatagtagctgccataagaattcccccataacttacaattttccacacaatatgacattattgttattatagcaagaatccgtgaaacatacaattggatttttcttccggttaaaggcatttctcgagcatttcgcacagcctcggaatctgggattcgaactcgacgccataccatcgggaactgccggctgcggcggtcgcctcaatacagagaactacgaaatccgcggccagcgtcagcgcgcttccgagacttaagccccgcatcatacctcccaggactaccgaggagtagagatcgccggttccatggtagctctgtggacagcggtgcgtaaaataggaaaagctctccccctcacgatccaggtaagccacacccaatttgtcaggctcaaagctgacgccggtcagggcagccgttttacacccaagcgccagcagccgttccagcatttccctgatataagactcatcataatccgttcgataaggcataccggtaagaagagaggcctctgtaatattcggcagtatcacgtccgctttcgcacatactttcgccatcgcagccgggaaattctcatcgaatgctggatacagcttcccgttgtcagccatggccggatcaaccaataccagattttcccctgtggcaaactgatcgaagaaatcacagatttgttcgcattgctctgcagatgccagataacctgtataaataccgtcaaacgaaatctgttccgccttccaggcctgggagattggcgcaatctggtcagataagtccttacaggtaaaagttttaaacatcgtatgcgtagacagcaccgccgtcggcagaattccacattccacccccatggcggaaataacaggaagtgcgaccgtaatggaacagcagccaacacaggatatatcctgaagtgtaacgattcgtttcatgaattaaatcctccttaaacgtattcttgttactgtgaagtatagcaaatattggactggtcataaatacccagaatcatcaaaaataaccagtccagttatagtgtgtatagtgtgattaccatgtgcgaatagtgtgattaacacatgcttaaaaaggaaagagaaaacagtaaaaatatcattgcatttcacatatatttatagtataatttacttgtatggattttatctatgtatttcttttgccgcacacgtcatatcgtgctaattcacataccggcagtttcgccgggaattttcaaatttggtaattgggaaaagacccgctgatagctgcattttataggattcatgattttataggattcatgattctatataacctgaaagtgcctttcattcacccgccctgtgccgggaagctatagctctctttcccgacataacaggaaaggggaaattctatgggacagaaagacatctctctggctcgttactttgaagacgaaagccggtatgctgatttaattaacggttttatatttggtggaaagcaggttgtttcaggcaatgatattcaggaccttgattcccgcgtaaccggacttatgtcaaagataaaaaagggatttaaggttcagaaataccgtgattctgtaagaaaagtagtattaggccttggatttgccattataggtcttgaaaatcaggaccgtgtccattatgccatgcccattcggatcatgctggaagacgccgccggatacgataaacaaatgcgtcaaatccagaagcatcaccgcaataaaaaagatttgcagaaagaagaatttttaagcggcttcaccatccacgataaagtttatccggtcattaccatctgcatttattacggtgacaagccttataacggagcaacagaactctaccaaatcatggaatacgaaactttgccggacaaactgaagccgttcctaaacaattacaaaatccatgtcctggaaatcaaacgtttccacgatatcgactgctttcaaacggatttacgtgaggtatttggatttattcagcgatccggcagccctgatgaagagcgcaaattcactttcgaaaacagagaaaaattccaggaactggacgaagatgcctttgatgtcattacaacggtaaccaactcaaaggagctggaacttctgaaaaatgagtatcaggatgaaagggggaagatcaatatgtgtgaagcaattctgggaatgatcgaggctggcagagtggaagggcggactgaaggcgaagccaaaattgtagcaatgattcggcgaaaatatgatagaaagaagaatttattgagtatctccgatgaattagaactggattactcctatgttaaggaagtgatcgacttaattaatacttatccagactggacagacttgcagataggcgaaacgctgataaaacagtaaaatttagaattgtagtaactagatttaacaggcgttttatggtcacaccagttttgataaatggtgccttataaactatatagcatttagaaaaaagggggagtttgtcttgaacaaactctccccttcttgagaattacggttatattatataatgtaaaatactttatatatattactgtaataactgtaatactgactgtggctgctgatttgcctgggcaagcatagcctgtgcagactgaaccagtacactgttctttgtgtagttcatcatttctttcgccatgtctacgtcacgaatacgagactctgcggaagtgatgttctctgtggttacacctaagttgttgatagtgtgctcaagacggttctggatagcaccaagtttgccacggctggtagatacggtgttgatggctgttttgattttggccatggccgcggatgcgccgtctctggtgctgatatctacagagtctaaatctaaagcatttacatgcatatcgccgatcccaagttcaagctgattataagaatcatttgtatctccaatctgcagcattaagcctccaccagcagaaagtccagagccattagctaatgtaaatacaccatttgccccgccagcagttagccccgctatctcagctgaactcatagaaccttcaaacgtaacttcggcatctgtaacaccggcatcttccaacattttattaatatcatctgatgtataagttttgtttgcagcaagtgctatacctatatttccattgccggcaacagtaactccagtagcagttgtaccagttgaggacgtgaatgtaaacacccttgaatcgacaccagcctttttagcagacactttaaactttccatcggcagttgctgtcgatgcctgtaccgccttagctgacgtcaaagaagaaacatttgttttagccgctgaatcagctcccgtaaacgctatatcctcctttaacgtaacttttaaatcttttgcattatccggtgctccagttgcagaagcaatagcacgatcaatgtcttcctgcgtaactttatctccatcttttgcaccaatagtaacagttaattttcctgttgtccatgccgcagttacttctttgcttgcacctgcagccttggtatcaatctgaacggttattccctcgccaccggaaattgaccaactaaaagcccctgatttcgcagtagcatcagctgctacagccacttctgcacctgttgttccaacacccaaagtgccatccagcaacttaatcccattaaaatccgtaccatcagcaatacggttaatctcatccttcaaagccgagatttcatcctgcaaagcctttctgtcaacatcatccgtataagtaccatttgcagacttcgtagccagttctgtcatacggtttaacatagaatgaacttcctgcaatccgccttcagccgtctgtactaatgagatcgcatcctgtgagttatcggtagctgcttccaaccctttaatctgtgctctcatcttctcagaaattgccaaacctgccgcatcatcgcctgctcggttaatcctgtaaccagatgataacttctccagtgatcttgctactgcactgttgttaatccccaactgcctgttggaattaagtgccataatgttgtgctgaatcctcataataattacctccatgtaattgtttttcaccgggacttccctgtccctcataataaataagtgcctccaatgtcggacgggccctgtctgacaccggaccgagtttccaaaacataccatcttttccactctgtaatatatatcgtacgattttactttttccttcatcataaaagtgcacaaaaatcgcttcgatttttgtgcactctatccataaagactttcttcaatataaaactcttccagcgacaaattatgttccttcaaatactgcgccacctcaacgcccacataccggaaatgccacggctcatatccaatccccgtgatttcctcttttccttcctcataacgcagggtaaatccataatcctgcgcatgttcccgcagccattttccttcgggagtcctctcaaatgcccgttccagctgatggtaggatcgtgtataaaaatccacggccagtccgaggcaatgttcacccgagcctggtatagacagtgtctgacgggccagcgcatttgcttcttcctttgaatgcccttttttcacatacgacgaaacctttctgttaaacagtttctcctgtttatccagggtccggtaaccagaacatactacaggcgacagaccttccgccttcatggcctccaacatcttcatcagcggttcgtaaatcctctcatccactgtttgatccgttcccggcacctccttcagcgttaccgtataatcttccggtaccggatactccgcattggtcaggatcaggcaccacatatcttccggattgattaccagcccttttgattcagcacttcctccgtcagcagtctcctccatcgaaccgccttcctttaattccccagccggagcattccggtccgaactttcctgcatcagtttctcttccctgatctccacagccgccgcagtcacagtctctgcacgctgttctgcctccgctgcctttcgctcctgcaccgtaaaatgcgcagaaatataaagaagcataaaaataagtaaaaatgtatatatcataacccgccggtttctaatcaccttccggttctccggcttcttttttcccatctgtaacgtttcctcctgccagccgtatccgattcgcctaccgaatccttctcaactgatcactctgcctcttcaagatataccgatacagcagatcctcctgcttcgtcgccatctccataaactcacagccatacccaaactctccatccggccgatcaacgcttctgcgtacctcacaggtaaagagcatggaatctcccatggcgggaatcacaatattaaaacggtcttttatcttgaatatttcccggcttcggaacatgagtccgcccaggctgatgtccaccagatgaacctttaaaccattatagtctgtggattcctcttccatgtcgaggatatcatccccccgcatacagttatagatcactcccgtatccctggtactgatacgaaaatactcccggcgctcatcattggtcgcctcgttcaagtcaatcacgcgggccagctttggggacgataaatagacacgcccgatcagcaccttaaaaccgatctgtgtgttataaatctcgatctttaccagcaaattatacggtatggaagggagctcatttctcgaactgccgatatctataaaattctttccgatccggtgcataacccccatggtaattaagtcgttgtttttagcctttatcacacaggaagatccaacatatccgtctgacaagtcaaccatatcgcgtacccccgtttatctgtcacatcagtctctttgtttccattctgccatactatagcgctattttgcagattcttcttttttctttccagaggccaggtttctgcggagtctttcgcctgccccgctctccttaccgcgaacctgtgcagccgcctctgccgccgtctccgatccccggatcgacgccgaggtttcgatcagcttacagtaaatagccgccaccacctcatatagttccaccggtatattgctcccaacctccagcatacagagaagagatgccgcactgtcatccttaaataccggaatcccctttttctctgcaatatctatgatatgctccgccacagttccataaccggaagcgataacaaccggggaagcgtcttcttctacgttatattttaaagcaaccgccttgtttttcttatattttgacatccacacccgtccttctgtatggaagatttttaaatacgtccatcagcgaacgcacgtggtccagtccgctgacctccacttccgccgcatggtagccgtactcctccataatctttctaaaatccggcgccagccgcccgaacacggatgtatatgattccggacagtacagataaaactgcatttccctgccggccaccttaaattccgcctccatctgaccgattcccggaatatcaaaggtgatcagtacatggacatggtcatcacgttcccggtcctgttcctggccgccgccttcatccttcgggtcgatccacaattcggaaaatgccttcatcccctgatactccaccggtatgacaaaatgaagcagaggcgtgtagttgcagggggacgagagaaggcttgtgataattttctcaatcttctcgccgtttaaactgttcatgggtgtctcccggtcctgcttactgatgatctctgccagggtatccatgattcgggaacggttctccctgtgttcagggctgccaaactgatttacataatcctgcagcaaatctttcagctggtccttatcctcccggctgtttacatgaatcagcaggtttaacagtgcctcctgcagataagactcgttatcctgataccgcgacatattataaagaaggttgggtatcatccgttccgtctggggagagaataaaacactgttctccagttccttcagcgcatctaaaatatccgccttggctgcctcccattccgtcaggcggttcttaagtcccgatccgtagtctatcacaccacggtttggctctgctccgccgtctcctccgatcatggcccggatccggtccgacagcattccaaacgttccggataaattccggcttcctgccagctgaccggacagaaattccaggctgttggccacggaatcaagcacatcatttctcgacacgcttccattcaccgctttcaaaaaatcagccatttccagccgcagttccggcttctcattcagcaaattcctcaggaaatcaaacagcggccctttaaacagggttgacgcatactcctgatccaccagttctcccacaatatcatcgggtttgatgagaagcgcgttaaacagctgtctgatttcctgagtcatggtattgttattcactggaagaaggctgataatctcctccagcatatagatattctttagatagttgaccgttaccgccggatccttcaaaaggttcatgagcgtcgcagctccggcctccttctggaacacgttgtgctggcccagcagcccgcttcccgacgggttctttgtgatatgccggatctcctgcatatcgaatggcacggatgggtctttctgcgccctgtcgggctgaatgatattcttattaatcacaggggacgtcacccgtaaaatatctgccattacctgattcctttcctgatttctccgtcaagataatagaaagaacagctttcttcccgttttactatggtcatcctgcagtccccgatgttgatcacggttcccggatggacctcgcccgccgtcagccggcatttgccgacctcccgcagctggcgcgccagatcagccgcctgcgtctttaaccgtttttcctttaaattgtggatcggagcctccagcttgagctttgccagacgttccttctgtctcggcgttatactgccgtctttcagctttccattcagataactgatgtcctttgctgtctccgcctgcttcctggagacagccaccaggtcagcactgattttctccacttcctccatcagctgaggcgtcacccccagcgttaccaccgttgaaacatggctggaggctcccacggtctttacattcatgcagttatgaaccgcgcagcttccggcgataaatgcccctcgcttcccgatcagcgtaagatcatggccgcaggagacctccgagttgataatatactcagcctgaatgttgtgctgcgcataaatggtgcagtcttccagaaattttgcagtaatatccactccggcttccagaatgccgctcttcattccccgcatccccttatggagcagaatacttccgcccgcctgcagggccgctccttccacaattcccatgaccgtgatgtcgcccttggccttaacagtatatccttcgaaaacatcgccatggatggtgacgcttccggtaaaatcaatatttcctatggagttatccacatttcccgatacaacaaagacattttccacctgaaatctgccgttccggaaggttaagttgccttcgcaggcagtcagaagcctgtcgcgctccggcgaatagacaacattttttccctgtggtatcggaggcatggtgccgttctttcccctgacgggctgtccgaagacatccatcccgtcctgaggttcggtaggcatcgtcagttcgcagacgagttccccctttcctacattgtgaatcaggttcatactcttaaaatcaatgccgccattccctttagacgcatactttattttagcctcccgcggaaaataatccttaatgcggccgtcatttccatcgaccgccggagtacctctggcaatgataaacatctggcggtataaatgttcagccgcaatggtgcttatcttttcctcatcgattccatgaatgattcgatgggcttccagttcctgttcaatctgctcccgggtgatatccctgccgccgcctgacggctcgatcagcattacggagacagccatacggtcatcggacaccgtcagttcaatcccggcgtcacggcattcttcctcaccggaacttttaccgccgccatcacggtctgttccggtttccacgtcttctccggcttccacgtcttctccggcttccacgtcttcttccgcctccgcgtcttccgcatgatccgcctcctcatagccgttttcgcctgccagctctctttccagccgttctctgcgcgttctttccgcatcattccagtcttccaccgtctcgatacgctgatccgtctccgccttcggtttttgatcctctgtatatggccggacttcacgctcttttgtctcgtcttcctctccattgtcgaggaattttgaaaacatgctaaaaatcaggctcttttcgctcatgggattccccccttttaagtaaatactgcaagttacgattagcgaagattattaatcatttcctccatctggtccgcggcgctgacgatccggctgttcagctgaaacgccctctgcgcctgcagcagattgatcatttccgtggggacatacgtactggacagctccagagttcccgtaagcagcctgcttcccgcctgagtctcatccatgtcttcaataggaatccattctccggaagcggctcccgtactgtataaatttttccctaccgggacgaggccatccggattctcacacgtatacaaaccgatcacctcactgagaccgctcaaatccagttcattggtaaactgcttctttccattactttcctcgaccgtcttatattccaactcgatccggtccccgtcacggctcagcacataatgcccgtctctcgttgtgagatagttgccttcatccgttgctgatatctggaacgagccatctctggtatagtatggttcctctgcatcttcattctcggattccactgcaaaatacgctttaccaagaatagcaaagtccagctcccgctctgtcttttcaaagatcccctgttcaaacacggtctccgcgccattagtcttcacgccgtggcccaccatctgatttgcatttttcgtatccatctgcgtataaagcaggtcatcaaaggagctgcgcagtaccttgtagcccggagtactgacatttgccatattattggcagtcacatcaagctccgactgaaatgcattcatcgctgatactgcagtgtaataagatatgttcatccgttatttcctcctacagcttcccgatttctgaagccgacttctggttcatctgatcgataatcgtaagcgcccggctgcaggactgaaatgccctctggacttccatggcgcgcgtcatctcggagtttaaattcacgccggattcctccagcttcccctgaaagacctccggatacacctgggtcagggccacaccgttttccgcaccgtatgtaccgttatcgtaaaaggtcagattatcgtaattgtcaggaaccacaatctgaatctgctccagttcgccattctcattatcgtaaataattccattctctcccacacggaaaccgccctcttccacctggatcggaccgccgtctcccatgacctggccaacgccctttaagaccagataaccgtcctcatcctgagtaaaatgaccgttgcgtgtcagatactgccggtcctcgccctgaatcacgaagaggccgtcgccgctgatggccatatcaaaattctttccggtatccaccagcgctccctgcctgtgggtcgtcatctcccgctctgccagggaaatggtggatccgccgccgatcgctgtggtctgtccattcatctgacgcaccagctgctcgtcaaaggtggtcttcaccagccgtttgctccggtatccgctggtctttacatttgcgatattattggctgaaatgttaagcgccctctggttcatcagcacgcccgaggcggccgtataaaatcctgaaaacatatggtttcctatcctctcacatattcttccagactgctctttaattttttcattgcttttgtgtgaatctggcacactcttgactggccgatccccataatttcggcaatctccgaatacttcagttcctcatagtaatagagtgaaacgacgagccgttccttatctcccaacgcttccaccgcctccgccagcgttctctgaaggtccctgtaaaacaggctttcctccggcttcgtgtcaatgtccgtggcttccagttcgtcttttgcaatcacacctgtcatatcctgcagcactgcctcaaaggagagaaccgccgcatggttcatatacgttaagtgcttctccaccttttccacgggaatatccaggaagtccgcgacttcatccgcctccggttcccgcatcttctcgtgggccagcatggaatacgcctcgtccacctttttctgaaaactgcgggctctgtgaggcacccagtcctgacttctgatataatcaatcatcgccccgcgcacacggataaatgcgtacgtctcaaactgggctcccttcgacgcatcgtaccggtcgaggcactccatcagcgccagaaccccctggtcgatcaaatcctcctcttccgtaaagctgcccgccatgccgcgaagctgcgccgccgcggaacggacgacggggaggaaatggacgataagcttattccgcagctcctggcttccgttttttaagtaaaccgaaagtaccgtctttccttcttctctgctcatctgttccatctgcataaaccgttacctctggcccagggcaatattccccaaagcctgtatctgtatgttattatcgatctcactgaacgacaccaccgtcacattggggtaaaactggtcgatcagcttcttaaaataaatccgcactaccggggacgtaagcacgatcggcacattgaccagatccttaatcttgttaatctcgccggtggccgatgtcacaatattctgaatagccgacggttccagggccagataggaccctgtatccaccttcttcaccgatgacatgatcatattttcaatcttgtcatccagacttaagaccttcatctgccccgcttcagagaaacgatgggagatggttctcttcagcgcctgccgcacgtattccgtcagcatatccgtatcctttatctgggttccgtaatcccccagcgtctccacgatcgtctccatatcgcggatcggtattccctcacgaaggaggttggaaagcaccttctgaagctctcccacggaaatcactgcgggaatggtatcctcgatgatgctggcatttgttttcttcagtgtttccagcagattgttgacctcctggcggtttaaaagctcatgtaaatgctccttcactacctccgataaatgggtgatgaccaccgatgtgggatcaatcagcgtgtaccccgccagctccgcctgaatcttcttgtcttcgctgatccatttagcaggaatatggaacgccggatcaatggtgtcgatacccggaatgtcatccgcgtctcctcccggcggaagagccagatagtgatccatgagaatatctccccttgccacttcctcgccctttaacaggatgctgtactggttgggatttaactgtccgctgtccttaatccggaccgacggtattacaaatcccatatccagggccatctgcttgcggaacatgacgacacggtcgataaagctgccgccgttgctctcatccgccagcggaattaagctgtagccaaattccatctcaatctgttccacggtcagaagaccgtatacattttcaatattcttataaaaggaagcttcactggtaacctccgcttccacatatccttccgccgcgtccgccactatggttttctgccgtctcatcagggcgtatccgccaccgatcatcatagctgatatcatgagaatctgaggcaccggaaatcccggaatcaggcacagacaggctgccgccccgccggctgtcataagcaccctgggctgggccagaaactggcttgtcaaatcctcgctcagactgttctccgacgcggaacgcgtcaccaccataccggtcgccacggagatcagaagcgccggaatctgggacaccaggccgtctccaatcgtcgaagtggtatagatctgcataatctcagagatgctgccctgaccgttcatcattccgacgacgatacctccaatgaagttgatcagtgtgatgatgatggaaatgatcgcatcaccctttacgaacttggtggcgccatccatggaaccgaagaaatcagcttctctctggatttttaagcgccgctccctggcctgctgctcatcgatcagaccactgttcagatcggcatcgatagccatctgttttcccggcatggcatccagcgtgaatctcgccgcgacctcggccacacgttccgaccccttggtgataacgataaactgtaccagcacaatgatcaggaatatgataaaaccaataaccgcgttcccccggattacgaactgtccgaaggttttcaccacctgccccgcgtagccattgtcaaacaggattttcctcgtcgaagagatattaagccccagccggaacagcgttgtgatcagcaaaagggaggggaacacggagaattccagcgtttcccggatatacatcgtcatgacgagaatcagaagcgacaacgtgatattcagtataaataaaaaatccagtatgggcgtcggcagggggatcagaatcaggaaaatgattccgatgattcccgctgtcacaaggatattaaaccgtttcaaatttattcaccatttccaataatacttcttgtatttacgatttcactgatacgcaccccgaaattatcatcaatcacgacgacctctccccgggcgatcagctgtccgtttacgatgatatccaccggcgcatctgcctgcttgtccagctccaccaccgtaccgttgttaaagttcagcacatcctttagtctgcgtctggtctttccgatctcgacggagacatttaagggaacatccatgataaggcccagattgccgttaatagacggcgatgcctggtatacggcatgcccggtgtcggccgtcaccgaattcgccgtacggctctccatcccggactgcaggctctcccttccggctgccgccggagctgcgccctgctgcaccggcttcacgaaaaggctctcctccatggctttcgcctcggcctccgcccttttctccgcttccctcctggccccgatctcctgataaatactgtcggccgccgttatggatatgcactccataaattcagactccaccatgtccttgatcttcacacggtaatgaatcacaatcgtctttgattcgggagcttctccgatggcaggagacaggttctgcctgccatccgaaaggatcagctggcagtccgatgactccatggtattgcccaggtattccgccatggcctccacggacgcatgcaccatctggttcatcagctccgcagctgcactcatagccacttcatcgaactcaaaatccgggtcgggcagatcatcaattcccatcagttcgtttaagaacgcctgcatatcccgctgacgcaggatcataaccgtattgccggcaacgccggaggtcaggcagcttttgacaaagacagcaggttccagaatcccgtattccacttcctttaccgttatctccgttatctccggactgctgatctctatatccgccttcagaatcgatgacagggattcccccgccgcctttgcgtgcagatgaatcagttcctcaaacacctgccggtccgtcctattcatgatcccctggttctctacttcctttgccatcgctataagctccttttattcctcattctttctgcttttccgtctgctctttttcttctgctttccgtcttccttttcagtgtcttcttccaccttcttacggctggccggaagcagcttgtagagtttttcttctatgaatttcgggttttccccgtcctgaatggccagaacgccttccaggaccagttgtttacataaaaattcctcatcgtgccttgccttcagtttgcttgccaccggcagacatacgatgttggccagaagagagccgtataatgtggtgatcagagccgttgccatgccttttgcaagggcattgacatcctgcatgttgcccagcatcagaatcaggccgaccagcgtaccgatcataccgaatgccggtgcaaagctggccgccttctcatagaacccgcggtccagcgcatgacgctcatctaactggtccagctccgtctccatgacctgacggaccttttctgaatccacggaatccaccaccagtaaaaggctgttgtgcatgaacggctcgtcaatctcgtttagcttgtcctccagggagagaagtcccttcatacgcgcctccgtagccagctccacaatctgttcaatggactgttccggatcaaacttatacggttttataatgatctttaaatgtttccctatctttttaaacgccccggaggggaaggacagcatcataacaccgatggtgcctcctatggtaatggccatactcggaagatcgataaacgcccgtagattgtgaaagaccagcttcatggcctcctgatcaaaggtcataccgaacagtaccagcactaccgccaaaataaaacccagaattgacatgatatccatatctgctacatccttttccttaacttttcttgtatttccacccggttatcctctgatctgttcgatcagatcactgaacgtctttctgcggaacgccgcgacccgttcgacaacctcttcctttgattcccgcacaatcaggtgtttcccgttggtgagaagaatcgtggtatcgggattctccatgatcatctcgatcaaatcacagttgaggacgaattcctctccatttaatttactcagggtaatcaccgataccacctcctgttatcgcttcaggtttacaagttcctccagaatcgagtctgatactgtaatgatacgtgagttggcctggaagcctctctgtgttacgatcatatcggaaaactcagtggaaatatccacattggacatctccagtgaggaggtctttaacgctcccgttccgtcctcaccggcctggcaggccttggcctcaccggagttggaggtcgcccggaagtaggaatttccactttcctccagtccatacgggttttcaaaggtgaccagatcgatacggccgatctggattttgcccttatccggatgggttgcctcaatgataccgtttcccagaatggcgatcgatgcgccggaaagggagatcgcaccgccctccgtaccattttccagtgtaaatgttccgcttccaagtcctgcatcgttggactgcgtagccgcggtgatggttcctgcatgatccttcggcacaaaggaagcgtatgtcttatctgcctcatctgcgtttaaaaatgcggtgttaatgtctgaatagcccttatggtcgatggtcagggttccgccgccttcttccgtaagcaccaggtctccggccgcgtcgccctcgctgatatcaccggaatacgtcttgccgccgcttaccgcagttacatgccattttgccttattgcccgcgctggcaggtatctttaccgcgctgtattcaatgtcgtcaccggggttgattcccgaggtgccgtaatccttaaggctcatactcttgttgaaaaatccggtccccgctgccgccggcatcgtcacattgtgaaaagactgcgccgtatttcccgtgcctgcattaaacgaagaagtgatcgccgtataacccggatggctcatctcgatgtactgccccgttccggcttccttcagccacatcttgcctgcagttgtggtgttctcatttatttcgccgacaaactcccgtccgtccaccgtggccgtcacaacccaggccatctttccgcctgtacccggcctcagttctgatttaaagtccaccggacccgccgcgtcaaaggcaggactcgtgctcatgccggaaaacttcagtccgccgaagattccgtcagccgcatctgtggaggtgacaaattcgaaggttccttcgttaattccaaagtggtcgcctaagagctccgcgccggtcagcggtttctggaacacattctccgccggtgtcgcggtgatggtaaagttaccgcccggatgggcctttccgccgcagccgcgggtgatggcgctgttcatcttgctgttaaagtctgaaagactcgtaaagatagcatttttattcacatgcaccgtgatgctggaatcgttgatatcggatggattcacaacgatatcggaaccggaaggcagattgtcctccgccttaaaggtgatggatacgttggcatccgttgtggccttctccgaggtgatcgtaaactgggttccgttgatcgtcagcgtcttcgatgccagtccgctggacttggtcggaatgttcaaatggatcttgtcggaggatggcgccttgcccagcggatcaccggatacgccgagtaccgtatagccgttggaatccaccaggttgccgctgttggaatccagcattaagtttcctgctctcgtgtagaagatatttccatctgcatccatgacctggaaaaatccttctcctgtaatcgccacgtccaggggtctgcctgtggactgcagcgccgaacggctcatatccagatcgatgccgcctaactgggaaccgtaaccaacctggctggcattggttcctcctttattgttgtcgccgcctgctgcgctctgtaatgtctgatagaatacatcctgaaaacgcgcgcggctggatttgaatccgtacgtatttacgttggcaatattattgccgataacatccagctttgtctggtgtgctttcataccggacactgcggaatacaatgatcttaacatagttgatatctccttttctaaccgccttacccgtccgtcaatcggggtaagaatagcctccaaaaggaccggctataccataacggttccgtcaatgtttgtgaagacagtgccttttaagctttcttcgttcacaacagttactactttgttattctttacatttacaacaaatgccgtggagtccatcaggattaacggagccttaagccccttttctccggccagttttaccccctcattcagccgttccagcttatcagaggacacatccacgcttcgctccatcacccgctccacggcatgtctggaaaacgtcacctggctttcttcctttagtttctgttccagcagttctttaaacgcgctgccgccttccgtgccctccgccggtttattcctggcggcttcccacggttttccggtacatatgggggtatgaagcattttgttatatatcatggaatccattctcttacctccttactgcactgatgctcatatctttgaatccttatcgccgggattttctccatccccgtctccgctgccttcagaatccgggggctcagttccgtccttctccggtgcctctgtcctgatctccatgatctcatccatgccgtaggattctccttccacatagatcacgaattttccgtccagcagggaaaccttgtttacgactccttccgtcttctttaagtccccggcgaccgtaaatttggcagccgtaaccgtcttgcccacaagcgaggtcacataggtgctcttggcgttatacgccatctcttccatctgctgcatggtcgatatctgggccagctgcgtcacatactgggtgtcgtccaccggattcataaaatcctgatttttcagctgggctaccatcagagtcaggaaatcctccatgctgacggctttatcggatgcatcgccaaacacagcatctatgacgtctccgtttcccgacgcgccatttgtaccttctgtttctttctcaccatcctccgatgcctttgccggtgcagcatctcccgacactcccggtccgctgcttccggaggaggcggttctcaggtacggatttgaatattctggtatctgtactgacatgtctctccttttctcttcatttccttactcatggggcgtctacacatacgcatacaatctgcgaaccaggctctccgccgccattcgctctgtctcctgtataaacactccgtcgtccgccatcaatccctgattcacgccgcggcggtaatgtccccgggcctgctgcccctgattctgatagagctcctggccgaatcctgcaaaatccattccgccctggctgttgtgatatacctcttccacctctgcatgaagcggctccagcatctccttcaggctcatcatctggctgttaaccagcttctccgtctccggattggccactccgatgctgaccgatgtcctgccgcctgcgcttgccatatgtacgacgatctctcccaggccctccggcttcagcttgatggtgaattccgacaattcccgtttcatgccctgttctacccctgccttcagctgttctgctaccggtgtgtgcagatcggaagcggtattgtccaccgtcggcacgccctttaacgcgccctgctgcgatacgcttagcctgtcctgaaacgacatgccttttccgtctgaattctttttcagttcctccagcatccggttgtccatcgcatcgtcagaaacggtctcctcttctgtctgtacctgcgttccggttcccatggccttcatctgttctgaatggcccttcagcaaatcggaaaagcttccttcctctctgcctgtgccgttcccatctgtaaccggcaggtgaccggccagagccgtatgctccgcttctgctgacttcacggcttctgtcttctgcccgttttccgtttcctccactttctgtgctgccggctggaaacgcatctcccgggtattgactgcgtctgatgcacccgcgttttctgcggctgccgcctgaaccgcctcgtatccggcgcctgtaccggatcccggtactgctgcagcttccgtctgatccgatacgctgcctgcctccgttaccgcctggagcccgtcttcttctgcgttcgcaccgtttatcagcggcacggccggagcttccgccataactgctgcctgctctgccatgatttccagatctgccgtttttcccgcttcttcctgtgcagaatcttccgtctttttcgtatccggcttcttttccggagccttctcagccctggtatctgccggtccggaagcctcagccctcaccgtatcattaccggtgtcatcggttttcgaaccagtctgaatctcaggcgtcttccgggcgctctgtgactgatttctgtcctctgccgcctttttccccgcctttagcatctcgctgaaggtatcggcaaaattcgctttacctgccgctctgccttttccatgatccgcagttacctgctgcttccagccggtaaccgaagctttcatggctgtttccatattcattttcttctcaccgcctttctctcagtgacatatttattgggaagcaccacgacgtacgaaatttcccgcaacatgttccgctatggtttcctgctgctccttcgcttcaccgcggtggtattcctctaactgtttttccttcagcttttccagcttttttacttctctggaggcctccgtcactacctgacgctgccgttccagacctgcctgcaaaagcttccgttctttctccagctcctccagctggtttcttgcactttccagaatggagtaacaggctttcagcataaatatcgtagttccttccgcctcccgcctggcgatctccgcctgtataccggcggccttctcagccatatcccgtttccgtgcttccagtgcatcccgctctgcagtcatacggcccaggattcccatctccttctccagattctggctttgaaaattcagcatacgctccagtgaaaatgcaaactttttcataaaactccctctattcggtcagttgaatcatacgtatgacggcctcatccagagtaaagctctcatccgtcttctgctgcagaaactcatatattttatcaattctcatcagcgcgtcatccaattccttattcgtccccttcttatacgctccgatcgaaacaagatcgatgttgctctcatagacggagagaagttttcggatcttccctgctgcctccttgtgctccggcatcacgatgtcgctcatcagacggctgacgctggataagatgtcgatcgccggataccggttctgtgtcgccacctttctcgacagcatgatatgaccgtcaatgatgccccgcaccgtatcggacaccggttcgttggcatcgtccccctccaccagaaccgtgtagattccggtgatggatcccgtctcaaaattgcctgaccgttctaacagcttgggaagctccgagtaaatggaaggggtatatcccctcgccaccggcggctctccaatgctcagccccacttcccgctgtgccatggcaaaccgtgtaagggaatccatcatcagcagaacgtccattccctgatctttgaagtactctgcgatcgtcgtcgccgtcatggtgcatttggaacgcatcattgccgactggttggaggtggccaccaccagaacagagcgcttcaatccctcttctcccagatcccggttgataaactccacaacctcgcggcttctctccccgaccagggcaatgacattgacatccgccttcacattcttggcaatcatgcccatcagcgtgcttttaccgacgccgcttccggcgaagatccccattctctggccctttccaatggttaagagcccgtctatggccttgactcccatctggatcacagtatcaattctgggccgctccatggggttggagcgtttgccggttatgggataataagcgacctcccccaaaggaccctggccgtcgatcggcattcccatggcatccacggtacggccgattaactcattggataccggtatcaaaagccgttctcccgtatttcggaccgcgcttccgtagccgatgccctctgtctcttcatagggcattaaaagcacccggttttcacgaaatcccaccacctcagccattaccggcggactgcctcccggaacatcgatggtgcagacatcaccgattctgcaggcaggtcccatggattccaccgtagtccccacaatcttgtctatcttccccagataggtatacaaattggcgttctgaaccgcctgtctcacactctctatcatcttatgcgccgcctgtctcactatttcagtaattccgccagctgccgttttaaattctccaattgcacaaacacggaggcgtccacaatcccttcctccgtctcaatctgcacatagccgggctgctgctgttccggtctgatgcggacatatccgccgtttcggtctctcaatggttccaggcgtctctccagttcttccaccagggcgatggagtcgtctgacaaatgcacggtgatctcattcttatcccgctccgacaacaccgcctgctccaccatatcggccagccccgctctgccggcgtctacttctctctgcagaattttttctgctatcatgagggccatctctgtaatcccggcctttatctcctccgagtgctcttccagccggcgccctgcctgttccacggcctgtccaatcctgaccaggcccgtggaaatgtccgcttcagcccggttgataccgtcctcatagccctcttcctccgcctgctttttcagccgttccgcctccgcaagagccgtattcacaatcttgtcccgctgggcgtaggcttcctctaaaatcctggcggcagactgctccgcctggcttctggcatgttccagaatctttctcttttcttcagatatcagcgcataccgggggatcgaaccatcggcagattcctgaactgcagtttccggttccccgttggccgtttccgcctgatctgcgctggggccgggcatctgataggcaggaacccttccttctcccagcaccgtctgtccggacttgattaccctatacaatgatctcatcctttccatccttggagattacgatctccccctcttcctccagacggcggatcacagccacgattctctgctgcgcctcttccacatcgctcattcggatattatgcagatactccatatcgctctgtatggattccctcatacggtttgacatgttggcgaatatcgcattcatcacatctttgttggatacctttaacgcgaccgccaggtccttggaatcggtctctcttaagaaacgctggatcgacagcggatccagatatgcaatgtcttcaaatacaaacatcagcttgcgcacatcctcggcaagctggggatttttaaggttcagctcatcaaaaatatctctctccgtgctgcggtccacatggttcataatatcggcgatataattgagtcctcccacttccatggtctcttccgaggacgaggaaccgatcttcttctccagcacctcttccgcaatcttgatggccatcggcagcgccctgtccatggcagcgatgcgttccaccacatccacccgcgtctcctgaggaagattcgcgataatcttggacgcctgctccggagtggcgtaagaaaggatcagcgccagtgtctgcggatgctcgttctgtatcgcggtcatcagtgtcttataatctacttttctgataaaactgaacgccttggtcttaagcgccttgctgacccggtccattaaatttctcgcctgctgctggccgaatgccttttccagcacttccttggcgtagtcttttccgccctcggtaatcaccttttccgtcacacaacaattgtaaaagtccttggctatatcttccatctcatccggtgccaggtgaggaagccttgtaatctccatggacagctgttccacttcattctctgtcagataccggaacacctcggaggcccgttccgtaccgagcatggatatgacggccgcagctttttctgctggtcttctttcttctgccggcatactacttcttatcctccttcagccagttgcttatcatagatgcaatgatctcagggttgtcctccgcaaaggagcggacctgattcaccggatcctgtggttttacgggaatattggtaagacggttttctaccgcgctctcttcggcgcgctccgcgatatcacgatccagctcaacggcatccccctcaaagggtccgaacagctcctggtcttcttttctctgtttctttttcctgtggcgtaaaatgaggaacaaaagtacaaggaacaggaaaataccggccgcagctcccgctatcagaatacggggatcgattcccccgacaccaggagccgtcaccggaattaccggtttttccggttccggagttttatccgatgcaatctgctggaagctggatactacaatgtcttccggcgcgatattggcggccttcgacgccgcatcgatcagctgctgcttctttgactctgtcagattactgtcattcacggtaatcgccacagtcgccttctgcagctttacgttgtccttctcaatctgtttcttgatatatcctaccagatagtccacatcgcggtaataatctccgttggccccattggctcctccggttcccgccgctccatacgttggaatatccgtgttgttctcttctccggccaccccgccggcgcctccgccctggccgtttaccgactgtccagtcttatagtgctccaccacgccctgaccgttgtcctgaggctcatactgcagatcctcggtgatcatcttatcgtaatcgataaccaccgtcgcagatacccgaatctgccccggcggatacgccagggtcagcacattcatgatcttgtcctgaaggcgcttttccacctttgtctcaaaatccagacggcccagaccgtagctggtcagtccgcccacatcgtcagacaccatctcctgcatcgtctccgcattgactacggttacattctccggaagcagcctgggaacgctgttggcaatcaggttcttgatggcccccactttttccggcgacagttcacagtcgggcatcagggtcagggaaacggcccccgtactgtcggccccctgatcgtcccacacatagttgctgtcatcagatacgttcagcgtcactatcgcattcttaatgccgttcatgtccttcagggtccgttcaattctgtcctgaagattcaggagaagatactggcgcttctcgaattctgtcgtggtaaatcccatattatccgaaaaaatgtcaaaaggaagtgccgttttcggatatcccagttctgacatatcaagcataatgtcaccgacctggttctccggaaccgtcacttctccttctgcatttctcttcgcgcctactccacgaccgttcagcactgcgagtatttcattattctcttctcttgaaattcccgggaaaagtaccacgtactctccggctttatttgtatttaacaggattgccgccgccagagcgacgatgaccgccgccagaacgcccgtcgccgctgctttcctttttttgctgcccaaaagacggccgaccgtaccgctgccgtcgactgccgttttcactttgtctttcacacccataattccaccactgctatctttccgttattttaaatctgcattcccataatctgagtgtacgcactgactgccttactggtcagctgtgtcgtaaactcgatcgcagcagcggattgttctgcctgaatcaatgctgtatgtaaattatcgatctgaccggccgcaagcttcacatccatctctctggtatctttcaccgcctgatccgcttccctgaccgcatccgtcaatatattctgaaagctgctctttccctgcttttgcggggctttgtccaattttttcatctcctccagagatgccggaccctccagcctcgttattggcactataaacataattcccctccaaatgcccctgtaattttgcttttggttacaaaatttggctattttcagtataactttttaaaatcgttacgtcaacttaaaacttaagaaaaatgtatgtttttgtaataattcttacatttttccataattttccaaaaaaagactatcatggttacatggctgttttctgtttcagccatcaactatgatagtctattttacttctttcagcgaacccacactccgtcggaattcaggtaataaccgcccacactcgtcccgcgcaccatagctccggtatccggcgcgaagtagtaccattttccgctgtccagaagccagccagtatgcatgcttccgtcaccgtcgaaatagtaagtactgccgcccagtgtcagccatccggtctgcatgcttccgtcgtctgacaggtaataccatttccggttatcctggaaccagccggtctgcatcgctccattactgtcaaggtagtaatattttccgtttttcagctgccagccggttaaaatgtaaccatcgtaatcaaacagataccatgccccgtcaatgttctgccacgtgtttgccggatagcttccatccgcattgcggtaccaccagccatctgaattctttacccagccgatattggccggcgtcagatttgaattctgtctgcccccgccctggctgtatgtctgatcgtcatcaatgtcctgttcatcggaatatacccagtcaccgctggtaatatagccctgctcctccgtatcctttggaattgcacggacacggaactggtaacggcctgcctgagtcataaaaggatagaaatcgtatgtggtggcattgacctttgccactccctgaatcatctgaccgtcacggtacagtttcagttcatatgccccggcgtaaggaaccgcttcccaggttccttttcccagcggataaccaacccattccgcggaattgggaatatccagcgtgccggaagccggtgtcagtttaactgttaaaagaagcgtctcgttattattctggcgttttaccgaagcataggttgcccccgtaatctggaacttccccgcccccgtcgtcttttcgaaatagcagccgcttctggcatggatctctatctgtactttcggcacatctcccggttcccagtattctttattgccgttcacccacgtatatgcgccgatggtatagagactgctgtcagtcgtcacatagactgtggctgcatccagatcgtagtcggcctttacatcggaacgcaccgtaatcgatacggaagtaatcggtgttctcgtctcatttttcacagcggcccaaaccgttcctgaagcattcggcagtgctgccgtcagcaagccgcacgccagaactgccgccgcggcctgtcttaacctgcgtaacatatcttatcctcctgtctgctacggtatccagataccatctgaattaatgtaatacgtctctaccatcctgtccttcaccatgcgtccgttatccggatccagataataccagttatccttataccggatccagccgaccgccatactgccgtccggattcagatagtaccagtcactgccctgctgaagccatccgcctgacacctttcccacctgcggatccagataataccacacccggttgtcctggagccagcctgtcaccatgtctccgttgctggtcagatagtattcgtgaccgttcttcgtctgccagccggtcagcatgtaaccatccatgttaaacagataccatttatcgttgatcagctgccagctgttcaccggataggtaccatctgcattccggtaccaccagccgtttctgtcctgctcccagccgggacttcgggaaccgggaccgtttccctgaccggggccctggctgccgctgccaaaactgctgccggaaccgccgttccctgaggaattccgggcctctgcggcttcggcatcccgttttgtaatctcctgattgtctgactccgtccattctcccgcctttaaataatctgcttccgacgcagtctttgccacagccctcaccttgaaatagtaatcgccgcgcgacgtcatccgggaaaagaagtcatagctggtggatgacgtcttctccacccggtataccatactgtccccacagtacagctttacttcataagccggagcgttctccactctgctccatctcgccttgcccagcggcgccgattcccagtaagcgctttccacggtccccagtgttcccttaacccccttcagctttactgacagtgtcagagaatggttgtcgcttcccttctttgcagaagaatagacagccccctttacggtggcctttcctgcgttaatggagctgaaatagtagccctcctccgcctccagttctatggttacctttggggtttctcccgccttccagcttcctctggaatttgcgaaatcacacgataccacccggtactttgaactgtttgccgtggctgaaaccgtgccctcatctgcttccgcctccaccgatgaagtgacggtgaccgacacggacttaatcgcctcttctccaaaggcagtcatggaatatccggctgccaggaacgttactgcggcaagaagcagccatagcctgccggtcttttttctgtatttcattttctttccccctcttatcttttctctcttaccacggccttcgtattgacacaatcgtgcggtatgcaggattgtcgtccacccggattcccgcctttgccgagcgcgcgtgaacaattcttccgccgccgatatacatggctacgtgacccggatagtagactaagtctcccggctccatgtcttcatatgcaatttctctgccaaaaccggcctgttccgcagacgtcctcgggatcgatacaccaaagtgacggtagaccgactgaacaaatccggagcagtccgctcccgaggttaagcttgtaccgccccacacatagggattccccacaaactgcagtgcatagtctgccacacttcttccgaattctgtgcctccggtactcctgatgattccaggtcctccgttctgcgtcttccccggcccgccctgcgctccctgagaaccgctctgcctccactgcgcttcgtttcgggctgcttcgctgatcctcttctgttcttctgctctccgctcctcttcctcccgaagaagcctgatgtcctctgtccgccttcttataacctctgcctgttttcccgcttccgccctggcggccttgagtctgagatcgaaatcagactcctctgcccgtttttctgtcatcatggttcgcagcgtcttttcccggactccgtattcctgccgtaagctgtaaagctccgactgccgctcctccagcgcttccttccggttccccgcatcgcacttcgtcttctcgtactccgtgattaacttccggtcatactcgtagagctgctgaaaatactcattcccgttgattacgtcaccaatggttttcgctttcagaagaatatccagataggtaacttcaccttcttcataaatatactggatccgctttttcagtatctcgtactgacgcttccttttttcctccgcccgctgatattccgcttcctcccgctcgatctgccgggtcatatcatccatgtcggtctccagcagatccatatcggtcagtaaaccggtcagctccttatccagccggccggccagcgcggcggcttcccccttttttctctccagttcctccgcttccccgtttaccgcctcataccttgcctccgcctcctgcttctcccgctccgcttcggatatgggcgaggccgccgatacaaaggaaaccatctgccccagacagacggcagcagtgacaaacagcaggaaacggcagcaccgaaccggtctctgatgccccatcatttgtaatcccctgactcatctcataataataaacggcgtaaccgtttgctgctatcagtgtaccatagctggagaataatttcaaatcaagaataaattaccggaatattccaaattatgtaacctgttgtatcccaaaaagaccggcatccaacacattacgtgtcgaataccggtccattcgcttcaaccgctattttctgagggaaagtcgtacaagcgctcttctgagtgccagttccgccctcatggtatcaatttcaccgctctcttcctttaagcggcgttccgcacggattctcgcttcctccgcacgattgccatcgatctcatccggccattcggccacttcggccataatggtgattctctccgggagaatctcaataaatccggacatcagggctgcttccttaaccccgccctcctcgtgaatctttaagactccgggagccacaatggctgtcagcgggatatggttcctgtatacaccgatgtctccctccgtcgtggacagttccaccatggaagcttctccatcgtaaaatctccgttcgggagtaatcacatgcagtttgaataaatcagccatattcccaccccctatttcacacgggcaagaacatcatccatactacctgcatttaagaaatagctttcaggaatatcgtcatgtttgccttccagaatctccttgaagccctgaatcgtatcagccagcggaacgtaacggccttccagaccggtaaactgtcctgccacgaagaacggctgggataagaatctctgaatctttctcgcacgggatacggtaagcttatcttcttcagaaagctcatccatacccagcatggcgatgatatcctgtaactctttatacttctgaagtacttcctgtacgccgcgggccacgttgtaatgctcttcacccacgatacgcgggtctaagatgcgggaggtggactccagcggatctacggccggatagatacccagctctacgatggcacggcttaaaacagtggtcgcatccagatgggcgaatgtattagccggagccgggtcggttaagtcatcggccggcacgtaaacagcctgtacggatgtgatggaaccgttcttagtcgatgtaatacgctcctgaagagcacccatctcggtctgcagggtcggctggtaaccaacggcggatggcatacggccaagcagagcggaaacctcggaacctgcctgcgtgaaacggaagatattgtcgatgaacagcagtacatccttgcctgcctggtcacggaaatactctgccatggtcagtccggtcagtccgactctcatacgggctcccggcggttcgttcatctgtccgaacaccatggtggttttattgataacgcctgattcctgcatctcatagtataagtcgtttccctcacgggtacgctcgccaacgccggtgaatacggaatatccgccgtgctctgtagcgatgttacgaatcagttcctggattaatacggtttttcctacgccggcgccgccgaacagaccgatcttaccgcccttctgataggggcagagaagatcgactaccttgatacccgtttccaggatctcagtctcggtggactgctcttcaaatgtaggagccggtctgtggatcggtaagtactctttcacttccggctttggtttattatcgatgggatcacccagtacgttaaagatacgtcccagggtctcttcaccgaccggtattgtgatcggcgcccccgttgcgacggcttccataccacgtaccagtccatcggtcgaacccatggcgatacatcttacggtatcatcgccaaggtgctgggatacttccacaaccaggcggtttccgtttttcatcgtgatgtcaatcgcatcattgatgctcggaagcctgccctggctgaacttgatatccagtacggcaccgatgatctgggtgatcttaccaatattttgttctgccatcttgtttctccttttattattatgatattgcattggcacctgcaatgatctcggtcagctcctgggtaatggagccctgtcttgcacggttgtatgccaaaccaagttcttcaatcatctcttccgcattatttgtcgccgaatccatggctgtcatccgggcgccgttttcacttgccacggcctctaaaagcgcgccatagatcagactgctcatatatttcggaatgatggaatccagcacctgatcttcattcggttcataattcataagcaccagatccgtcttttcgcctgcgtcgcctgcctctacgggaagcagttttttaagcgtcggaatatgggtcactgtatttttgaatgaagtgtaggccagatagatttcaccaatctggttctgaccaaacgcatccaggagctccgcggtcacatcggccgcgtcgcggtagatcggctcattgatgacctcggaataatcctcggcaatctcatagccttttctcacaaatgaatcctttcccttacggccgatggcatagatgacggcgttttccggagtcagaccttccgctcccgttaccagcttgacgatgttgttgttgtaaccgcctgccagaccacggttggaagtgatggcgatgaccgccttcttcttcgaatctcccgcctttaaatacttatgctctatattgccggatttacgcagcatggagcagatcgtatcatacatcatgtcgtaatatggttttgattcttctgcttttgttctggacttctgcagcttcacggtggatacaagcttcatggctttcgtaatctgctcggtgctttgaatactttcttttctatgtttgatatccctcatggatgccatgattcttcacctgcctttattacaatcctgttaaaaagcctccgccttgcactcgttaatcgccttcgtcagcagcgcatccgtctcctcggtaatctgcttcgtatcacggatcgaagccggaatctgcggatatttgctgtcgatgaagctgaataatgccttctcaaaatcaaggatacggtgggtaggaatgtccagcaaaagctttctggtggcagcgaaaataatcatgacctggtattctaccggcatcggctgatactgcccctgctttaacacttccttgattctctcgccctgtgccagctgttccgtggtctctttatcaagctctgagccgaactgggcaaagcttgcaagctcgcggtactgagccagctccacacggatcggagccgcaatcttcttcatcgccttgatctgagccgcgccgcctacacgggatacggacagacctgcgttgatggccggacggaaaccggagttaaacatctccgtctccagataaatctggccgtcagtaatagagatcacgttcgtcggaatataggccgaaacgtcacctgcctgagtctcaataatcggaagagccgttaaggagccgccgcccaacgcgtcggataacttacttgctctctctaaaagtcttgaatggagatagaatacatcgcccggatatgcctcacgtcccggcggtctcttgagcagcagggacagggtacggtaagccgccgcatgtttacttaagtcgtcgtaaacaaccagtacgtcctcgccgttctccatccactcctcgccgatggcgcatccggagtatggagcaatatactgaagaggagccagatcggaggctgtggataccacgatggtggtgtaatccatggcgccgtactcctcaagagtcttaacaatggtagcaaccgtagaagccttctggccgatggccacgtagatacagtgaaccccctgccccctctggttgataatggtatcgatggcaatcgcagtcttaccggtctgacggtcgccgatgattaattcacgctggcctcttccgatggggatcatggcatcgatggccttgataccggtctgaagcggcgtgtctactgattttctgtcaattacgccgtgagcaacacgctcaatctggcggaatttgtctgtctggaccggtcccttgccatctaccggctgtcccagcgcgttcaccacgcggccggtcatcgcatcgccgacaggaacttccaccacgcggccggtcgtcttaacggtatcgccctcgctgatgtctccggcaccgagtaaaacggcgcccacgttatcctcttccaggttgagtaccatgccgtagatctctcccgggaactctaaaagttcaccctgcatggcgttctcaagaccgtggatacgtgcaattccgtccgctacctgaatgactgtaccaacatcagagacttccagctttgtagaatatctttcaatctgttccttgatgacagaactgatctcttctggtcttaaattcattaaggtttgcaccttccttctatctttctatttgttacgataactgcagttttgacaagctgcggtgcagctcgttaatctgagttttaatgctggagtccacgacgcggtctccgatacggataaccagacctccgattaaggacgggtctaccgaatactccatctcaaattccacgtactgcgtggtatctaaaagccgctgttcaatcatggctttctgctcactctttaattccacggcgctcgccacacgggccacgccgatttttttatactctttgaccgtatcgataaaatacgtgcagattgcaggaatgtccttctgtctgcccttgtcgacaatgactgccagaaaacccatcaaatcgtccgacacacggccggcgaagatgttcgtcataataccgatcttctcttccttcacaatcttcggattatccagaagctccgccagttccgggttctcacgccagatggcaagcaaagccttcacctctgaaaacagggtgtcgacactctgcttttcgatggactcctcaaacaatgcatcgccgtatacttttgatactagctttgccatgtgctctcacccatctctttcaaagtttcctcaatcagggcatccgataccgttgtatcaatggacgcagccacaaccttgccggccatgacagaagcgatggagatgatctgttccttcatatcatcaagcgctttctttctctccagctctacttcgcggttacccctctcaataatgcggttcgcttcttccctggcttctgtaagtatttccgcttcgcgctgctttgctctctttctcgcatcctctaatatctgttccgcttctttattgacgctggtaagccgtgtctggtactcttccttcatggccttcgcagcttctttgtcatcggcagcggacttcagttccccggcgatcttctgtcttcttctctccagaacatcacgcacggtattgaacagcagataggataatgcgaaaaacaggataaagacgttaatgcccgtcacaaacgcatcgaaaagcagctgtgggtcaaatcccaataatcgttccaaggtttcgcctcctctcgctctctattcttatccgttcttttctttagctgaatggctttaagaacataaggatagcagcgacagcgaaaccgtaaagacctgttgtctctgcaacggcctggcctaaaagcatggtggatgtgatatcagactttgcgcccggattgcggcctactgctgctgctgcgtgacctgcggcgataccctgtccaataccaggtccgatacctgcgatcatcgcaaggcccgcaccgattgctgaacaacctaagataaaatcctgtcctgaaattccgttcatagataacttcctcctgaaatcaattttgtattacgcgctcagccgcgctttttcattgttaatccatcttatcattgacatataccatggtcagcatacagaatacatatgtctgtatacagcccgagaataagtcacaatatacatgtaaaaatgacgggataccaatttttacaaagattggcatcatgccgtaccacaatcccatgattacaacgcctgacatcatgttgccgaacagacgaagcgcctgagacagtggatttgtaatctctccgatcaggttgatcggaaacaggattggaaacggtttgaacatgctcgtcagatgaccgatcccatggtttttaataccctgatactgtgtaatgcagaatgtgaagatacccagcataaacgttacaccaaagtctcctgttggtgttctgagtccaaataagccgccaatattgcagaacaatatgaaaataaatatagttccgatatagttaacgaactttttcgcattatggcccattgttccgcttaccatgttatcaagcgtctcgacagcgaattccatgatattctgaaatgtacccggtacttccgtcgctttcttcatcttgacactggttacgattgcgatcagcaatatgacaatggtcacgatacttaaaccgatctcggtcgttgttacccagagttcctggccaaatgcctgaaacttgaacacgcccttgatcataaagtccacattattggcactagctatgcccatacgcttaagcctcctttcttacttgatcacaccggctcctgtacacgaaaattactcctctttttttccacgcgacacgatcctgtgtataaccggctgcagatatgcaccagccttgagtccgaggactccgattactagggcaaccgcattgacctggtccggaaaccagaccacgacgataaccagaacagcaaaaagcacgacatagcggatgatcgaactgatcaccgtccgtttctggacaatcttcgaatcctccgttttcatggagcggtccagcacttcagccatggaaaaaaacatggcaagagccaggaccatccccagcaggagcccggtaaaaaccgacggcttcggatacacaacaagcgcagccagcatggctgccgcggtaaaaatcacgattcccgatgaaacctcaagcaccagattccttgtttccttccccaattcacaaatcctcctgttttctaaagcttttcatcatcctcatgtctccttacgcggctcttctgcttcggcttgtgcaccggcggacgcggctctcccttctgctccctgcgtgcctcctgatcctcttttttctcttcctgttcattcatcttaagcgtcgtcatggctaccttgtagccgttccagccgcctgccagaaatcccagaaacatcaaaaagattgtcaggttcgttccggcatgccggtcaatccagctgccggcaagaatacagacaaatacaggcaccatgacgctgagacccagttgggtaaccatcatcatattcctcattacgctctttttatggcgcatgaatccacctgctttctgcattttgcacatatacatggtattatacctaaaaattttgattttgtctattatgtacgtaaattttactggataatattggatgatatacaatttgcgaggttttgtacattttttagtacaaaaaaagagggagccggtctgctatatcttaccccggttcccacttttttattcaaattctaaaaattttttaggctttttctgctatctttcccgctatctggccttttctaccatatccagaacggccttcttactctgcacgccaacgctgttcgctacgaccttgccgcctttaaatacaagcagggtcggaatactcataacgcggtactggcctgctaaatccggctgttcatcgacgttcaccttgccaaccttcagccccggatgattctcctccgcgatctcgtcgataattggtgaaaacatcttgcatggcccgcaccaggtcgcccagaaatcgacgatcgtgatatcactgctctttaaaacttcctgctcaaaattctcctgtgtaaatgttattactgccataatatggttcctccttattccgcgctttctgaaagcgcctgtgtaattatatttttcataatatctttcgtcagcgcgccgttggcatagccgatgacgcgtccttcacggtcaatcatgaacgtggttgggaatgctgttatatagtattgtaacagaacatcacccgttgtgtccataagtgcaggataagaatatccattatcctccataaactttgtcacttcttctatagttttgtcattattgttgggattatccttcgtttttggatttgccacacttaaaatgacaagatcctccgaattttctccatattccttatagagtgcctcaatatcgggcatctcctcgcggcatggcggacaccaggtcgcccagaagtttaagaatacgacttttcccttgtaatctgaaagcgtatgttcttcgccgtactgatccaccagcgtgaaatcaggagcttccacacggtctgacgtatccggaaggctgctgtctgtctcactggcatcaccggctgccgatcctgccggatcctgaccgctgtccgtcccctgtcctgcgctctggtccggattctgtccgttatctgacggactctgcgcctcggtctgcggcgccgtctcttttccttcggctgtcccgctgtcaccgcctgcaggcgtctgagactcggttactgtctgaccacccacgccaaagcttgataagtatccggtaattccgttcatccagccggtaaacatcataacacccatggcgatcatcagcacgccgccggcctttgtcgtgtactttaccacgttctgatgcttcttaaaaaagtcgagcaccgatccggtaaacagtccaaccgccagaaacggaatgacgaagcccagcgtatagactccgatcagcaaaaagcccgttccctgtgaggtcgctgatgacgccatcaaaagaacacttgccagcgccggtcccacacacggagtccacgcaaagctgaaggtaaagcccagcaccagcgccaggagcggattcatggccagctgattcagacggaagggaaggcggcgctcctgccccagcacagagcttccaaatactcccagctggaacaatccgaacaggaccacgataatgccgccgatccgtgcaaacatggttctgttgctgccaaagaacctgcctgccgctgtaaagccaaagcccagcaggaaaaatgcgaagctcacgccaatcacaaagaacagcgtattaatcataaccttttttctcgaataccggacgcgtccctcttcatcgacggtcctcgttccgcctgccagatatccgatgtaaagcggtacaagtggcagcacgcagggtgagaaaaagcttaaaagtccctgtataaaaactgtaattgccggtattccgacctcaactgaaaatcccatatcgcctcctgaacgtgttattaactgtaattttatttgtttcagtttgtactgttattataaaagttacagttaatattgtcaagtactttatgaaatttttttctatttattcctccggcttatccggaacgtattccagaatgtctcccggctggcagtccagcgccttacagatcgcctccagcgtggtaaaacggacagccttcgccttattatttttaagaatagataagttggccatggtgatatccacttcgcccgcaagctccgtcaatccctttttccgcttcgccatcatgacatcaagatttactacaatcgccattctgtcccctcctatattgtcaaatcgttttccagcttatactgcaccgctttctcaaatacctggcacagcacgatggagaagagtccggcaacagtaaagacgatgatgatcacagccgtcgccggagtgagcgatacaggcaaacgcacaatggaaagaaacgcagtcataaaactgcattttcccattttcctgagtgaaccggcattttccataacaaacggattctccgtcaggacagtttgaaacatcttccgaagctcccggacgattaacagcgccatcaccccggaagccatgtagatcacacactgaaatacatagtatttccggaaggcctcgatgtaattcccgaaaaaataaaacaggaccgggatcgccgccgtcagcactatcccaatataaaacatggcatccagcatatatttcgtaaaacgaaccagtttcgtattcataatttccactccctctttcccgtttccgcagccattccggcagcggccatttatgaggaaagtttatcacagggcagaggggaattgcaacagaaaatacggaagcaaaaaatcaggaagaaatccgtcaaacaagatttcttcctgattctcatcactgtccgtcagccggacagaggtaaaatcccagcccgtccctgatatacggaaggtattttctgtccttttcggccacctgtccgatcacattcacacgcggatcggaaggcagatcaattctggaaatttcaagctcgcccatgtaccgtaaatacgcctcattggcaatacagatcctgccggccagcctctgaccggaaaattctgccgctgtctctgccgcaatgacccggtcccggcagttaaaacgggattcctgggaacggatcacatactcgctggaatccggccggtcatgatggatcaccgctctctcgaattcataaccgggcagcatatccgcatggagggtcacataccctttgcccagctcctccagctgcttccagacttcctccgtcacatcattgtcgcccaccagaacaatgtcggactccgcccggtacagctccagcatgtgaagaagcacctcgtccttcgaaaaccggtgttcctccaccgtgggaagcccttcacagagagggccgcgcagctcggaattccccggaacaaacgccatcgtggtaaaaccgagaattttaagcctttgattcatctcctttacccggtcaagggacaaaccggtatacggtttcgggtagtaattgtggcaggcggcaaagcgggtaaaatcagcccccgccgccctccagttctggatatcctcctgtgaaatcgtagaggcgttaaaaacgatatggaatttttccgaaagcgccaccgtttcctctgccgtaaatccaaagtcaaggcggatataggttattcccagcgccagcagttcctcaaaggaggtgcagcccagcttttctaatgtaaccgggctgacatcgacaatcagattgatcccggcatctctgcactgtcccaaaagctttctggcatccgctttataatcgatgcccgtctcctccggaatgtgcatggaggtaaacgcgtatctgataccggcattttgggcttttcggatcatcgcctcgttcttttccacgccattgctgaaatagagtgatattcctgttttcataagcttattccccatagacttcgttgatccgcttctcatccacgccgaagaaccaggtcagaataaaaccgccggcgtaagccgcagccatggcgataatatatggaatctgctgtcccggttttacgatcagcaggccaaagagccccgaaacaccctgggatacggttcccaaatgaaacagtgcggagagaacaccgccgacaccggcgcctaaacaggcagtgataaaggactttccaagcggaagtgtgaccgcatacatgagaggctcgcccacacccaggatacctaccgggatcgaatcgcggatatagcctttcagctttttgttctttgttttgaagtatagggccagacctgcgcctacctgtccgccgcctgccatcatcagcatgggaagaaggtagttgatgccctgcgtcgcaccggccggatcgtttaacatggcatgaatcggcgtcagcgcctgatgaagaccgacggccaccagcggaaggaagcctgccgagaggatatatccgcccacaacgccgagtttttcatatacaaacgtcaaaacagtataaataccggatgtcagagctgctcccagaggctgtatgatcagaagaatcacaaggccgccgatgatcaatacgagcaggggactgataaacgtatcgatcagatccggcataatcttacggatatgcttctctaagaatgcgaaaaacacacctgcaatcagagcagcaagcataccgccggctgccgggttaaacacattaccggtgatcggcagaaggatctgcgcgtcattatatttggctaaaagcggcatcgccgtattggcaatacacatagcgcccgcaatacctcccagggatgcggaaccgccgaattctctcgcggcgttgtagccgaccaggattggcaggtaggcaaacatggcccagcccatggtgcggatgcattcataccaccagattccgctcagcgctcctcctgtggagacgttgaccacattgctgattccgttgattaaaccggctgcgatgatgcccggaagaagtgccacgaaaatattggcaatcttcttcaaaaaattctgaagcggtttatcgtatttggccttctgcgcggctttattttccttagccagatcctccacggttccgccggcggaaggcggggcatccgaaaccgcgccctttgccagccctgtcagccgggaaaactcctccagagccttattcacttttcccggccccaggataatctgaactgtttccgattccacgacgccgagcacgccgtccacttttttaattgcttcgatatctacaatgcttaagtctctgacgctgatgcgcagacgggtcatgcacgcggcattgcccagaatattctcttttccgcccagcagcgagagcagcttttcactcaattccctgtagttcatatggtccctcctgtttcaaagatcagaccttctgcctgatcgtctatgatgtgtctgttacaaagcattccttacatggccgcgggctgcatccagatgctttctcgcttcctccgcgccgcagctcagcaggatcatgacaatggccgttttcacatggccgtcagcctcaaaaagagcggtttttgcctcttctctcgtacagccggtggccgtcatggtgatattctgggcccttacaaccagcttctcattggtctgcaaaacgtcaaccatgagattctgatatacctttccgaatcccaccatactgccggttgatatcatattcagaatcattttctgggccgtacctgccttcagccttgtggaaccggtcagtacctccggaccggtaacgggctcaactgcaagctgcgcggcttttcccacctccgactgccggttgcatgcgattccgaccgtcttgcagcccacggaattcgcgtatgcgagaccgtggatcacatagggggtccttccgcttgcagcgagaccgattacgatgtcattttcgttgagagataaatcctttagctcctgtacgcccagggtttggctgtcctctgcgccttccaccgcctttacgaacgccccttcaccgccggcaatcagaccaatcaccagatcaggagacactccaaaggtaggcggacactcaactgcatccagaacgcccagtctgccgctggttcctgcgcccatatagatgattcttccgccgcggtttaagctttccgtcgcccattcgatcgctgttgcgatctccgggatcacctccctgacggctttaacgacatttccgtcttcctcgttcatcacggccgccagttctgccggagtcatctgatctaaattcatggttttatcatttcttgtctctgttgtcagctttgtcaaatcaagcattctaatattcctccaatggtttttgaatgtgtgtttttgggaaactcctcatgcagctctcatagtgtttatttacataggcaacatagaggatatctaccatgtttaattgtgaaattctggacgacatggctccgctgcgcagaatcagctccgtggcagctacggccagcacgcagtccgcctcggccgccagcttggagtcagcggcccttgtaagcacaatgattctggcgccgttggcttttgcggccctggcacaggtaatcatctcctccgtcagaccggaatagctgatcacaatgccaagatcgccttttctcatggttctcgctgccagcagctgagcgtgccagtcatcgcagatattacacagtttctccacacggatcaattttaagtacaggtctcgtgcaacgagtaaggaggagccgagtccaaacagctggataatcctgctttcttcgatcattttgacgcaggtgtcgatgatctccggttctaccagctttcttgacgtctcaagagactcgatgttttttcgtgtaaccttttgaataatatcctctgtcgacggcgtgggaatgatctcctgaacggatatctccctgctgtccttgaacagagcgttttcgtatacgagcgcgtgctgaaaatcgcggtatcccgcacagcccagttttctgcagagtctgataatggtcgccggcgacgcataggccaaatctgcaaactcgtgtatactctttccaatcacccgatccggatggttcaggatgattgttaccgcattcttttccgctgcgcttgccttgacctggtagtctttcaggcgcagcagcaatcctttcgctgccatagttcctacctctccttcatcatagcatgtgaaataattgtgtcaattattcggcattattatgaaattttattgcatattatgactgattttgtgtgggatttcaatagaaagtttcggatttacaagaaatgcaaaagaaagaggatcacagaaacacatttttgtgatacaaaaaaaccggactcccgcataactgcaggcatccggccgccaaataaaaagagcgcgagacggggatcgaacccgcgaccccaaccttggcaaggttgtactccaccactgagccactcgcgcataaactaaaaacaaaatatgaacttttcgtaaaggcattatagcacatatcttttgaaaatgcaacagaaattttctaaagcgggtgatgggaatcgaacccacgtatctagcttggaaggctagtgttctaccattgaactacacccgcaaaggaaattccaaaagcatttcaaatgtactctcgcgagtacaatgcccaaagtcggaatcgaaccaacgacacgaggattttcagtcctctgctctaccaactgagctatctgggcagacatgcgatgtccctgtgcgtatccggaatcagtttcgattaactgctcctctcactcacaacacgaataagtttacaagatttcccttcatttgtcaagaaaaatttaatctgattactcatattttttataaaaccgcacatcacaccggcccgtccagcacctcttcaaactgttccaccggcatcggtctgtagaatgcaaagccctgaatcagatcgcagcctgcggattttaagaattccacctgctcctcacgttctacgccctcggcaaccgtactgatattgagttccttcaccatatcaataatgtattttaaaattgtatgtccccggttcacatctacgctcacacggaaaaacacaccgtccagcttcatcacgtcgataggaaggtcttttaaaagccccagagaagagtaaccggtgccaaagtcatcgagagaacacagaaatccgttgtcatgcagttctctcaccacctgcatcaggtactcctcgtgttcaaatgccgccgattccgtcagttcaatctccagcatcccgtcaggaatgccgtactgcttcttaatccctgcgtataccggaatgaaatccgggttataaaactgaatttttgacacatttacagagattggcaccacagtcttcccatttgccatcctgtcatggagccatatacacactttttcgaagacgtaacggtccacttttccaataaaatgattcttctccagcaccggaataaagagcccaggggagagcagtccgttccccggaatcgcccatctcaccagcgcctccgcacctttcactgcgccgtcctccacgcctaccttgggctgcaggtagacaacgaactcctcattgtcgagcccttcctgcatacggtccttgaccgccatctctgcgatcagcttctgccgtatctcttccccatagaatgcatagtgttttcccggtttattcttcacttccttctgggcaaaattagcccggttgaccatctttaccgcctccggctcttccaccaggtcttctgcacagcagattccgcatgcaatggtcagcatatgacggttcagcatgacaatatcggagtttaagaactcctcatccatcattttctgggtctcgagcagttcctcctgcgtctcgtaacggcgcagaagtacgaaccggtccgccacatcgcgggccagcagttcctcttctttcaggcggctcatgaccagctgtgcatatcccttcagcagatcgtccccatacgaatatccgaacacgtcatttacatacttaaaattttcgaaatcaatatataataccgcaaacttcgcatccggttcccgctccatcatgcggtttacctccgaataaaacttatccgcacggtaggccccggtcagttcatctctggacgttaactcctccagcttttcatttgtaacctttaactgaaaaaatttccttatgtaaaaatagacagtgaatgcaaacgcagcggcactgaccagagctgttgcaaaaatcatacgcgctgtcttttccgccatttcaccggaatactgctcaatggtaaaaaccgtgtcattggctatctcaaacagcttctcgctggaatcaatcagcacatctgcacgcgctccctgcctcacttcgccgatctctttcttaacgtgatcccactggtccttcagcaggtccaaatctaactggtactgtctgcagtcggcaagaaccagaccgtataccccctgtccggttatcagttcattcagaatgccttctacatacgcaatcagttcatcatccggccggctgttcgtctccagcttcaccacccgttgggaagcgcccctcacgatcccaacataattgatcagtttcccataatcccgaatatctgaaatccgtttgatcgaaacccagctgatcgccacaagcattcctaaaagcagaagaagcagcgttctaaaatattttttcatttgtatcatatccccctgataagacttattctccgctccgaatccgggccgtcctgcgcaccgttatccggtccccttcttccacagttccgcagagaagcggcgaatctgcatcgtatactgccctccgtctctttactgcttcctcactgtcattggcatagcagtatttacagccgcacaggcaggtgtcgtatgcccccgtttccacgctctccacacatccgcacaccggcctctggttcttatccttcttcacatggattggaacccccagaatctgttcggccatggccgggtcgatacagcttccgtgccggattcccacatcactcaaatcaacggcctccgcacagctctccaccctcatgccaaaccgctccgccgtcttaacgaatgtctcccccatccgtttcatagtctccgtgtccggcgtctccagaggaatccctctcatatttcgtttcgtcttcccgtaacagtccagaaagcttatgaccaccttgtccgtacagccgcaaatcccttctgctatcgcctcaaatgcacggaaatggtactctgcaggatatctttcatttaacaataccggatcgtacctccataccatccggttcctgccagccgtttctgctgtttctcgaaatatgcggatcagttcccgtttgtccggaagccccggttccatgccgcgtccatatcccgtcagtgtaaactgtatgtaatacgggatttctcccagttcatcaatccgtttcatcatgggctccggattcttcgtccagaacaccaccagatccaccagatcaggagacagctcaatcctgctgacctggtggctgttcatcggattcttcacgtagagaaatccctctttcattcgattaaaaaaccagtcggaatagtactgtggaatatccgttcttctgctcacgctcagtatcatggccggtctccgttccgtttatgctaaagccattataccctattaaagagcgtccttcaaccgttccacattattctcctcaaatttgagaagacgcttcatcagagccgtcacctctttctccgcctctttctcatactggttaatccgtttgaccgcatcaataattcccatattgcttccctgaatcagcatttccgcaatgtgagaggaagacttatccatcagggtcttcatgtctatcatgagataggtcataattttttccagggctccaattcccttttcatcgtagccatggcggtttaaaagttctttcgcttcctcatgaatctgcttgtactccttaagctgtgcctcaatccgcttcttaaacgcctcgttatcaatcataggaagcagctggtttaaggtctcaactcccatctgggagttctgatagacaaagttaagcatttccgcatctgcgctcatctccaacacctcttttcattcattattaatttccctgatagtatggggcaaaatgcagcaattcattctcccggcggcagtgaaaccgcaaagcttttcagattcatgcataaaacggcggcaggacaggaaaaataatggagtatccgtaactgactactttatgaatttatcatgatgactggaggattctatgaataaacagcctgtatttttaacggacagagaccatctcgttgtactcgaggccatcacaggaatgccaaacgcggcagtcccggacagcttaaaaccatttgaaatcctggatcccaacacctcggaaggcgcttccgaaaagcatctccccatcattgaaactgacgggaaccgtgtaacggtaaaggtcggaagcatctttcatcccatgagcgaggagcataacatcggctgggtctgtctggagacagaggccggcgtcaccatgcgcgttcccttagactctgcctgtgatccggttgcctattttacgctggaggacggtgacgctccgaaagccgcctacgcctggtgcaacctccacggcttctggaaaaccgaagcataaaaagaccgaaccgtggaatgcagcagatcaggggttcaaaaaacacggcaatgcaaaaaaagaggaatgctccgaacatctgctttcggggcgttcctctgccttgcttctgtcatatcctatagtatttccctgtctctatatcttctgccggatccttctgacatctccatcttttgacatctttttaacctccagcacagttccatccagaccggttatcaccttgattcccggcccggcttcaaatatttttttcccgtttataaagccttccgctccatttccgctctgcaccagtttaaaggaacgctccccccagatctgttcataaatgctctcatagccgcccacagtcccccagaagaccgtgtcctgttccagatgtacgccgtacatccgggccgcatattccagcaccgataaaagagccggtccgtaacaatcctgttccccttccaggcagacaagcgacggcgctgccgtaaacgggtcatactgctggacaaagatacagtcctcgccaatggcctgaaacagcttttctcccagttccggaatcagactgtcatatccgtagttttccagcgcccggatggcccgctgatatgtcagcgcctccgcctggccgctccagtcattggtcgtcacgtttcggaacagcgggtcgtttaccgcaaccgagggaagcggcatatgcgtccagaattcctccggattcagcagatggtcgttcacgaagcgatcggccatcggctgggtaaagctgttccagtacatggcacgcagattattatgggtcatggtgcgcagaacccggtgattcttatcccggtcaaagcaggcgcctgccgtttcgtcccacagataggtccggatcttcccctgtacctgcgccgccttctccttccagaattccatcttctccacgtcgttccggattctgctgatcttcgccagcgtctccctcgacgcataggaaaaactcataatatccatggaggccatgggcaccacgctgcatccttccggaggggtctccttactccagtcgtcgggtgcatccccgtaccggagggcatggtcttccccggtgtcgtatttgcaccaggtctccaggcagccgtccccgtcagaatcccgcacgcgccataagtagctgtcaaaacgctccagcgtggtgtaaagcagatcgagatatccaggatcctttcccatcaaataatatacatttaaagctgcggaaggaaaacaaaagccctgaaatttattgaactggggaatgattttcccgtcttcacacgctacgcttcctggaattctgccatccgccctctgattttccataaaaagcagctgattgttgattcccgcttccaaattccgtttggcgtacatctctccgcccatgggctgcgtctccagccatattttttcatagccgccgccttcaatcagcaccagtctgccgccaaactgtttcagattctctctggactttctttcagccgtatccaccagcttctgcagcaggccgcaggaggtctgaaatgatacactcgtttgatttttcacacgtttttcctctctgtgtcattatattgcagtgtcgtaataccgctgtttcacagtaccgcagatatcagcccttgatgccgctcgtgctgattccctctaccagataccggttaaagaacaggaaaatcaggaataccggaatcagtgacagcgtggacatggcaaacatggcgccatagtccgtagtggaggtggaatccgcaaaattcttaatggccacggaagccgtgtacattctgggcttgcttaagtagatcatcggcgacatgaaatcgtcccatttccagtagaactgaatgatgatcgtggttacaatggagggctttaaaagcggcagaaatatctttgtaaatatcgtatatttgctgcatccgtcgatgatggccgcctcgtctaaatctttcggaatgccggctccgaactgcatcatctggtagatgaagaacgcctggccgaagaaatgcggcaggattaaaggaagatacgttcctacgaagccaagtttgttgtagatgatatactgcggcaccagaataatctgtgtcgggatcatcatcgtacagatcatggcagtgaaccagatatttctccctttgtatttcaccctcgaaaatgcgtaagccacacaggctgacgacagtaccgtggcaaatgtcgataccgcggctacgaaaaacgagttggagaagaaggtggcaaaactgattccgccgaatcccttccagccgttggcaaaattttccactctccaggccggaggaatcaaattcattcctccgtttaagatttccgtgttatttttgagtgagccgctgatcatccagagcaccggatatatcataaggagtccgaacaggcacacaaacaaatggtaaaggactgcttcgattttgtgttttttcgtcataatctttcccctccttattgatctgcctcagaaaatacccagaatttcgaggatttaaagagaataaatgtgattaagctgattaaaaccagcatgagccagctcatcgcactggcataccccatattggaccatttgaacgcgtggttgtagacatagagcgcgtagaagttggttgcatcgttaggtccgccctgggtgatgacaaatgcctgggtaaaggccatgaacgccgtgatcgtctgcataaccaggttatagagaatgataggggaaaggcagggaagcgtgatgcgcaggaaacgctgccatttatttgctccgtcaatctcagccgcctcgtaatagctgcccgggatttctttcaggcctgctgcgaagatgatcatcgaggagccgaactgccaggccgacattaggaccaggattcccatggacagcttcgggtcgccaagccaggacagcttttgcagtcccagggaagccaggatggtgttggcaagaccttttcttgaaaagatcgtcttccataccagggctaccgcaatacttcctccgattaaggacggtacgtaatacagggaacggtaaaatgtgactccccgtcttccctgtgtcagcaaatatgccacaaacagagcgaaaatcagcttcgtcggcactgatgtaacgacgtatatcaacgttacttttacggaattgatgaatcgctcatcttttaacagatccagatagttttgtattccgataaatgccggcgtctggcccagtttgtagtcggttaccgaatagtacatggaaaccgctatcggtatcagggtgaatgccagaaaaccgataataaacgggagcgagaatatatagcccaccgtgttgtcgttgtaccagaacttttttatgctggctttcctttcttccattggtcatttcctccatttttttgcacagaaaaggcaggtgaggtgaatataggggctgatcccacctgccttttgctggtttgcggtgcctcggttttgtgaggtatcccggtagtccgccatgcacctcgattccgcttcgcttcatctcggtcacgggcttcgccctatgaaaaaggacaaacccagatctgcttatgtgcgagcacaacgcagatctgcatttgccctttttcgcatggctcattgctggcgtgtaaatttactctccgcgaattcgactaattgactggccgcgtcttctggggttacatctccgtactgtactttctcaatcagcagcttgtactgatcttctatctccgtctttgggtccgggctgatgacgttgcagtcttctttggggaagtttccgattttgtctacgaaatcgtagatcatcttgctgctgtcgtctgcctgctccatgactacgtctcttactttcgacatgatcggtacaccgcgctcgccgtttaatactttgttggcttcgatgtcattaacaaagtaattgatgaacttagccgcctcttctttgtttttggaactcttagccatgcataactgctgggaggactgaactcccattccgtaggaaccgtcctttgtgatacgcggtaccggcgcgatctttatttctctgcccgctgcattgacgatggaggcaatctggttggacgatacccaggtcatggctgcgtcttctgtcaccagatagtcgccttcaatgtccttgatctccttgattgctcctgcatcaggatacgatcctgcatcggttaaatctttgatcatctgcatatacgatgcaaatgtggctgtatcagtaaattccaggccatcgttagtcttcttaaagaagtttccatccttctcagcctgagaagccctctgtgttacacccgcaatgaagttatccatctttgagcttccgtagattcccagtttctctgtaatcgccagacagtcggccttccactcatcccatgtccagttatcagacggctctgccagtcctgcttctgcaaacatggccggatcgtaagcgattccgtaagtgttggttccaatggagattcccacctgagtgccgtcgttgtctctcgtagtcgccaggaagttctctgtggtatcgcttacatcaatggttcctgcttcaatataggagtccattggttcaatgctgtttatatatttcgggaagtttccgcccatctggaagatatcccatacatcatcggctgccaccagagtatccagctttgtaaagtagctgtcaaaatcataaaactccgcttcaatatgtacattcggattctgttcctcatacatttcaattactttgttcgtagcgtcatgcctcgtctgtgatccccaccacgccatgcgcagtgtgatctgctcaccggacgctgccgattcttttccgctgtccgccgtctgtgtatttgtctcggctttctgtcctccgcacgcggtcagtgatgctgccataaccaccgctgttgtcaatgccataagtcttcttaatttcataattgatccccttttacacctttcgctgtctttgttctcacttgttacctgcttaagcttttttcggatccgatacgtttctgtaaacatatcttactatttcagacttattttttcaaccgatttgggcactttcaccaatccatcaaaaaatctccggtttttgcactatattgactggttttcctcgtcctcattctttttccgcttggatttacggtactgcagcggagacattcccacatatttcttaaaaacgcggtcaaaataggataatctttcatagcccagtttttgagaaatttcctccatggacagcgactcatccaacagcatgtccctggcatgaccgattctctggcagttgataaattcatttactgtaaaattagtcacctctttgaagatccggctcaaatagcttttgtccatatagaagattccggccaggtcctccagcccgtagacctccgagtaatgctccatgatatactggattatctcccttgccttcgcgtaacggagcatctttccgttgggcatgtgatactccgcacaccttgtgccagctccgtacagcatggaaatgataatggaaatcaatagattttttacctccgcggacgcgaaggccctcttctgccccattacctcttccatcttcttaagctttttctccaccgccgccagatgctttccttccagccggtaaacgccatgataatttgcaaaaaaaccgatcaggtccagctccatggcctttcccatgctgaccagccatttctcatccacctcaattaagattctctcgtggtatttccccccaatcacattcgtgaagggaatctgccgtttgtcaataaaagtaagcgtccccctgtccatccggtagcttttgcttccctgatagaaaaaccgttctccatccagaatatagtaaatctggtactcatttttataaaatccgatagtctctgttaaatcacagtctctggcgacgtggctgattccgatcccgtcgcatttccccgtgaagaatacttctttcatgatgtttccgctacgcgcagcgtgtcctcctcctcgatcagacggtaaaataccggatgctccttcaaatgttcattcggcgtatgcagggtcaaatacagttccccggaattactctcaaatatcatgccgtggcctccgtccttttcaaacagcagacggtcatcctgtgtccatgtacctgtaatgtccccattatccgaataggccagcgcctccgtatacccctcttttccgaagctggaccagagcatgatgagacggccgctttctgtcctgtacagatacggcccatccgtcacataatgaaggcccggccgctttttattggtgatcggctttacccagcctgcggcctccgaagcatgaaataatgtcaccgggtcagatactgcctccctcaaatcccggctcagctccaccgcgcagatactgccatccgaaatctgaacccactcatggacaaacaccatatatggttttccgtcaggtgacacatagaatgtcccgtcaatacactcccagtccttcggcgtgatctgacggtcactgtgcattacgaacggccccagcggactctccgactttaagatcgcagttcccccatgtacactgctgtccttaaatgttgcaaacatgtagtaagccccctggtatttatgtacttccggagcccagcagttcatatccgcccagaagtcctccggtttatggaacacttcgtacggtccgtcccaattttccatatcttcactgacatagcagtcaaagccggttgccgccatccagcaggtagcggccctcgtcccgtacatatagtatgttccgttctctgcgagtacaaatggatccctgatgttaatttctgtgtttttcatgatgttcttctccttccggctaagccgttttccatatttttttcatcatatcataaaagtccgggaaaaaacataccttcggctctcctcctcttttggcattttggggttttcgtcattttcactattttccccttattttcaacccattctttgttaatatataaacattcattgacgatctgatatccatatgctagactataaattaaataatgctaatgagattaagagtaaggcatgctttcacgcggatgccttgctcttttttatttttaatgaacgaagcagactgactgcatggttatcaaagatcataaaaaggagggggaaacgggttagaaaaaacagtcagatcgctaataaaactaaggagaagagagatgaaactatcaacaacaacattgttctatggaccgaggccggacggaagtgtagggcccatgttggaaagtatccgcagaattcacaaagcgggatttcgggatttagacctcaactttgcatggaccaggagccataaaacagaactgtactacgacaactggagagaatggataaaggaatgcagggcgttaattgaagaactcggaatgacagtcagccagtctcacgccccgttctataatgtgatcaatccggactatccatatcgggaggaagaggaagagatggttcgccgttctatcatcgcttcgtcggaactgggagcaggcattgtcgttattcatggcggttcgcgtccttaccgcccggattaccgcaaaaacaagcaggaaaatatcgaatatttcaaaccccatctggagtttgccgcaaaatatggcgtgaaactggccatagaaaatctattcgatttaaacgacagcgaaaaacgggttcgtgttccccgttatctggccgatccggaagacttgatcgacctggttgacacactgcatcagtcttatgacaatgtggggattgtctgggattttggacatgcaaatctgatgcactggaaccagccggaatgtcttgaaatgatgggagaccgtctgattgccacacatgttcaggataactacggagtcatcgacgatcatttacttccatttcttggcaccgtagagtgggaacccatcatgaaaaccctgaaaaaaatcaactatcagggtgtgttcgcttacgaaactcacaaaatgacagacaggctgcctgatccaatgattgatgcaatgatgcgttatgcgtatgaactgggggaatatctgcttacactggcagactaacgaaaaggagaagatatggttagaaagtatttggtggggatcgcattacttacagttatcgcaataagcggctgttccgcagccaacaaagaaacaacggcagaggcaaacacttcgaaagctccggcggcagaaaccgctgcggatatagaagctgcctccgatgtattggagatagaattctggcatgccttagaaagccagtaccaggaaacactgaaccgcgttgtcggtgaattcaatgattctcatgacaacatcgtgattaagccaatgtatatcgggaattatactgcattaaacgaagccatcgtttccgcaaatgcggcaaataccaacctgccgggcgttgccatggccaatatcccttacgttaccgcttatggcgcaggcggtttatgcgaagacctgggtccttatattcagcgcgacggatttgagatagacgattttggagaaggtttgattcaggctgcaaaatacgaggatgtacaggtagcacttccatttctggtatctaccgaggtagtatactataacagggatttattaaacgaattagggcttcagattccgaaaacctgggatgaaataccctcgtttttagagaaggcctccgatatcagcgcagacggcaaaaccaaccgctacggcatggtatttcccggctggattacatggtattatgagccgttctttatcaataacggtgttcagttggttactgccgaaggcaagaccgaccttgcttctgaacattcagtcaaactggtttccgatttgaaagactggaccaaaaagggctactcctaccttgcaaccggggaagacgccgcttctgtgatgcgccagaacttcattgacggaaaggcgctgtccgtcatctatacgagttctttatatgacaccattgtcgacagctgcagctttgacgtcggaatggattggctgcccggaggaaaaacaaaggagcaggtattaggcggcaacgtcctttttctcccggctaaaaacgatcagaaggtgaaggatgcctcctgggaatttctctcctacttaatgagcaaggacgtcaacatgatatgggcttctgaatccggttatctgcctaccaggaaatctgtacaggaaaccgatgaaggaaaggcatttctggcacaaaaaccggaatttcagattatttttgataacctcgatatcatcactcccggaatccagcgtaccgactggagtcaggtatccaccacatggagaaactggatggacgaaatcattcaggaagatcttgacgttgaaaccgcgctgaaagagatggaagtggaaatcaacgaaatattaagcggctcataaaggagaacggcgtgaaggagcaaagagtatcactgcttgaaaagacagagctttttgtgttggacatggatggaaccttttatcttggtgaacaccttttggaaggctccctggactttctgcagacgcttcaggaaacagggcggcgttatctgttcttcaccaataactcctcgaagtcctccggcgcctatataaaaaagctcaggtctatgaactgcttcatcgattccagtcagatcatgacttcgggagatgtgatgattgagtacctgaagcattctcatccgggaaaaacggtctatctgcttggaactcccgtattgcgcgaaagctttgagaaggccggcatcaatctgtcagaagaacagccggatcttgtggtggtgggctttgatacaacgcttacctatcacaagctggaacgggcatgccattacatccgaagcggtgcggaatttctggctacacatctggacatcaactgtccgacggaagacggttttatccctgactgcggctccttttgcgcggcgatcacactgtcgacaggcaaaaagcctaagtatgtgggcaaaccataccctgaaaccgttgaaatgattctggaaaaaacaggtgtgtccagagaccggatcgcctttgtcggagaccgtctgtatacagatgtggcggccggcgttaacaacggggcggccgggctgctggtgctgaccggggagacgaagagagaggatctcaggcatgcggaaataagcccggacggcgtctatctctctctgaaggagatgggggaattgttaagaaaataaaatttcattcttccatacaaaaaaagctgcaaaagtgacaatcacttttgcagcttttttactgccggcgaccggaatcgaaccggtacgggcgattaggcccgcaggattttaagtcctgtgcgtctgccagttccgccacgccggcatatggatggtggtggattcgaaccaccgaagcaatttgcagcagatttacagtctgtcccctttggccactcgggaaaccatccagattgctttgacaagcagtgattattttatcacagggaacgtgaaaaatcaagtagttttcatccgctatcccacattttttcgtgcattttctcccagcccgtcatttcgcccggcccggcgctttaatctctgccggaccagtttcatcctacacccggtccgttgcaagaagtatggcactgttggcgggcatgaaaaccgacacctggccgtctgccacctcatagttgattttccctacgttgtatcccgtctcgtacgtcagcatatggcgtaccagcgtatcgccatccgccaggcccagctgccatacaggaagctgtacatcacgctctgcagcccggttattgactatcacggcacagacactgtctccgcagaaacggccgtacgcgatcagctgccttccggccagcagctgttttaaggaaccgcgtctcagcgctgcaatccggtggtgaagtcccgtcatatatttatgaaattcaatcagttccagattctcattgccccacggatacgttctccggttatccggatccgtccagccgcagactccggcctcatcgccatagtagatggtaggcgctcccggccaggtcatctgtatcaacaccgcctcacggaatacgccgtagttgacgccctcggaagctgccttcgcacccttcgtactgatccgtcccaccgtccggttcgtcctcgtcaaaaatcgggagtggtcatgatttgacagttcgttcatggccaccatcactgaatttgtcatcatacggctcatatggtaattcatggagcggaaaaagctttctccatccccgtaaagactgggattgctctcatcgctgtgtttctccatccctgtcaggaaccaggtcacaggctccataaatgcatcatagttcatcacggtatcccactggtcccctgcaagccagctggaaggatctccataatgctcggccagcacaatcgccttgggattggcctcctttaccgcacttcggaaatcccgccagaacttgtggttgtattcgctgctgtgccctaaatcagcagctacatcaagcctccagccgtccacattgtacggcggagacacccacttacgggcgatattcatgatatattcatacagcttcggagattcctcatagttcagcttcggcagtgtggaatggccccaccagccgtcataggaatcattgcagggccatgcatcatctttgtaaaatttaaaaaacgtgtggtacggactatcctccgacacatacgctccggcttcatagtcgccggacatctgataaagaagctccccgtccagccatttgttaaaggatccgcagtgattaaacacgccatccaggataatcttcatcccgcggcggtgaacctcctctacaaaccgcgcaaaaaacgcgtcactggcctctaaattctccttcgccgtgcttctcaccatatacttggttgcctgacgattatcggtggctccgctctttaagggttctccgccgtcctttactataactccgtagtgcggatcgatatggtcgtaatcctgacagtcatacttgtggttcgatggcgacacgaaaatcgggttaaaatagatgacatccacacccagattctggatataatccagcttatcccatactccctgcaaatctccgccataaaaacagcccacgtccatctgactgggatacctgctccaatccgatacgtgttccacattctggtcaatataaaaatactcattatccacaacgtcgttggccggatcaccgttgcagaaccggtccacatagatctgatacatgacggcgcccttggcccagtccggagtgctgaacccgggagcaatccggaaatggaagctctcctgattatccatcgtcgcacccagccggttgtagtaacagacctcacttccttttaccactttaaagctatagctgagtttatcactgccaactgtaattttatattcatagtaatcaaactggccatcggagtccgtcttctccataacggcctctttcaggctgctgccatcctctatataacacacataatccacattattcctggctgttcgaaatcgtaagtatacgtcgtctccggcctcgggttctgtgggaaatcggaaattttctgtctcgtcggtaaataacgcctctctgtttaacgcctctgcctggaagcacatatatttatccttccctttctcaatttactcctgtatctattttatctgatcaggcctgaatatacaaccccgcaggctcttagtttcttcattttttcatgcccgttcccatgttttcttccaaccttttcagtattcccggctatgggcataaaaaacggtcagcgggggagctgaccgtttttcggagaaggtatttcgtttcttatggggtgtagcaaaaactatataatgtattgggggggtttacgattattaatatagcatgctttcagaaataagtgtgcacaaacatcatttttttcattcctgttttttagtcatttttgatttctccccgttttacagacaaaaaaatgcagataccaggcgccaatcttaggcattttaccgggcatctgcaaaattctgttaaacaggatccatctcttaacctttagatctccacaggaaacaggctctcaaactcctgctgaccgatcttctctttctcaattaaaagcctggagcacgcatggagtacctcttcatgcttcataataatatcctttgccttggtgtagcagtcgtcgatgatgcgcttcacttcgctgtcaatcgcattggccacctcattaccgtagctcttggtatgggccagatcgcggccgatgaaaacctcgtctccatcgttatcatagttaatcatgcctacacggtctgacataccgtactgtgtcaccatggaacgggcggtcgccgtcgcctgcttaatatcctgggaagccccggtagtgatatcgccgaagaccagttcttccgcgattctgccgcctaagtccaccatgatatcctgcagcatctttcccttcgtgttaaacatccggtcgctctccggcagaggcatggtataccccgccgctccgatacccgtagggataatggaaatggtgtgtaccggtccttcatccggaagtaaatggaacaggattgcatggccagcctcgtgataggcagtgatctttttctccttctcggagatgaccttgctcttcttttccgcgccgatcccaaccttgacaaatgccttgttgatgtcggcctggctgataaacttcttgttgtcgcgggccgcattgatggccgcctcattcatcagattctccagatcggcccctgtaaatcctgccgtagtctgagccacacgttttaagtccacatcctctcccagtggtttttccttggaatggaccatcaaaatctcttctcttcccttaacatcaggcgtgcctactcccaccttccggtcaaaacggcccggacgcaggatcgcaggatctaagatatccacgcggttggtagccgccataacgataatgccttcattgactccaaatccatccatctctaccagaagctggtttaaggtctgctccctctcatcgtggccgccgcccataccggtacctctccggcgggccacagcgtcgatctcatcgataaaaatgatacagggcgcgtgtttcttgccttcttcaaataaatcacggactctcgatgcgccgacaccgacgaacatctctacgaaatcagaacctgaaatagagaaaaacggaacacccgcttcccctgccaccgcctttgcaagcagtgtcttaccggttcccggagggcccacaagcagaatccccttggggatacgcgctccgacactggtgtatttctgcggattctttaagaagtccaccacctcggccagttcttccttctcttcttccagaccggctacctttccaaaattaaccttattggtatccttggccatatgggcccggctgcgtccgaagttcatcatcttcgcgttggcgctgcccgctcccgccctggcgttcatcagcatgaacataccgacgagaaccacggcagtcaggataatcggaagaacgatggtcaggaaataattctcctgagggacattctccgttgtgtagacgattccattcctgtccagcagctcctgtgctgcaatcacatccggaacatttacgacttttgcctgttctgtcgatccgtcactgataatcagcacgacctgaccggtaggcgtctgctggttctgcttaacagtggctgcgactacgctgccatcctcgatggccttcatatattcctggttactgatcttctcattctgccttggaaacatgcttgctacgatcagcatgatcacgagaatcagaacgagacctaaccctctaaatggttgctgttgtttcaacgggctgcctccttattgctgttctattactccgatatacggcaaattcctgtatttctggtcataatcaagaccgtatcccacgatgaactgatccggtacggtaaagcaggtgtatttcaccgtaacctgtttcttcacacggcgttccggtttatcgagcagcgtgcacagttcaatgcttttcgggtttctctgcttcaggacctcaatcagataagaaagcgtattgccggaatcgatgatgtcttctacgatcaatacgtcctttccttcaatcggttcatccaaatcctttacgatcttaacaattccgctggatacagtgcctgcgccatagctggatacagacatgaaatccagagtcaggggcaggctgatcctcttggacagctcgcaggtgaagaatacgcctccctttaagatgcagatcagatgaaggggtctgccttcgtaatctctgctgatttcatcgccgatttccctgattctctttgctacttcttcttccgataacaatacacgtatcttatcattcatcattttttcctccgcctatttgtatttgcagtaccgtatgagtatcgtctgtaattttataatattcgctgatccggtatccgatgatccagagaatgtgtgatccgtcggccgccagcagaatcttatcgcgttcttccttcggaatcttttcatcgatcatgaacgatttgactgtctttctgccgccgccggcgagtgtgatatagtctccggtttcccgatacctcacagagagcgtactattgattttatcataatcaaaccatttcgtatacccgtttttgggaatttcctgcccttttttgtaaggaaatgtcgttataacgggcgttattccagtttctttgccgccgttttgagaaaaaatcgtttttccctcttttttaatctgcagttctccatacgtccgtaaggcacagcctccatccggcagctgaatccgccgtcccacaggcttaaacagaagcttctcagcctcctccacgtgcacagacgtaatatccttcaatgactgatacgtctctccaatcatctgccggatgacgtactgcctgacaatggagtcttcctgtttcaggatttctgcagcaattcccacggaacaaatgccgccctcatccgttctctcccgaataccgtgcttctccagaatctgctttgctgccttctcaaaataagcatccgctgccgctgccgtcttcgctgcctgcagaatattggagaccgccccttcattaatccgtttcctgaccgccggaataatctcatggcgcagacggtttctgatgtaatcggtcccgctgtttgtagagtcctcacaatatgatatctctttttcttccagatatgcaagaatctcttttcttgtgacggaaagcaaagggcggattatggtatcccgcaccggcttcatcccgccgatcccctttaagccgcttccgcgaaacagattatagagcaccgtctctgcctgatcatccgcgtggtgagctacggcgatcttcgacgcatgatgcgcaaggcgctgttcctccaggatccggtaacgcaggtgccttccggcttcctcctctgacattccatttacacgggcgtattccgccacatttgcgtgcacacaaacaaaaggcactcccagattctctgacagttcctgtgcgtatgcgctgtcacggtccgcctcttctcctcttaatccgtggtgaacatggaccgcgaaaagctctatgttcagttcgttcttcagttcatgaagaatcatcagaaggctcacggaatccgctcctccggacagaccgatgatgacgcggtcgccggggaccagcatatggttctcccctatgaattccctgatactctccagtatttttctgtgcatggatacaccgcctttgtaaatttttcccggtatagttataaatataccataaagaggataatcgtgaaagtccgactcgaaatgtcttcctgaaatttaaaaagaatgcggcaggtaccggaataaagaattcagaaggcacagcctctgcgccttctgaattcttaatctgatacctgtccgcacagcttcggcgcctgccagcgctttacaggacgggtctgccgtcaccggtcccagataccggctgtcagcacggtcatatcatcgcctacaaattcatggaaggaacgggcaaagagaagaatccggtcagccatatcctgaggattttttacaggcattccggctatgaattccagaagcgacaactccttgtcctccccgggaagagcatcgaggacgccatcgctgaccatgatgatccggttgtcatcccacagctttttagacagaagaatcggttctaccggatttaagatgcccataggcacctctccggcctccaggagctccactccggtaggtgtcagtatataggtggccgcggctcccagcttcatggcctccagaattccggtatgtaagtcaatacaggccaggtcaagggttgccggatgctggacattgccggtcagcagaagaaccgtattgaccagttttaaggcggcccgcgcagaaaaaccggtttccagaagtctctctgtcaattctatgacctgacggctctcctcttctgcgatttcaccgcttcccataccgtcggaaagactcataatgacctggcccggcataatctggctgaagctgtagttgtctcctgatacggattctcctgtctttatggcccgggccgcgccgtagaccatacggtaacggcccttttccacaaagcggatggtggccggctgcttcgtgattaagtttcggccgtcgtgggcaacacaccattcattttcgtccatggcttcctccagaagctccgccgcctctttcgcggtcacgcagcgtccgtttccggtccgcatggtgagaaaggcctctttctggtgattttcatactccagaatcagcattttctcgattacgatgtggcggcgcctgaatactttctctacggcgtcagctttctccggggtaatgtccaccgccttttccatctggtgggaaaattcctccaggatgacggcaagctccttaaactgtatgatcaccgcatcccggctttccagaaaacggttcttccaggctaaattcatcgttgcttttccgagactgcggttcagctggtcgacatactcctcccggcgtttgcaggtctcaagaaacatgcggggcatgtccccgtaatccagatttcccttttgctcaaacgagcgaatcagataatacagatagtagttgttttcctgttcctggctggaatagatattgcacttgttgcagcctgcgcataccatggctgcggctgtctgcatcgccgcaatcccatcttccttcgtaagtccctgtccggcggacaattcatctgtacatgctctggccagttccccgagagagcctgccatgtcatttaatctcttcgctgtatatacattcacatcagccatatcgtgatgctccgccttacgtctgaacacaaaaattccctcctgcctgtttttatgcatactgttcctaacgcacattatatacaggttggagggaaatatttgtcaaatcttaacaccctgtcccaaaaatattacgacagatttcattctttttttttcggtttcagcagaatctcgtcagggttcaccagtcccagcttctgcttcgccacctcttctatgtactgcttcgtctggacatagatccggtactcttccagctccttcgagcgttccagttccttgtccctctgagcggttaaattctcctcacgtatctggtattccagttccttgtcctttaaggaggcgcccttgaccgtcacgataacagccaggctgaataccacgaaagtgataccaatcagagccatacggttgccccatttatcttttcgtcttctcctagattttccaaaactactcattcttttcatcaccagctattctatcgttgccgttttcttctgcggcggaaacacttgtctagcttcattctaagatatttccacgtatttttcaagaactttagaaaaaacctgctgatcagccggtcgtacaaaaacattccggtaaagacacctgcgatgacgtatcctcttaagcctccgtcattctgttcatacagcagggagaaggtcaccagactcgcatacacccagtataccatgtcctccacgcccataatgacgggaaggtgaggaatgaagatgcggaggattcttaaaaaatcgtacgtcatcattagccctgcgcccgtggcaaagctgtagagcagaagtctcacctcatatagaatatggacgctcataggactcctttaggctcattatttgaataatctggtaaacagggattcccctgactttcttaacgcctcgttggaggaatagtttaaactgtcgatggtaccgtctaaatccacctctcctttttccagggtcagcctgctgacatgcaagtccttccccttgacagtaagaagccccagatctgtatcaagcaccacctgattctcatcgaacgatacgacctcccggattcccgtaacggttccggcccctctgttttccagtgtaagcttatgcgggcggatattcatcttctcttccattaaaaaacctcctaatatacctgtctaaagtatattaggaggcgcgcctctttattcctgttaaatatagcgataaagctctttcgcttcatccttttttacagtctccgccacatccaggacttccaccttcacggagcttgtcccgaaatgaatttcgatgatatcgccttccttaacatttaaggaggccttcgccggtttatcattcacgaccacgcggcccgcatcgcaggcttcgttggccacggttcttctcttgatgagccgggaaacctttaggaatttgtcaagtctcatgaattatgcgttcaccatatcctttaatgccttgccagctttgaacttcggtgtcttggaggccgggatgttcatcacttcgccgctcttcggatttcttccttctcttgctgctctttcagaaacttcaaatgtaccaaaaccaactaactggatttttccgccgttaactaattcttcagatactacatctgtgaaagccttaactgccttctctgcatccttcttggacagttctgccttctctgctactgctgcgattaattctgttttgttcattgatatcttcctcctagaatgtagtatttaactacgatttttctcgttaatacgatactatatcatttatagctgtttctcctgtttttgtcaaggttttttacgcctatttctttcccatcttctcccggcgttttatctcattccacaattccagactttcctctggcgtagccgcttttgcatcaccaaatacatgcggatgacgcctcaccatcttctcgcagataccgtttaccacatcagccactgtgaacgcaccgttttcctccgcgatccggctgtgtatcaatacctggaacagcacatctcccaattcctcacagagattttccatgtcctgattgtcaatggccgccagtacctcttcactctcttctttcaggcatggtttcagactctcatgggtctgcttcctgtcccacggacaaccgtgctccgagcggagttccgccgtaattcttaccagatcctcaaatgaatacatagatatcccccttttaacaaaaatccgggccggatgggctgctgcaccatccggcccgggaacgattttctctaccagaaaattatacgcttttttgtcagaaaacacaagcaaatgcctgttccagatcttcaataatatcatccacatgctccgttccgatggagaggcgaatggtctccggcgtgataccgcttgccgccagttcctgctccgtcatctgggcgtgtgtggtgctggccggatggattaccagcgatttgacgtccgccacattggccagcagggaaaatatcttcaggtgatcgatcaattccattgccttctctgctccgccctctatctcaaaggtgaagatggatccggcgccttccggaaaataccggttgtagagttcatggtacggactcccggggagtgatggatggttgactttctttacgtggggattggcgtttaaatactccacaacccggagggcattaaaaacgtggcgttccacacgcagggacagcgtttccaatccctggagcagtaaaaaagcatgcagcggcgccagtgtggctcctgtgtcccgcagaagtactgcacggattttcgtcacaagagctgccggtccggctgctttcgtaaaactgacgccatggtagctgggattcggctccacgagcccggggaatttgccggatgcctcccagtcgaagcttccgccttccacgataacgcctcccagcgcagtaccgtgaccgcccataaatttggttgcagaatgtaccacgatatcagccccatgctccagcgggcggaaaagatacggggtagcaaaggtattatccacaatcaggggaactttatgggcatgagccacggcggccacggcttccatatcgatgatgctggaattggggtttcccagcgtttcgataaagacggcctttgtattggggcggatggcccgctcaaacgccccgggttcgtcaggatcaacaaaggaagccgtcacaccgaattccggaagtgtgtgtgcaagaagattataggtgcctccatagatggtggaagctgccacaatatggtcgccttccctggcaagcgcctgaaacgtataagtgatcgctgccgctccgctggccaccgccagcgccgcactgcctccctctaaagctgcaacccgctgttccagcacctcctctgtcggattcgtcagacgtccgtagatattgcctgccgccgaaagactgaagcggtccgccgcctctttgcagtttttaaatacgtacgatgtggtctgatagatcggaaccgctctggcccctgtggccggatccggttcctcctggccggcgtggatctgtaatgtttcaaatcttaacccttttctctctgacatatgcatccatcctttccccgttcctcatgcggaacacgttcgattcatagtattcatatctctttgctatgtattgcgtgttattgtacaggagacggcatcgtctgtcaatctttttttgaatatttttccaataaaacggtatccatattacttcatttcccttataatcagaagcataaacaggaggaacaacacgatgaaacaatggaacttttatttttccggaattctttacggtatcatccgcgatcagaacggggatggaaaggaactgtatcaccggacgctggatgtgttcaccaacacctttcacctggaggaaccgcttcacaacgatgatttttatgaagttctgtgccgtcggaaactgcgggacttcttcgaatcacttccggagtatgagattcatgccaaagcaggcgaagaacgttttacgaccgcaggcggacaggtcttcacccgccgtttaagcgatcacggcgcttctgccagtggctcttacattcaaagggaagtcaaattccctctggatttgtatctttcagacggaaaggtttacgcagtgcagatggccgggcgggattataccggtgtcctggtattaaacgggatggaggaacagacgatcttaaaagaatggacggctgatccggtctgcgcggtccattttgccggtacttacatggtcccgacgtccgacggcgaacagctggctacagacgtctatcttcccgccacgacggctgacgggctccagccggaacccgccggcggcttctccgggtcttccccccgggtaccggcggtcctgatccggactccctacggaaagcacgacggtgtcgaacagtactacaggtttgttcagcgcggctacgcggttgtcgttcaggatgtccgaggccgggaagacagcaccggagagtggatgccgaattaccatgaagttgaagatggaagtgatacgctggactggatcgcagaccagccgtggagcgatggaaacgttggcatgaccggcggttcctacctcggatacgttcagtgggccgcggccgccagcggcaatccccatctgaaagccatgttgagcagcgtctgcgcgggaagtccctttatcgatcttcccagacggggcggctgcttcacctccggctccatggcctggaacttcgccatgacagaaaggcggttccgtgaagaccgcatggttcgcagtgactgggaggaggttttaaagctgcggcctgtcagagacatggccagaaaggcacttggcatcgatgttccatttttaaatgagtggctgaaccatcccgactacgatgatttctggaggaaggcaaactggagagagcgcagctgcggtcatgtcgttcccgccctcgtcatgtcgggctggtttgacgacaatgggatgggaacgaccgaggccctggaactgatcgatgcattttaccccgccggaacgtacaaggttgtcctcggtccctggaaacacagcggtaacgccaattacgacattcacggcatctttatgggagaacatgcgctgcggtacgatatggatcttctatgttttgcctggctggatcattttttgaagaatgaagagaatggcatcgagacaggcgcacctgtagaatattatacactgggtgataactgctggaagcacgggaaacactggcctctgccggaagcagtctccaccgtctggtatctggaccgggaggctcttacattatgtaaacccgcaattcaggaatccgattcctacgactatgatccggaatctccagctgctcacatcattgatgtttcggaaaatgaactggaggttccggaagactacaccgaggaagaaaaacgcagtgatatcctttgttacaccacgccggtgctggaccacgatttaaccgtgaccggagacatcactgctgtcctctgcctttcatccgactgccccgacaccgatctgtttgtgcggattacggatgtggatgaagccggaacctccatcaagctggcagatggcgtcatcgatgtaaaatacagaaacagctttgaaaaaccggaattcatggaaccgggtcaagtctatgaagtgcgcattcggaccacgaagctgtccaacacattcaaagccggccaccggatgcgttttaccgttacttccagtgcaaaaaatttcatgtttccaaacagcaatacagaaaacgggttcgacagcgaagtaaaccgagtcgcccacaacaccatataccgcggcggagccctggcctcccacatccttgtgcccgtggaaaaagatgtttaatccccatattttctcaatagcagcgggagcttccgccatttctgacgatttcctgacaatttacgtcaccgcctgttaaaaacggggacaatcttatataataaggattagtcaaaaaagaaaccggagggaaatatgaaatcatttaatatctggaagaaaatagccgcgggaatcctgtttttgaatattgttttaaccagttttatcggacagcccgtggccgcagaaggaacggaaggacagcctgccatacagcgtatggggttttcctcaaaactggccatcggaccgggaagccagctctttgacggcggaagcctgtctctcttagctgaccacggcaaccgccagatgctgtccatggttatgcagtcgaaggatgggacactggtcgttatcgacggcggctgggacagtgattctgctcatttactcgacgtaatccgctccaggggcggccatgtgtccggctggttcatcacccatccccattccgatcatgccggcgccctgattgaaattttaaataatccggacagccagattaccattgacaacgtctattacaaatttacagaccaggagtggtatgatacccatggttccggacgcggtgacttcgtggtcagtcttcgggatgctctggcggtgcttcctcctgagaagcttcatggcgacatcaccaaagggcaggaaatacagctgggcgatatccgggccgtcgtcatgaacgatccctatctcctggatgtcacctccgtcaataacagctcggtcgtctataaattttatttaaacggcgtgagcatcctggtcctgggggacttagggccggaaggcggtaacctgttgatgagtgaatacactcccgctgatttaaagagcgatatcgtgcagatgtcgcatcacggacagtacggtgtaaaccgtgacgtctatgcggccatcaatccgcagattgccttatggccctgcccccagtggctctgggacaatgacaacggcggcggagtcggaagcggagactggaagacactggaaacccgccagtggatggaggaactgggagttcgcgccaactactgcatcaaggatggcgatcaggtaatctattaattcccaatgcaaaaacaaaaaaacggcctgtagccatgaagctgacaggccgttttattttcgtcatcagtccccgcccgggccgtcccttctggggcgtgtcgactcgggaagcggctccacatagaaaccgtccttatatggctctgtgtccacttcaggaatatctctgtcaccgtaatcatcttctttcggatcatacaatgccatttccgtcacctccttctctgagctgttatcagccttccatctgtcttccaaggaatcctgctgccgttgtagccagcttcgtttccatatctccaaatcttgctctcggctcccggcttaataatgcaaccgctcctatggcatcgccttcacaaataatcggcgcaattacctgagcggtgattccttccagcgtttcgccggtcagcggaataaaattcttatcatcttttccagccaggacaacggttctttcgttaatcacattttccagctgcttgctgatcgtcttctggagcagttcctttttcgatccaccggccactgcgatcacctgatctcggtcgctgatgcagacggtaagtcccgtggtctgtgccatggcttccgcatactgagatgcaaacgctgtcagttcaaccatcggtgaatatttctttaaaatgatttcgccttccctgtctgtgaatatctctaacggcgtcccctctctcaaacgaagggttctcctgatttctttcgggattaccacacggccaaggtcatcaattctccttacaatacctgttgctttcatataaaactcctccatggtgtacaattttatatcactgatactattttgctacgaacgctgagatttatactcatgtctgccatttttcgtaatatatccctgtcgctttccattgaacggagtttttttatatgaaaatgcgccagttcttatgaactggcgccagtgatatcaggttctgcgattgatggcccgttctgccatgcttctccttcccttctacactcttttttacggttccggtactccaaccaggcacaccggcgaggcgcagctgatttcacggttcatatcggtgatcgtaccattttcttcatcaaaatgtaacatggtaatcgtatggctgtcctgattggcagaaagaagtatgtccccgcacaggcagaagtccctgggcgtctttccttttgttccggcccgtcctgccaacgtcagaagtcccgtaccggcgtccaccgcatacactgcgatgctgtcgtgcccccggttggatgcacagaggtaacgcccgtcttctgataaatgaacagcggcacatgtgttattttccatagattccggcagcgtggaaactctctgcagtattctattttcctctgtgccgcattccatcacaaagatttccgagctcagttcgctcaccacatacataagctcccttctttcccggtttaagacaaaatgcctcggccccgtaccttccggaaataccatatcgtgtttttcgtccggaaccagttttccgttctcttcatcaatccggtaatagcggattctgtcaattcctaagtctacacaccagagtcctgttccatccgctgaatatccaacgtaatgtacatgcggcccttcctgcctctcttcattcggcccgtgaccgtaatgctgtttcaaatcacaaagttctccgacagagccgtctgcatttaaccggaacatggatacgctgccgctcagatagttggctgcatacagaaaccctctcttctcatcgggaagcagatggcacggcagagttccagcggttccctgcgtattgagaagcgtcagggagccttcgtcgatccggaacgctgccacgcctccgccctcccttccttcataagccatatcctccataacggaatataaaaactttccatcggctgaaaccgccagatacgatggattcgacactccggcggcggcaaagacttctgtgagctgcggctctctgccttctctccgcgtcagcctgtatccgtggattccagcttcctcagccggtccatagcatcctgcgtatacgaaataattctgcttcatgatcgttatcctttccctgtatggtaatttactcttttcaccccgataaaaagaagctgcgcaccgccgattttacacagccggtgcagcagctccctttcaaaatcttttaagcatgctccttacagaatccggaacagccgcctgcttacgaaactctcactactctttcgcagtcttcattgtctgaatcagaacgccccttccgtgacccttggtgatacgtcctttgaggaacatacatatgcctcatgcgtcacccttgccgccgtgctgtcaggaaccggagcaacaaatctgttctcaaacgattcattcctttgaatggtcagctcattcgaaactctctgcagaagatacatacctaaaacgtccatggttaccacctttctcttgttttatgattatggaaatatagcatgcattggggattttcatcccttcttctactattattatatcataaaataggctaatagcaaccactataagcttaattttttataaacacttttcagaatactctttatttttctgtcaattcatacaactgtttcaacagttcctctgcctgctccatcatgccggcagtggtctggtttttccgtctgtcgatgaacgtaaaatacggttcttctgccatatggaacttcaaatcccctcggtactgatccaccatagccggtataccggccacactcagcttcgctttttgatacatggtaaggcgaatctcctggctgttgatatttacctcggtgacataagcactgtgagccagcgccttgatcccagccacacgcagaagattttccaccggttttggaatatccccgaaacggtccatcagctcatcctgcatatccatgtattcatcttcattctcaatactggaaatcctcttatagatatccagcttctgatattcattcttaatataggaagtgggaatataggcgtcgatgtcgcagtccactaccgtttcatacgtatcctcttccctgcgctggccctttaactctaataccgcctgattcaacagcttacaataaagatcataaccgaccgcttccatgtggccatgctgttccgctcccagaacgttgcctgccccgcggatctccagatcccgcatggcaatcttgatgccggaccccagctccgtaaattcccgaatagcctgaagacgcttctccgcctcttcccgaagcatcttgtcgcgtttatacatgagaaacgcataggaggtacggctcgaccggcccacgcgtcctcttaactggtacagctgcgaaagccccatacggtccgcatcctgtataatcatggtattggcattgggaatatcgagccccgtctcaataatggtggtacaaaccagcacatcgatctctccgttcacgaaatcaaacatgatgcgttccagttcatgctcatgcatctgtccatgggcaaaggtgactgtggcttccggtacgagactggcaatgtggcctgccacctcgtcgatgttgctgacacggttatatacataatatacctgtccgccacgggaaagttcccggttaatggcctcccgtaccatctcgtcattatactccatcacgtacgtctggatcggcatacggtccaccggcggttcctccagaacgctcatatcacgaattcccaccagactcatgtgcagtgtcctgggaatcggagtcgctgtcaacgtgagaacatctatattttccttcagcttcttgatcttctctttatgtgccacaccgaaccgctgttcctcatcgataatcagaagccctaaatctttaaactggacatcctttgacagcacacggtgggtaccgatcacaatatccacaagtccgcgtttcaaatcctcaagcgtctttttcacctgagacggtgtacggaacctggacattagatccacacgcaccggaaaatccttcatgcgctggacgaaggtgttgtaatgctgctgcgccagaatggtagtcggaaccagatacaccacctgcttttcatcctgaaccgctttgaaggcggcgcgcagggcgatctctgtctttccatagcccacgtcaccgcagatcagacgatccatgatcttccggctttccatatcactcttggtggaatcgatggcatccagctggtcctccgtctcctcatagggaaacatctcttcaaactccttctgccatacggtatccggtccgtactgaaagccctgcgtatcctgtctggccgcgtaaagctgtactaaatctttcgcaatctctcttacagcgccctttacccgggttttggtcttattccattgatctcctcccaggcggtttaatttgggcttcttcgcctcggcaccagcatacttctgaattccgtccagacgggtagcaggcagatagagattgcctccgtctccgtattccacctttaagtaatcttttatcaccccgtcctgttcgattttctcaattccgcggtatataccgaggccatggtcctcatgaaccacatagtctcccactgccaggtcggaaaagctctgaatcttcgttccctcgtaagtggttttcttcctcttccgcttctttttctccacaccgaacatgtcgccttccgtgatcacgataaacttaatcatcggatactcgaaaccacggtgcaggtttccgtaggtcaccagaatctcgcccggcttcacctccacctcttcccggctctcatccgggcaccaggcccgcaggctgtactcccgcaaatcgctggcaagacggctggatctggttctggaagcggagagaagaatgacacggtatccctcccgtttccatctggttaaatcctttattagaagctcaaatccattctggtaggagtttacatttttcacggaaaggctgtaccgttcctttaccgtaaagccggaaagtttctgctccagtccggttaaatacgcagtacggtctctctgagccttcgccagcatttccttcgcgggatagagaagtcccgtttgtccgggaagcagatagccgtgttcgaggcgggatatcatgctctcccggaactcttcctccaccgtggcccccttttccttcagccgctccggctcatctaagtagataaccgtgttatcttccggaaaataatcaagaaacgacacgctgtccctgcagaaatagtggatatatccgtccagtccatgctgcttccagccttcccttaagccgtccaacagttccgagacaatagaatggatccgggccgcttcctcggttttcaactggttccttagctctttctcgtatttcttagcctctttttcaatggcttcccgtccgtctgtgatctgctgcttcgtcagcaccatctccgttgccggatagaccaggacccgttccagttcttcgatggaacgctggctctcgatatcaaaggtacgaatggagtccacttcgtcgtcccaaagctcgatgcggacaggcagctcctctgtcagcggaaagacatcgataattccgccgcggatcgagaactggcccatgccatctacctgggccacgcgctcgtatcccagttccaccagtttttccttccactctgcgatatctaaggtctgtccgctctccacctcgagaatctgtttctgtaaaaaagacagcggaagcaaatgatccatcaatccgtcaaaggtagtgacgaccacgccggacttctcctccatcagccggcggaacacagccatacgctgtttggttaaaagattaccgtgaatatccgcattaaagaacagtaagtccctggccggatacagggagactcccggttcgaaattgcggaagtcctcgtagatctccctggctctggtatcatcatacgtaaccaccagcttccagggcacctccttcgccgcctcgtacattaggtgaactttctgggaatccatacagccgcttattaaaaccggcccttttttccggtttaaatcacggtctaagtcttcaaattccttcagctctcttaatggactttcaaacacatcgctcatgaattctccttatgctttctgttataatggttcatcgccgcatcggccccctcctcgatcatcatgcaggccgcatcggccgcgtcccggtatgcctcttccatgacagcctgctgctctttcggaaatctccccagcacataatccgccaagtccatgccgcgcggtttttcaccaactccgatgcggattcttggaaattcctgggttcccagatggctgatgatattttttaaaccattatggccgcctgcgcttccttttaaacggatgcgcagctgcccttcagaaagattaatatcatcacagagaataataatgttctccggttctattttataaaaatccgctatttcccgaatactttccccgcttaagttcatatacgtctgcggctttgccagaatcactttctggccgccaatataacctttaccgtacagcgctttatgcttcttctccgtcaccgtcgttccggccttgtccgccagaatatcgatggcttcaaagcctacattatgcctcgtcttttcatattcccttgttgggtttcccagtcctgcgatcagatacatatatttcgctccttactatgttctatattaatatatctccgagttcataccaattatttccgtgaataatgccgcacgaaaattttttgttcataatcatgtcaaacactctgcgcctatagcggagtatttgacttcagaatgcccgaaaagcgctagatttcctgatagggggtatctaacgctggctggtttactcattttaacagtttggaaccttaatgtaaagggggacgagagatttatcatgatggttttaaaaagtacttgaaaaatgggtaaaattcgattataatagacttaaagaaagcatccactccaaaagtggatgctccaggggttgctaaatgtccttacggacaccgcccatcctgttggccgacagggtgggcattttatttgcgcttatttctcttatcgagaaaggcgattaccgctacaagcaggcttccaaaggacatcaatagtgctaatatccctgtaaagattgatataatctcatatgccgtcatagacgatacctcctttcctatgtattccccaaaaggggttaccagtcctggaggcggccactcctgtcatgagtgctttcctgttgtttattttaccgcaatcagatgtatttttcaattgttttgaagtcacttcataactgcttattactgtttaccaaatttctcccgccgcaccttgcggtgccccgttcaatatggtaaaatgcaagtgtcactgaatcacaccttatataggttcaaaataggttgaacgtttctaccaactaccggaatagttgactataaggctggttggtatttttatgggaaaaggagtgttgttcatgagttcaaattcaagtaactatgatgtgatcatcatcggggcggggccttccggtattttctgtgcctatgagctgattcagcaaaagccggatttaaagatcctgatggtcgaaaaggggcgcagaatcgaaaacaggacatgtccgaaacggacgaccaagacctgtgtcggatgcaaaccgtgttccattaccaccggctttgccggagcgggagcattttccgacggcaagctgtcactttccccggatgttggggggaatctcccggagattctgggatatgataagacggtagagctcttaaaggagtctgataatatctatctgaaattcggcgccgacacgaatgtatacggcattgacaagcagaaagagattcaggaaatccggagaaaggcgattaacgccaacttaaaactgattgaatgtccgatccgccatctcggcacagaggaaggctacaagatctatacgcgccttcaggagcatttactggctcagggcatagagatggaattcaacaccatggtaaaagacattattatagaggacaatgaggcaaaggccatcgttaccgacaaaggcgaaacgtattacgcgccggagattgtatccgccatcggccgtgaaggctctgactggttcagccacatctgtgacgcccacggcatcgaaacccgcgtcggaacagtggatatcggggtccgtgtagaagtccgcgacgagatcatggaattcttaaacaagaacctctatgaggcaaagctggtttactacaccccgacctttgacgacaaggtgcgtaccttctgtaccaacccttccggcgaggtcgctacagagtattacgaaaatggactggctgtcgtcaacggtcacgcctataagtccaaggaatataagactaacaatacgaatttcgcaatccttgtctccaaaaacttcacgaaaccgtttaagacaccgatcgaatacggcaaacacattgcccagctcagcaacatgctctgcgacggcaagattctggttcagacctttggtgatttccagcgcggcagacgtaccacggaagagcgtctctgccgcaataacttaatcccaaccttaaaagacgcggttcccggcgatttatctctggtattcccgcaccgcatcatggtcgatatcaaggaaatgctgctggctctggacaaggttactccaggtattgccagcgacgagacgctgctttacggtgtggaagtgaaattctactccaacaaggttgtggttaactctgattttgagaccagcgttacaggtcttcgtgccattggcgacggtgcctctgtgactcgcggacttcagcaggcatccgccaacggaatcagtgtggcgagaagtattcttaaaaaattagagagtcagaaaaaggcatagaacagaaaaagcgcggaaacgccggccagaattgctgtcggcttttccacgcttttttaatttaattatttgcatttaaaccgaagggtctccccatgcaccgattcacattttattcaaacaaaacatactcataatcacagtatcccgccgattcttcattttcacgcgagcaggaccacagacagagcttggctcccgtccaggtagcccggcagagtgtaaataccggctccagtttctgaaaaacagttccgtcggcagaccaggaaaaacggtatgtcttatccccggaaacagagagctttaaccacaggcagctgccttcggccggtaccttaaggatacaccgttcttctgcttctcccagaaacatcttctccgataccgttccctcgtaacagcgaagctccggtccctctgccccctggtaaagtcctgcatacccataggaatgaccgaccataccgataccgccaaaatctccggtcttctccccatgaagttccaatttgacaatcatggaaaactccttttgctgcggaatctgtgtcagcacattaggggcgtaccacaggagattatctctgtctgggtttctgcggcagtagagcctcaaatgtcccggaacagcggtcaatgaatagttttccggattcggattcgcctgccactgccactgaagtcccagcttctccgaggagaaatcatccccacgcacaatctcatattccggcatgtcctccgcaggcatattccattctgctacgggttcgccgattccgtctccgtccgtatcctgccccataaacggccagccgtctacaaagcacactggttggagatgaatgattcttcccagttcaatgacatcctggaaatggagaaaccagtctctcccatccgtggaggtcacccagcccccctggtgagggccattaaccggagaatttccctggcgcatgacaatcttatactcatagggtccatataccgatttggatcttaagcaggactgccagccgttttccactccgccggacggcatcagaacgtaataatatccgtcttttttatacatcttgggtccctctgtggttggggcaatctgctcgccgtcgaatatcagaaccggttccccgatgagctcccggcagtccgggtcgatctccaccagcatcagacggtgcttaatcccggccctgctgcccgcataggcaaatatcatataagctttcccgtcctcgtcccagaacggacacgaatcgatccagcccttccgttcgcacagcatattcagctgaaattctccgtatggatcgctgcttctggctaccagaatcccctcatccaccaatgggataaatacaaaaaaggtcccgttatggtaccggatggccggcgcccaggttcctgaaccgtgagaaggcaccgcatatttttcataagggagctccttcacacagtagttaatcagttcccagtgcaccaggtccttcgaatgaaggagaggtaccccaggcagataagtaaaagaagacgccaccatatagtagtcttctcccacccgaatcacatcgggatccgaatagtccgcatacaataccggatttttgtaagtctgcataaaatcctccgtttctgccctgccgttcttgttcacagcctgcccctgcggcccgctccggcaggagcaggctgtgaacaagatgttactacaggccatgtattctcataaagttcgttaaattctgtgcaatcatggtatgacccgcgtccgaaggatgcagtccgtctgaagacagcccccggaaagttcccatgatctctgttcccttcttataatacaaccgatcatactttttttccagtacagatacacactcttctatcttttttctgaatgcgtcagaccgttcgtctccctcaaaatcgtaatgattgtaatacatgtcggtcacgataacggtcttttccggatgggcatgtttaacagtatcgatccactgataagcccgttcgtaaagctggccgtcggtccattcttcaatcacattcactcccagctcaaacacggcggcatcccagtctgtcaggcctgcaatatattctgccatcgcacagtccataaatgcgctgccggcacttcccagattgatgaaatcgtatcccagctcccacgccgtctgaaacgcatatgtcctcgatggaacggaagcgttgccgccgtgggtgatggatgaaccgtaaaacagcaggcgcttctccggcatttcctccgttttgggcggccggatcgccccccggatctcccggatacagcagccccagtcgtagggaagcaggactctcatcacctggggagcaaatccgcccggattacgcgggaaacggcagatatggctccagtcctgtctgcgaatggtgatctccgtctcattcacgtctataacctccgggctgatctcacagctcccctggtaatctcccgaaaagacctccaggattcccctggacttaatctgcccgcttaccggcagtcttctgagaacaatggtaaccgcatcctcttccattacaaaacgcagctcactgttgcttacaaacagcatgttgctctgtgcttttggattcagctggcgcctgacggcctccggaatgcggccgatgatataatccccatatgtatcgtcctgttcgagactctccacatggtacagcaatccccgattaaactccatggctgtctcctatcctttcataccagtggttgcaatcccttccacaaaatacttctgcgccgcaaaaaacagcagaatcagcggaagaatagataccagcgccatcgacatcacctggttccactgaatgttggaggtgacatcgatgctgacccggagtgccagagacaacggaaacttggaaaccgtattgatataaatattggtattgaagaaatcattccatgtccataagaactgaaacagacctgcggaaaagagagccggcttcagcagcggaagcagaatctggataaaacactgaaacgggccgcagccgtcgatataagccgattcgtccaaatccctcgggagcccccttaaaaactgtaccagcataaatacgaagaacgggtagcagcctgccgccgccggagcaaagaaggtcatataggagtccagccagcccagcttgttaaacagcgcgtatctcggtatgatgatcaccgcattgggaagcataagcgtcgcgatcaaaaccatgaacagaaactggtttcccggaaaatcaaacctggcgaacccgtaggccaccagcgaacaggatgccagcgtgagcagcgtcgtgggaactaccagggcaaaggtattaatgaagtactgggcatacgtataggtccctgtggtcttccaccccttcacaaaagcttccaggctccagccctgaggcaggatgcttaagctgccgaatatctcattgttggtcttaaaacacgcgaagaacatccagatgaccggaaacagcatgacgatgccgaacaggcccagaaacacgtaggtcagacccttttttactgctttatttttcatcccgatttcctcctagttatcatagtaaacccatttcctggatgttgcaaacaagatcagggtcatgatcatgatgatgacaaacaggatccacgatgtcgcacaggcgtatcccatcttaaaatatttaaacgcatccgtataaagcttcatccccagcacgtaggtcgccttgttgggacctccgttcgtcacgacaaacgccgaggtgaaattctgaagcgccgtgatcagctgcattatgatgttaaagaatgcgatggacgtgatcatcggaagcgtgatcttaaaaaagattcttaccctggaagcgccgtcgatcctggccgcctcgtaaagcgactggggaacctgtttcagtgcggacaagaataaaaccatggaagagccgaactgccagatctccagcatacagatggtggtcagagccatctccggcctgcccagccatttgaccggcgcaatatggatcacgcccagaagactgttaatgaagccgtcattcataaacagcaccttccatagaatagcgaccgccacagagccgctgagcagcgacggaatatagtatacggtcctgataaaattgatccccttcagttcccggtttaagatcatggcaatgatcagagccagcaccaccttgccggggaccgtaataaacgtatattttaaggtaacggttaaagaattccagaattccttgtcctttgtaaacagccgcacgtaattgtccagacctacaaactcaggtttgtggaaaatgtcgtagctggtaaaggaataaaacaatgaactcacaaagggatacagctgaaataccaggaaaccaaaaatccagatacacacgtaaaggaatccaatccggttcctcttggtccagccgccgtgatttggccgcggcttcacactcacattcgccatagtagcttcctcctgcctcttaaaacggcccggaatcgttctctatccgggccgcacatctcatttcagggcgtattcaaactctttcttaattcaaaccgcttaagtaatcattgattaaatcaatggcattctctgccgcctcctcaggcgtactctgaccataggcaacgctctcgatcatgtcttcctgaatcgcatagacctcggcgctcgtcgtatagcccttatcacttttaccgtttaaccctgccgccagatcaacagcctccactacggttgcatttaacagacctttctctgcgcagagtgttctggctgaagcggtaggcggtacggatcttacatcctttaaggtctcctgggcctgcgggtcattatagaagtaatccatgaactttacagcctcttccacatgatcggaattcttgttcaccgtcatgtactgaggtgtgtctgcaaagtagccgtcgcttacccggttctccgccatcggcatctggactacgctgcatttcgtttccggaatcgcatccattaaaaggctgatactggaagacggtccataggcaaatacaaatttgccgtcgatccattttggattggtatgaatctgtcctttaaaggtcgcactgtcctcggccggttcaaagacaccgccgtcgtagcagtctttgatgtactgaagcacttccaccagctgctccttcgtaaagctgatcttcttttcactgtcaataataaacgattcacctgtcatctgacgtaaatacggtctcaatacatactcacacagaatcttggtatccacgttcatataataatagtccggattctgggcgtgaagggcttttccatcctccagcatggaatcccaggtaatctgcttcgtcaaatccacgccgttagcctctgtcgccgccgtgttggctaccgtcgccagacatgacataccggtcggaagcgctaacagcttaccgtcgaatgtaccaaactggctgataaaggtctcatcgaatccggacggatcaaataaatccggataatccttaaaattcacgaagaaatcgcctctcgagataaagtccgggagagagtccacattctgctgaagaatatcaggagctgttccattggccagcatggtggaaaccttatcgatatatccctgatcggagttcatctcggcttcgatcctaatctccggatggagtttttcatactgatcgataacggccagagtcgcctcatttctggcatcgccgccccaccacataaaccgcagggtaatctggtctccggaagccttttccgtcgttttctccgctgccttctctgttgactgtcctccttccggcgcatttgatgcggccggagccggttcattggtacaggccgtcagtgacgacgctgccatcagtcctgtcataagcagacaggtaagtttctttccttttctcatatctgttacctccgtttattgttaacggtaccgttaactgattaatcccagtataacgaattttttacaaagagagaagaaacttcaattacggaatcgtatcatttcttacaaagttgtggaaaaaggtatcatttcttatgatatttcttcattatcatggaagaatggctttgttgaaaaaatacggatgctttttctcctttttttctatataataacaatcaatagaagcaaacagaaaccatacgttcagagaaaggggtcacttcgtatgtatcaggtcatcattgtcgacgatgaagccaagattcgcaacggaatcgccgggctgttcccgtggagccagctgggctttgagattgccggctgtttttccaatggaaaagccgcctacgaatacacacttgccaaccatgtggatctggtactgtctgatatccgcatgcccatcatggatggcctggagctctccgaaaagctcctcgagaaaagggatataaaaatcatcttcttcagcggctaccaggacttcgagtatgtccgccgggcgctgcgcaccggagtcgtcgattacctgctgaaaccggtaaaatacgaggatctggtggactgcctcacccgcatccgggatcgcttaaacagcgaaacccacgcggcccccgccagggaggaagagaatctgacctattacgaaaaaatcatcagcctggttaagaattacctggacaccgactatcagaatgccacgctcgaacaggcggcccggctcgtaaatctaagccccaactacttatcgagaatcatgaaggaacactctgatgtcaatttttccgattatctcttaaaaacccgcatggaaaatgccgcgcggatgttaaaggatatcggctgcaaacagtatgagatcgcctatcgggtgggctacgacaatcccaaaaacttttccagggcctttcaccagtattttcacatgacgccttcgcagtatcggaaaagcagcggcgcagatcatgattacggggggatatcatgagaaaacgcaattttatcaaacgttttttatactatacgggaatcatcaccattcccattattacgctgtgctttatcttcatggccgtcatcgtataccgaaaacagcaggacatcgagactgaggccatcaaatcggctcaggctgtaagggataactattctcttgtgctggacagcgccgcgacccaatacgagcttctggcacgaaatcccaggatgtccatctccctgcgcaattacatatcccataaacagattggctatctggatgtgattctcaccaacagcatcctgtccaattttgcctcgctgaccaaccatgcctcctacattgcttcggtctactactatctggacggttacgattccctccttacctccaatacaggaggcctcaccagtctggcccagtactccgatttaaactggctgccctcctatgccgaatcagatcagaatgaatggatcgagaaacggaatatgcacttatactcttataccaatccggtcccggtgctgacctattataaaaagctcagcatgttccggggcgtcgtcatggtaaatatctacgaggaccagttaaaacagatgctggaatcaaattccagcctggatcagttctttatcatcgactcggacggcaattttcttcttcagggaagagggacggaggaaccggatccggaatcgaaagaggcccttatagaggcggtacatgccgcttccggaactcccttccaggactggctctcactcggacgcaccagatatctggtgcggatcattcccgcggactgcggcacctacatcgctgcatgcaccagccgttccagctattaccaggcattgtacacgcttcttttacagctgtttatcgtactggcagtcatcatctgcaccgtagtgtggatcgcatacaccattaccaaaaagaactttcagcagattgattactttgtcaccgtattttccgatgccgagcggggaacctataataatgaaaaaccggcgtttatcaaagatgaatatgacctcatcctgaacaatatcgtacagctttttatcaaccagacattccttaagaacaagctggccttaaaggagcaggaacagaagctggcggaaatgacggccctccagctgcagatcaacccccattttctgtttaacacgcttcagagcctggatttcaaggcactggagtatacccggatgcctacagccttaaacagaatcatcgaggccctgtcggatattctcaaatactcgctccaaaacacaatgtccatggtcacgctgaaagacgaaatcgaatatctgaaaaaatacgatcacatccagcagtaccggtacgaggacaaatacatcctctactacgactacgaggaagagctggaaagcactcctattatccggctcattcttcagcccctcattgaaaacagtctgtatcacggaatcaaaccgttagacggttccggttttatcaagttaaagatcacggaacgggataactggctgacagtcactgtgatagataccggtgttggtatggaaaaagcggaaataacagcgctttacgaaaaaataaaccatcccggaaatgagaacatcggactagccaacgtaaacagcaggctggtcatgcagtacggggaggaatccagactgaaaatactgagcaagaagcatatgggaacctgtatttcgttccggatcccattttcacagtctttataaaatctttatatccgaaatgcaaaaccttccttgtgttttttctattttgcaatataataatactattactatttttatttccactcaatatttcttaaaagggagtttcgcatgaagaaaaaaacaaagctactcttaaaccttgctctgaccctgttttttgcggtcatgatcattgtcaagggccccaacttaaatccgctgtattcagacggcgcatttgcctggtgttttatattcagcgcctacgtcgtcttaaatttcctgatcgggctcggcggaatccgtattaccacggatcaggcttctcatatgtccgtcagtgtggacaagaacgtcaagggaattaaaacaggatttacgctgctcattattttctgggtgctgtattttgcagctacggttatatccatgcctctgtttaattacaaggcctaccgtgaccagctgggacagccggagatttcagaattcaccgacaccgtgcagccgctggccttaaaccagcttccggtcgtggataaggctctggcaagggaactggccgataagaaggtcggtgaaaaccccggactgggaagccaggtcgtactgggcacaccggtcatccagaaggtcaatgataagctggtatgggttgtaccgctggagcactccggtttcttcaaatggttaaagaatctggacggttccgccggatacattgtcgtttccgcaaccgatgtcagcgatgtagatctggtgacagaccacaagatcaagtatcaggagaatgcctatctgctggatgacttaaaccgtcacgttcgcctgtttgaaggcggtctcttccggggtatgacagattactccttcgagctggatgatgacggtgttccgtactgggtcatcaccacctataagaaccgctggctgttcagcctgcccgaagcaagcggagtggcgatcgtcaacgccaccaccggtgagaccaactactacgatatcgatcatctgccggaatgggtcgaccgtgttcagccggaagcgttcatcatgcagcagattcagaatcagggcgcatacgttcacggcatattcaacttctccaaccaggataagttccgtaccagccagggcaatatcatcgtttacaacggttctgactgctacctcttcacaggactcaccagcgtgggctccgacgaatcggccatcggcttcatcatggtggacatggtgacaaaggagccgaagatgtaccagatgagcggtgccacggagatggcggcccagcagtccgcccagggtaaggtacagcagtatggctataccgcctccttcccgatgattatcaatctggatggaaaagccacgtatttcatgacactgaaggacagagcgggtctgatcaaacagtacgcattcgtctctgtatccaactatacaaatgtaggtaccggggagaccattgacagtgctcttcggaatttcaggcaggtaatgggaagcagcaacgacggcatcataaccggtcagggtgcgaaggaagcggaaggaaaggtctaccggatcgccagcgaggcactgggtgagagtatcacctacaagctgatcctgaaggaaaaaccgaaccagatcttcaccatttcctacgatctgagcaatgaactggccctcacagagcctggtgaccgtgtaaagatcagctatatggcaagcggtaccggaatctgcatcgccaccgcattcgacaatctggagtttaaacagatatccgaagatgaagaaacagctccggctgaaccgcctgttcctttaccaccatcttcaccgggcagtgaggtgccggatggagatgaagccgaaggctccagcggcattcagaacagggatgaacctgcggcggctgagagcagcgaggccatggaatcgggaaacagtgcagaataagattgtacaggacaggttcattttaaaattataaggtaaaaaaagctttggaattactgtcggcagtagttccaaagcttttttaatttccttgtttattctgcggttccctgccgcccatccatgtcattcccagaatcagcacggctccggccatctgtggaccgctcatggtctctccgaggatcacggcagataagataatcgccgtcaccggatcgatatagcttaaaactgcaacggtctgcgcaggcagcttcttcatggccgaaaaataaagaagatatcccactccggtatgcacaatcccgacaaatgccagcagaatccaggagaccgccgggaccgacgaaaggaccgccgagaacggctcagccgaagtcaacagtgtataaggaagcagaatgactgccgccacccccagctgtgcagcggtggtctccaggccggtcagtcctttcataaatttattaagtatcataacactggcatagagaaccgccgccatcaggccgaagaatatgccaatcaggccattttccccctgatccagaaatagtacattggataccagtatcattccaatgaccgctcctgccgcgcagcagagctttctcttagtcagtttctcccccagcacaaccggagacaccagaatcacaaacaccggcgcgaaataatagctgagcgtcgcgcaggacaccgtcgtatagcgatacgcctcaaacagaaaaatccagttaaatccgattgccgctcccgataaaaccagcaccagccagttgctcttaaccgccttccagttaaccggctgtttcatcagactccccgccgttaccagaaagaagcagccaatcactccccgcaccagtgcgatcacactggaggggagcgcgattccccgtacaaacagcccgatgcttccaaacatcagcatggccgcgatcacatttacctttgctttcatactttaacccattcctttgttaaactacgattaactttagttgtttttccggggaatgtcaacctttttcaaatacaaaacaggcgccactccaaatatccggcagtggcgcctgtcctcatctcttacttttgtctttgcataccgcttaaatcagcttcagcttcttcatggcatactcaattccgtcatcctccacattctttgtaaagaacgtggcatacggttccagttccacatcatggtgtcccatcagaatacagttcttcgcatgttcaaacataggaagatcattggtgctgtcaccgaacacataagcatcctccagcgctatcccgtatttctcaagaaccacatcgatagcagtcgccttggaataatccgccggaacacattcgtagaatccgtctccgcggtcaatgatgttgtattccagtcccagagcccttgaaaatccggccagatcgctctgctcatctgcaaacacacagaacttatcaaaatcaaagcagtcgtcttcccaggtataaggagccccatggccgtctctctcgatattctcccgaatctgctccagctgggtaaatctggttctttcttttctgaaatagcagtgctccgtgccttccagaattcctcccagattgtattttataatatctttcttaatctgaagaccgcgttcatgaggaatggtaaaggagaacagcacttcatctcccacgatcaccctcgtgccgcatccgcagcagtagccgtccacttcaaccaggtccctgatcgggccgatcaggctgtatgtacggccggaattgataaataccagatgtccggccgcccgtgctcccgcaacagccttcctggcactctccggtacattccggttcacttccgagagaagcgttccatctatatcaaaaaataatgcctttctgttacttgtcattcatcaccccgaaaacggatactgcccgttttttcatccatgctttctacgattgcaagggattcgacacggattccatctgcgcgcaggcggtctcctccaggctgaaaccctttctcgatcacaatcccggcaccgatcaattccgctcccgaatccttcaccacagctgccaggccctctaaagccttgccgttagccaggaaatcatcgatcagcagcaccttgtctccggcacctaaaaactctttggcaaccatgatatcatagacttttccatgtgtaaaagattccaccttggtggtgtagacatctccggcgatattcttcgtcttggacttcttcgcaaaaactaccggaacatcgaaatactgggcaacaatacatgcgatgccgattccggatgcctcaattgtaaggatcttattgatgtcagcatcagaaaagcgtcttttaaactcctttccgatctcttcgaacagcttaatatccatctgatggtttaaaaagctgtctaccttcaatacatcgccggatttaatctttccgtctttccgtatcctgtcctttaaaagctgcataaaggttccccctactcgtaaaattattttatttgattactgcattatcaactaaaaatttcatggtcttggtagaaatcagataatcgtccacattgtaagctccggctgactcaatcatctgatccttactctcgtatcccatctcagcggcaagattatcacggtcttcatccgatacggtaatgccttccttatccgcaatcgcatggaataccagtctctgctcaaccgcagacttagcgatattcttcacgtagttttctttaaaggtctcctcatccacaccgtaaaatgcagatgtaaatgtatttaaatcaatcccatacattgcggcctgattcgtataattaagcagatagttattgaagttcgcatcaacagcttcctgtgtcgtctcaatctggctgttttcaacgactgctttcaggatatcattctcaacagcggcctgcgcctgtccttccttctgctccagaatggtctgctttttactctccttgtattcatcaaccgtcttgaaatcagatacttcctgaacgaacgcgtcgtctaattccggcatgttcttttcctgtacgttgttgacggttaccttaaattccacagcctgaccggctaagtcagcattgccgtagttttccgggaaggttaagtcgagcgttacttcatcgcccttcttcgcaccgatcagtccgctctcaaagccgtcgataaactggccggagccaatcacaagatcctgtccctgtgcagtaccgccgtcaaatgccacgccgtccttcgttccaacgtaatcgatatttaccttatccgtatcctgaacggcacggtctacatcatcgtaggtggtcttgctctcacgctctgataagattgccgcgtctacttcttcatcagatacttccaccggtgtcttggtcacttcaatgcccttatattcgccgagtgtcacggtaccgttatcaattccggataaatccatcatctccagctgttcagatgcttccgtctctgaacctgcctctgcagtagtctccgtggtagtttccgcaggtgtcgtctcttctgccgccttcttggagcagccagtcacaactgccgccataatcagtccgcaggcagcaacttttaaaaattttctcataatacgttccttttcctttaatcaaaataataaaaatataaaatgcttcctgacagttataccatatcggagcatgtaaaaaaagctttttaccgaaattaacaaaaatttcagaataggcggttactgttcacagagttttaggaagccctgtaaaatgccagaaaggccttgtatgtattgtatacatccagcttggaggccagttcaaacggagaatgcatggaaagaatcggcactcccaaatcaaccacatctacattcatatgagccacatactgggcaatcgttccgccgccgcccacatcgaccgcgccaagctcgccgatctgccagtacacgccttcctgatccatcatggcgataacctttgccatcacttcagcgctggcatcattggaagaagactttccacggcttcctgtatacttcgtcagtacacagcccttatttaagaagcaggaattccgctcctcatagacttccgggaacgtcggatcataagctgcatttacatcggaggataaacagatggaattcttcagcgcgcgcttcacatccgctccctgcgtctctgccagttcctccacataatgaagcacataatcggaattcagtcccgtatttcccacggaaccgatctcttccttgtctgtcagaatcgtcaccgtcgtataaaccggattcttcgtttccacttccgccataagcgccgtataggcacacaccctgtcatcctgtccataagcgccgatcatgctgcggtccagacctacatcgctggccttatgagccggaaccagctcgatctctgcacggaagaaatcagcctcggtaattccatagcgctcatttaacagctgaagcgccaggagcttaaccggctccttgattttggcttcatcaacatagggaatggaaccgatgattacattcagttcttcgcccttcagcccatcctttaaggggcgcatattctgatcggccgccagatgagggagtaaatcagtcacacagaagaccggatcaccttcctgctcgccgatattcacttctactatctcaccgtttttcttcacgatcactccatgcatggataacggagtggctccccactggtatttacggatcccgccataatagtgagtcttaaaatacgccagatccttcttttcataaacaggattcggcttcaaatcgagacgcggagaatcgatatgcgctccattgaaacgaagcccctcttccacggatttgctgccaaaggtagtcgctatcactgcttttttccggttcaccatgtataccttgtctccagccgcatacttcttgccggcttcgaaaggctcataacctgccgcttccagtattttaacggcttcctttacacattcccgctctgtttttcccttatccagaaatgctttatagcctgcacagaacatctctgcagcctctctctgttccggtgcttcctttgcaatattggggaattcccaggttaattcttctgctaaaagttctcctttagtcttttccatcgtgtcaataacctccatatttgtctattgtactattcgtttattaaagttcttcgctgtcgagtaccagggtaaacggtccgtcattttccagatcaatgatcatgtgtgcaccgaagcttccatgttccaccatctgtacgcgctcgcggcaccgtgaaatcacatattcatacagttcctccgccagcttcgggcctccagcctttataaagctgggacggttaccttttttacagtcggcatacagcgtaaactggcttaccaccagtagcgctccgccgacatccgccagcgaaagatttgtctttccattctcatcttcaaagatacgcagtttgcatatcttatccaccatccggtccgccgtctgctctgtgtccgtatccgaaacacccagcagaagcagaaatccttttccgatggcgccaatcacttccccatccacggacaccgccgcgcgggacactctctgcagtaccaccttcatgtcgttcactcctgtctattggcagcagtttcctgaactgctgcgtctattttaataccagccggagatattcaaacagcgtctccgtcgctctttcccgatagacaatctctctcgccagtaccgggtaatccgtaatgatgttgtcaactcccagcatcttcatccgctccatctcactcttgttgttcacggtccatgcatggatcgcttttcctttttcatgggcggcttccaccagctttccgctgacaaagctggagcggatactgataaaatccacatcatcatccgagtaataatcgccgtatgcggcagaaataatatatccggttcgtatatccggatccaattccttcaccctggacagataggagaggcgcgtggacgtcaccacacactgttccttcatctgatggtccgtaattaactgcaccactttatccggcagcggactgtccttccccagatttttaatttcaatattcatcttaatccggcccttgcagtaatccataacctctgtaagcgtcggaatcctctccccttcaaactccctggaaaaccatttgcccacatccagatcctgcagatccttcagcgtataggagccaatcgtccggttcacacctgccacccgcttcaatgtggagtcatggcccagaaccaccacgccgtcagccgtctcctgcacatcgatctccacaaaatcggccatattctccacggccagttccatcgccgccatggtattctccggtgcagatttagagctgccacggtgcgcggtaatctgaatctccgtcaggatatcgtctgtaatggcggaaccatttctcacaaggttgaagagaaagaagaggctgagcgctgccgccacagccactcccgcgcccaggatccgtccgcggaacgattttctggagggataggaaaaatcccaccggggttcccggctcagccggttgctgtattggtaatactgaacgctgagcgccgcaaaattccccagggccagccccatgctggccaggaagataagcaccagctcgatcctgtctccaaccgccggcagtatggccagcgccaggcggttgtccgtaaacaggctcataccaaccgccgctaccaggatacagaaaatatagatcacatgaagcagtagaatcagtccggcataatatccgcccagcaaaaccaccgtgtttgccaaatgccccttcagcagcctccggcttcgcctgtatccatcccggaaattcttctgttcgatcatacaggcgtgaaaggtgtacagccccggtacaacggccaggaggatgagcaccaccgcagcacagactgccagccgtcccgcgttctgcctcatcagttccgacatgacaaaattcagcggcttaacatgggttaaaacccggtagatcagatacagattggagatcccgtaatcagccagtatcaggagacccagcttccagtttttcttcttaacctcatcagacagcttcgataagccgcctaaaaagatctctcccacacggagcttcctgaaatacgccgccccctgaaacagggtcagcagacagccggtctccagcgcgagaaagaggacaccaacaatccctatcagaagaatcatcaggatcgtccccggcttcagcaggaaataaccgaaattgcccgcagttaaatagctgtatccggccatctttagggaccactttaaccccttattaagcagaaagagataaagcggcccggtgagcaggcggtacaggacttcaaaaagcaatgcattcttctgattaaatttaagaatctggcatgtttccttcgtcaacgtcctcatatacaaccttcttctacagggttattcgttccattcactgtcctgttaaaaagcagcccgaacggatggaatccgctctggctgcccacgttctacggtaattcttcctctgccacttcctcgtcatcgggcatctcctgatcctgcatccgctgtgcctcagcaagttccagaatagcctgattaagggaaaacatctttacatccagcatattcaccacgtctgcacaggcctttaactcctgctgtaaatacgccggggcatttccttcaaatttgtaataaatcttatgttccagacttgcccagaaatccatggcaatcgttctgatctgaatctccacctttgtatcgacaggcccgtcagtcagatatatgggaatcgtcaccaccatgtgatagctcttatagccattgggcttgggattcttaatgtaatcttttacatagagcaccgtaacatcgctctgtttcgtaatcatctcagcaatctgataaatatctgatgtaaaggaacagataatcctgattcccgcgatatcgcttaacttttccaccatgttgtcgatcgtcacttcaaatccgtagcgcttcagcttcttaacgatgctgtccggcgtcttaaggcgggacttgatgtgttcaatcggattgtaattgtagatgtgcacaaactcattattgagtatctcaatcttcgtattgatttcttttaatgccgagtcatacaaaaacatcacagatttccactggtcaacctggttaaatgaattgggaatattcatcttcattcctcccttcctcaccacgtgtccgcattctagtcagtccgggcagagccgcgtcaaaacgcctctgcccgttagaattagtataccatagaaacccggcattttatattctttttcctgactttctaaaattttaatccttttaacagtgcgcccaggcctgtagtcacttctccgtcgcccttgtaatcaaatccttccaggtcgatttcctcatccggttcaagagccttcatgcttaagctgatcttattgtccttgatggagataatcttcacttttacagtctggccttcctttaagacagctcccggatgcttgattctctgattgctgatctgtgaaatgtgcagaagtccggataagccattttccaggttgataaacgcgccatactcttttaacgtatctacggttccatccataacggcgcccacctcgcacctggcaatcttcttattcttttcttcctgaagctttgcacgcgcaggttctttaccggaaagcaccagtttcttcgcttccgcatcggcggtaatgacagtggcttctatcgtctttccattatattcctctaagttctcaacatattccgccgcaagcttggaagccggaataaatgctctgacgccctcgagataggcaaccgctccgcctttgacgatctcggcgatcttaacgtttacaatagtgcggtcagccatcatcgcggcaaacttatcccataaccggttctcattggcctccttcatggaaagctcgatattgccctccccgtcgtcggtgctgatgaccgtggctgtaatctcatcgccaggatggatctccgcctgaagctggtaatcaggatcaccgttgatgttctctttgttgatgactccgcctgcgtagtactttaaatcaacaagaacctgatcttctgtcactcctgctaccgttccggtcaggatatcgccttccttaacgcgtttgaaggaagcttccagttctttggcatagtcttccatagtctcaacgcgggcttccggctggggagccggggtctccgtctccagggctgccgcctcctctgatgcggtccctgcagtgtccactactgcgtctgctgtttcagtcactgcatccgctgctgcagcctgctccaaaatttcatttctttcttcactcatgtttctctcctccagtgtgttagattatatgtaaatttaatgattttcttttacagtataccataaacaggggattcgtggaagccctgcctttactgcaaatttcttaaatattggttaaatatccggcaattgcaaaaacaggcatttttcggactgaaaaacccgggaaccatatttcttcccgggcattttatcttgatcggcggagcttaaaacaggccgttttgatcaggcacgtactgtacgttttcttaaaaaccatctctgaggatcacgaatctgtatctgataacagagccataatggtatacatgccgcgatccaggccagcggactcgccatacaaatcgccatatatccccattttccagtcagtgtaaaggcgatgattgttctcaccaccatctcagccacaccacacagcattggcagaattccattgccaagcccctgaaggacattgcggtataaaaacaggaacgccaaaaatacgaaataccatgaaatcgtatgcagataagttgtcgcatacgccagcacctcctcagatgggttggatataaaccagcggacaatgctttcgccgcacacggccgagacaaacactgcaacacctaccgctcccagtacaattatgtaggactggcgtaccccttctttcacccggtcaaaccgtccggctcccatattttgtccgcaatacgtcgccatcgccgcccccagcgtaatcatgatctgtgtagacaggttctccaccttagaagctgctgtgtaggaagccaccacggtggagccgaaatcattgattgcactctgcaatatcataacgccaacagcagtaatggaaaattgaagcgccatgggaaggccaacactgaacatctgaactaccgtataccaccggcatcggaaatctgatttttccagtctcagcatcggaaactttttaaacatataaatcaggcacagcactgctgaaactccctgagcgattaccgtagccagcccggcaccggccacccccatatggaaggtgataacaaacaacagatcgagcactacatttaaaagagaggacacaatcaggaaatagagcggcgtcctgctgtcccccacgcctctgagtatgcaggaaagcacattataataaagcgttgcgcccagaccgccgtaaattatcattaaataagaagaagcaccatccataatattttcaggcgttctcatgaggtgcagaagcggctccgttgtcaccatggtcactccggttaaaaccaccattaccacagcgctgagcatcagtgccacagcgacgtagtttcgcagacgctttttatctcctgctccaaatgcctgggatatcataaccccaaacccgctggcaattccgttgcagaaaccgatgacaagaaataccatggagccggtcgcgcccacggctgccagcgcttcctctccgataaactgccctactataatggaatccaccatattataaaactgctgaaaaatattaccgatcagcagtggaatggaaaaagccagaatcagcttcagcggctttccctgtgtcatatcctttgtcatttttctatactcctcatctcacaattcaactactaaaatcaactatataatctatcacatctgttctgtgattaccagtgatttcttcagaaatgggggaataaccaaaaataaaaagcgtccgcccggcagactgtacattctgccgggcggacgccgctttactgcttattcatctgtttcttaattacttgttttcttcctttttcttattattcagcattgagaatgccgccaacaagaatccggaaagaattgctgctaatcctgcctgtgcacctgcgcggtcgccagtctttggaagacctgccaacggcacattgccatcgtcaatcaggattaagttgtctgtcggactgccatcaaccggtgcattggctaacggaactgcgtccggatcgatggttacggtaggaccattgttgtccccaggacctcctggctggtatggtttgttttcattcggtgtgctgccaccgccgttaccacccgggttgccgccgctattgccacccactgatgtcacggttaatacgccatcaatataggttattgcatagtttgcagtaacatccgtattaccggatttaatcattgcattgcttgcaacattggcactggttcctgtcgatctctgagctcctgttaccgttacgctttcaagtgtctggccttccgccagtgttccacccgtaatcgttgctgtcggggcagttaaatcagttccatcataacgtttctcagcactgtcggcagtgattgtaatttcacgtttgctgattactacggttccttctgctacctgagtctcgttataattcggatttgtggcttttacatatacggtataggtaccggcttcggtgaaggttggggctgtttcactccaatccgtctggttcgtagaataaagaatcgtggaaccattctgcactgcgctggcatctacgccatatgctttgccatcgtaagttgctgtagtacctgttataaatactttgtttgtgtcagctgatgttatttcaaatactgcattatcgtaagttattgaatagtttggattacttccaaggatcacttcaattgggtaagttccaacatcttctccagctacacgattcagattataatttaatttctcacctgttacaatacctgttacagaagccatcaattcaggatctgctgtgccaaataccttgccattgtttgatgcctggatatgggcaggacgctgagttatcataaatattacatctgccatagcggtgttactgtagttcgggttcgtcgcccttacataaaccggatatccgtcttcctggtattccgtaaactgcgggattgttccgctccagctctctccatctgttgaatactcgatggtcgttccctttgcatcacttgcttccgctgccttgattccgtggccagctccatcgtatacatggcttaggctttctgcatcgactgtgactttaaggccgtctttcctcttaactgtcagctttccgtcttcgaggcttaccgcatagttctttgtgacatcagcttctccagacagtatcctgacactgttctcttccacacttaccgtctgctctccggcttccgtcctcgtattatttttcaggactgcacttaccttatggtcttttaaagctccggctgtgttttcttcgtttgataccgtataagtgaattctgttactgccttctcacttccgtcgtactctgtttccagtattcccgccgctactttaatcgggcgcttggtgattctgaaaaccacgtctgcttctgccacgttgctgtagttatcatttttcgcccttacatgcaccgggtacccttcttcacggtattccgtaaactgcgggattgttccgctccagctctctccatctgttgaatactcgatggtcgttccctttgcatcacttgcttccgccgctttgattccgtggcctgctccatcgtatacatggcttaagctttctgcatcgactgtgactttaaggccgcccttctggttcactgtcagctttccgtcttcgaggcttactgcatagttctttgtgacatccgcttctcctgacagtatcctgacgctgttctcttccacacttaccgtctgctctccggcttccgtcctcgtattatttttcaggactgcacttaccttatggtcttttaaagctccggctgtgttttcttcgtttgataccgtataagtgaattctgttactgccttctcacttccgtcgtactctgtttccagaattcccgccgctactttaatcgggcgcttggtgattctgaagaccacgtctgcttctgccacgttgctgtagttatcatttttcgcccttacatgcaccgggtacccttcttcacggtattccgtaaactgcgggattgttccgctccagctctctccatctgttgagtattcaatggtcgttccctttgcatcacttgcttccgctgctttgattccgtggcctgctccatcgtacacatgactcaagctttctgcatcgactgtgactttaagatcacccttctgattaattatcagctttccgtctccgaggcttaccgcatagttctttgtgacatcggttctgcctgacagtatccggacgcttccgtcttctatgcttaccgtctgctcccctgcgtctgtcctcttactgttcaacagctttgctgtcacggtatggcctgccagtacaccttctgcattttcactgtctgcttccgtatagcggatttctgttacttccttctcgcttccgtcatactcagctgtcttgattccggctgatacagttaccggacgttttgttatgttaaacacgacctcggctgttgctgtgttgctgtaattatcattcgtcgcccttacataaaccggatatccgccttcctggtattccgtaaactgcgggattgttccgctccagctctcaccatctgttgaatactcgatggtcgttccctttgcatcacttgcttccgccgctttgattccgtggcctgctccgtcgtatacatggcttaagctttctgcatcgactgtgactttaagatcacccttctgactaattgtcagctttccgtctccgaggcttaccgcatagttctttgtgacatcggttctgcccgacagtatcctgacgcttccgccttctatgcttactgcctgctcccctgcgtctgtcctcttattgttcaacagctttgctgtcacggtatggcctgccagtacaccttctgcattttcactgtctgcttccgtatagcggatttctgttacttccttctcgcttccgtcatactcagctgtcttgattccggctgatacagttaccggacgttttgttatgttaaacacgacctcggctgttgctgtgttgctgtaattatcattcgtcgcccttacataaaccggatatccgccttcctggtattccgtaaactgcgggattgttccgctccagctctcaccatctgttgaatactcgatggtcgttccctttgcatcacttgcttccgccgctttgattccgtggcctgctccgtcgtatacatggcttaggctttctgcatcgactgtgactttaaggccgtctttcctcttaactgtcagctttccgtcttcgagacttactgcatagttctttgtgacatcagcttccccagacagtatcctgacgctgttctcttccacacttaccgtctgttctccggcttccgtcctcgtattatttttcaggactgcacttaccttatggtcttttaaagctccggctgtgttttctgtgtttgataccgtataagtgaattctgttactgccttctcacttccgtcgtactctgtttccagaattcccgccgctactttaatcgggcgcttggtaattctgaagaccacgtctgcttctgccacattactgtagttatcatttttcgcccttacatgcaccgggtacccttcttcacggtattccgtaaactgcgggattgttccgctccagctctctccatctgttgaatactcgatggtcgttccctttgcatcacttgcttccgctgctttgattccatggcctgctccatcatacacatggctcaagctttctgcatcgactgtgactttaaggccgcctattttgtgaattatcagctttccgtctccgaggcttaccgcataattctccgttacattctttcctcctgacagaattgtaacgcttccttctttgatttttacgatctgttctccagcatctgttctcttattattctccaactccgctttcgctgtatgatccggaagaataccttccgtattagtcccatttgctggctctgccttaatttctgttacttttttctcacttccatcataggcaaaagtctcagttccggctgatacagttactggacgttttgttatgttaaatacaacttctgcttctgctgtattactgtaattcagattctttgccctgacatagactggatatccgccttctttatattccgtaaactgcgggattgtttcgctccaggttctgccgttagtggaatactcaatggtcgttccctttgcatcacttgcttccgccgctttgattccgtggcctgctccatcgtacacatggcttaagctttctgcatcgactgtgactttaagatcacccttctgactaattgtcagctttccgtctccaaggcttaccgcatagttctttgtgacatcggttctgcccgacagtatcctgacgcttccgccttctatgcttactgtctgctcccctgcgtctgtcctcttactgttcaacagctttgctgtcacggtatggcctgccagtacaccttctgcattttcactgtctgcttccgtatagcggatttctgttacttccttctcgcttccgtcatactcagctgtcttgattccggctgatacagttaccggacgttttgttatgttaaacacgacctcggctgttgctgtgttgctgtaattatcattcgtcgcccttacataaaccggatatccgccttcctggtattccgtaaactgcgggattgttccgctccagctctcaccatctgttgagtactcaatcgtcgttccctttgcatcacttgcttccgctgccttgattccgtggcctgctccgtcgtatacatggcttaggctttctgcatcaactgtgactttaaggccgtctttcctcttaactgtcagcttcccgtcttcgaggcttactgcatagttctttgttacatcagtttctcccgacagtatcctgacgctgttctcttccacacttaccgtctgttctccagcttccgtcctcttattatttttcaggactgcacttaccttatggtcttttaacgctccggctgtgttttctgtgtttgataccgtataagtgaattctgttactgccttctcacttccgtcatactctgtttccagaattcccgccgctactttaatcgggcgcttggtgattctgaagaccacgtctgcttctgccacgttgctgtagttatcatttttcgcccttacatgcaccgggtacccttcttcacggtattccgtaaactgtgggattgttccgctccagctctcaccatctgttgaatactcgatggtcgttccctttgcatcacttgcttccgccgctttgattccgtggcctgctccgtcgtatacatggcttaggctttctgcatcgactgtgactttaaggccgtctttcctcttaactgtcagctttccgtcttcgagacttactgcatagttctttgtgacatcagcttccccagacagtatcctgacgctgttctcttccacacttaccgtctgttctccggcttccgtcctcgtattatttttcaggactgcacttaccttatggtcttttaaagctccggctgtgttttctgtgtttgataccgtataagtgaattctgttactgccttctcacttccgtcgtactctgtttccagaattcccgccgctactttaatcgggcgcttggtaattctgaagaccacgtctgcttctgccacattactgtagttatcatttttcgcccttacatgcaccgggtacccttcttcacggtattccgtaaactgcgggattgttccgctccagctctctccatctgttgaatactcgatggtcgttccctttgcatcacttgcttccgctgctttgattccatggcctgctccatcatacacatggcttaggctttctgcatcgactgtgactctaaggccacccttctgattaattatcagctttccgtctccaaggcttaccgcataattctccgttacattctttcttcctgacagaattgtaacgcttccttctttgatttttacgatctgttctccagcatctgttctcttattattctccaactccgctttcgctgtatgatccggaagaataccttccgtattagttccatttacttgctctgccttaatttctgttacttttttctcagttccatcatagtcaaaagtctcagtttcggctgatacagttactggacgttttgttatgttaaatacaacttctgcttctgctgtattactgtaattcagattctttgccctgacatagactggatatccgccttctttatattccgtaaactgcgggattgttccgctccaggttctgccgttagtggaatactcaatggtcgttccctttgtgtcacttgcttcggccgctttgattccatggcctgctccgtcgtatacatggcttaagctttctgcatcgactgtgattttaaggtcatctctcttactaattatcaacagtcccgtttcgagacttactacataattccccgttacattagtttctcctgacaatatccttacgctgttctctactactcttaccacctgatctccggcttcagttctcttattattttccagaactgcacttaccttatgatcctctaaagctccggctgtattatcttcattcgatacagtataagtaaattttgttacttccttctcacttccgtcatatttttctgtcagcgatcccgcataaacagtaattggacgttttgaaataactgccctgattacagtttccgtatctttaaacttatcctttttagccttaattctaattgaatattctccagcctcaatttccgtaggattttttgaggccttgtaatttccaattacattatttgtaatcttcgctatttcataagtataagtaggcgttatttctgctccgcttccatcgatttgagtcgtcagactttcaattaaattttgtaattctccattataaatccgattagcacctgtcgctttaatactcattgtcgagtcaaaataaatctgatatcttgtctcgtatcctgcacgcagctttacattttttagtgattcatggccaccagatgtatatagagtctcccagtcttttttgccatttggtaaatcgatttcttgaactatatcaaacgatttataagataaattatcccaccccgtattatcactatagatttttaacatctgatccgccaaatctttgatttcattttcactatacggaaccgatgtgttattactggccataccattccaggataatttagtaatccattcatcatcactcgtttgataattattccgattctgatcattgatcaaatcagtaatttgaattccattaaaccaaacggtataagctgccctttttgtataggttacatagatagtatccatgttttcattaaacactttaggattatttctatctattataagtttcaagtcatagtcttgaatacttttttctggtatgtcatatacagtaccaaaagtacctgtcaatttctctgattttatcaactcttcagcagtactataatcagcatcatcagatacatactctacatattttacctcaacagacaaattggtcttcctatcataataaagctttatgacaagacttccatctccagcaataatcggagaagactgtaattgtggtgtttttccaacaaagtactcatctttatctttctgatactcaaaaccatcaaaattctcagcatttatctgtactctttctcctgtttttccttttccacttccctctttaacttttgtatattgagcttctgctcccggcagattctcctggtaatattctatcttataatttgcatcctcactctttgtttttacatatacatcaatattttctttgatatttgacatcgtataactcgtagcatctgatgcaacttttactggtacatgattaactgtaacttctgatatactataaccttcatctatagtccagcttcctgtggcattactaccccagtcaacataaataggtgagtcactggttatatttacatgatcatctcctgctattgctatcgtatactgtaatttaaagtataccttcaataccagctttccatcgccgcttatcgttccctgccaattttttatctgtgaattatccaggatataaccggctttttctgcgactttgtcatcttcggctatttcaactaatgtcccggtaactcctgtacgtgtatcatcacgcagctttgtatcttctacaaatttaccattatccgaattttgataataatatgcaacactatattttgtattcttatcaggagtccactgtgcatacagaatattatctcctgctaacaatttatactgtgaacctggagcataataggttccggtaccctctcgctcagtattccaccctgaaaaagaatagccagctcttgtaaaagtattggaggcaactgttacatttttattaacactgcctttcgttggtgtcattacacctataccgccatttgcatcatatgcaagctgtcctggctttaatacttgaacatatcggccataaaatgtagtattttctgtaatacgaccttctgtaaacgacgctttaaccgtacactctttatctttataccaaccatcaaatttatattgatctccgtctacagttttatccgctactacaggtacatttaaatcctttatatttgtattcttttttatgattattggatacgattcaactggtctaaagttctcatctccgacctcttgaacatcaaagctcaccgtacaattcgtctcttctactaaaactgcataaccatcaacgtgataacaaggcccgatatcatatgcattattacctatgttataaccatcactacgtattatataggaccaattaacagtatatgtgccttcaccgccatcttcatcatatacgtaagacttacccgcttttgtaataacaggatatgattttggaaacaattttatattgctaacatcaaattttgtattacccgcaacataataggggttgggtaagtttataacggtacctgtatttgaatattcccatgtaaccgtatatttttgatctatagagctatctggcctccaaatataaaaatacgctgttgtatcatttgtaactataaccttaaatgtttcctgactcccccttttaatggtagcttcaccattactcactccggatatggaaactgaatttccattattacttccattaatctttgctacaccagaattgcttgatttccatgttccaaagcctaattcggagtgtagtgtaatggtctcacccttgttgatcgtaacctctttatatactttcttggctgcaattattgcatatatagaaaaatgacttgcatcgaaagagatatctgatacgctcttatctcccgaaatatcaacagcttcagaaacagtttctaccccctgtacctgatccgctgctactaccttaatacttctttgtgtaacatcaatagaacctgtatctacgtgtacaatctctaagctttcagcttccgcactcttctcttcaatcgccttacctgcaaatgtaacctcaacgtatccattttcactccagctattatccagagcctccagttcacccgcttcattctctacgaataacttaatatcataagcaagcaccgtattggcagaagtatcctcaccagtctcctctgccgtcttttccttaacagcctcctcaaccttctccgtaacttccgtcaccttagcctcagtccctgccggaagaatgccttcctctgcatgaagactcaccacaacgtcacccagagtcttactgaaattaaattccggatgctccccggtctccgccatagtcacaacgatttcctgctcttcctcaacttccggaacaacaaaccgtttcacgcctgtctctgcattagaatccgttgcatcatcctcttcaactgcttcaaggctctccccgtttgcagttacgctgtcaatcacatagccaacctgaggctttactgtaaatgttaaatcttttcctgcttctacattcttagcgccctttacagcagccgtaccaaccggtgtaaccgtataagtaacagcgtagccttctttggacacatcaacatgcagcttatttaaagtggtaacataggccttcgcataataagactcatctaatactatctgaccatatgtcttgccgctggtggttcctgttttggatacttcttctttttcttcctcatcttcaggctctactgccagagtattatcattctttccgccgtctgcgtttactccatgatcatttccagctgcatttgtatcgtctgctttgctgtccgctgcagcgttcttatctgcgtcatccttgacgttatcatcgattaccgcgttatcctgattatcagccggtgcagtaatttcgccctggccatccgcctgatcgtcagaagaattctgttcttctccatcggccggtatcacagcgtctgccttatctccatcatcaaccgtattactttctacatcatcagccggagccgccgctgcttccttattatcactgtcactgctgttgctgtcttcagtatctgctttaacctcttctgcatccttcttttctccggcatccgccttctctttggaatcaccggaatcagctgaaacaacttctttctcttcgtttctctcatcagaagatgctttctcatcacttcccgcctcattgttcacagaggttgtcagaatatgagtataattacggatcacggaagccgcagaaactacagcgtctccactactggaggctccactgtcagatgacccactgtcggaagatccactgtcagatgccccgcttccagcattcccttcgtcagaagacgcattggaaccgcccttgtcatcatttgaagactgcttatctgctccggcttctgatttctggccttcttcggtcttgccgttctcagagttctgtccattatcggatgaaccagaatgatcagccggattctggatctgctcatcttttcctgtatttgcattcttatcgctgtccacattggcatccggattctggatatcacttccagccgtaccgctgccattatttccattgatctccggatttcctgttgtttcaccagcagttccgttaccttcatctgcattccctgccggattctgaatatcacttccggttgtgccattgtcagttccgtcatttacgccggcatctggattttccacggttccgtcagtcgttccgtttccttcgcctgcatttgcgtccggattctgtacgcttccatccgcagcatcgctttccggattctgtacatttccttcaacggttccattttccccgcctgcattctcatccgggttctgtacttcgccgcctgccgcgccgtttgtacctgcgccggcaccaccagctgctcctgcgccatctgaaggcacggtcggtccagctgcttctaataaagtggaattcccctttactgtaaccttctgtgtcgtataaccgtcaattctggagcggaaggtcactctcgcactggaatcattgatatacaggaaaatgatatcctcatcgcctgtaatctgatatccttccggatctccattgatacggataaacatacgcagttctgctccatctgcatattcctcctcatccatatcataagccggtgcaaactcaaacacagaacctgtttcaaacagtctctggtattcctttgcaaggcttcggtcggacgtatccacaccgagatcctcaaaattaaattcatcgccattgtcaatggctgcctgagcggaatccctcaaatcttccccgctcatcacaaatgtggcattctctttctcaaaagcagacgccacatccgcccatgataccatgttaaaagaagtcattgtaagaacaaatgacagaaatcctgccagacctcttctaaactttttctttaaccctttcatagtttcccctctcttacccttccattagggcactctctctataattatttaaatatcgttcttcatataaaattcgtccgtcactgccttccagtgcggaggccatcaggagaaccagttccataaaacttcggaacgcctgtttttcaccggtttctctccagcgtatgacaccctgccaggttgaatgctccctgaacaggatttttatcagaaaggtggcttctttcccgccttcccggtatacggaccacatcttatccggtatgatcctgatatcatcgccctgtcctccggaatcgtcctccttcagacttccaagtccgataaagtgccccatggcatcggccagggctatggttcccgtaaaatcttccagataattgagaaatgcgttctgaacgtttcctgtcagcaatccgccttcgaaagaatctaccgcgatctggcagatattggagctcttttgtaactgctgccgttcgaccggtccgtttaatacctgctcaatccagtaggtcatctgcagaaagctctcaaattcctgtttttcctgtccttccagccagaagatctctccctgccagcttgcattgtatctgaactttacattaagattaaatgtggccagagtaccgttttccagctgatcatattcctggacgggtggtctgggtaacttcgttccgccaaacttccggtaatccatcgttctcttcggatatgccaattcatcaaatatccggttcatgtgaagcatcatctccaggaaattcctgaaccggatccccggtgctgctccttcatgataaatgataccgctcaaacaaccattctcaaatccatttaccgatatcctgaagtaacgggaagagttgcggttcatactcatctttgctatcgtcataactttttctttctcccttagtttagagcctttacgttatctattttcattacattttcttcaaaaaaatatagtttcacccagtgtctgtaaccagtatataccatatcggttacaaattggttacattttgagtttttttgaaaattaattaaaattgtttgtaatgtgtgaccgtaatcataaaaatagttttaaaccgaggtccgcaaacgcaaaaaacgccggaaataccgggagatcacagtctccttaagcatttccggcgcacattttacatcattcattcagttttgttcttacacctggttacacaatcatcgtgtaacctcttattttaattcattaagcatcgattttccaattgttcctttcggcattgtaactccaaaattatccgcgatcgtagctccaattacagcaaaagtatcttctgaggggattcttccgcccccactcatggatggcgaatacgccagaaacggcactttctctttcgtatggtccgtccccgtatacgttggatcgtttccatggtcagccgttaaaatcagcaaatcattctcttttaacttactcagaacgattcccagcttctcgtcaaaccgctcaatctctttcccgtaaccaatcgggtcacggcgatgtccccacagcgcatcgaaatccaccaggtttacaaagcacagcccgtgaaaatccttatccatgacttcgatggtctgctccataccatggacgctgctcttcgacttataagcctccgtaatcccctcgccgtcaaatatatctttaatcttgccaatgcttatcacatcatagcctgctgcctttaaggcatccagagcggtttctccgtaaggctttaacgcataatcatggcggttagaggtccgtttgaactcccctttctttctgcctacatacggccttgcaatcacacgacctaccttccactcatctttcattgtcagctcccgggcaatctcacagcaccggtacaactcatcgagtccaaatgtctcttcatttccgcagatctgaagcacggaatcagcagaagtgtagacaatcatgtcgccggtcgcaatctcgtgttcgccgtactcctccaaaatctctgtcccgctggccgatttgttgcccacgatcttatgtcccgtacgtctctccagttcttcgatcagttccttcggaaatccgtgctctgtaaatgtctgaaacggttttgtaatatgaagtcccatcatctcccagtgcccggtcatggtatccttgccggtactggcttcattcagctctgtataataagcaagaggcttttcggccggctgtacatgggttaacgggtgcagattcgcaattcccattctcgccagattcggtatatgaaaactctccatcctctcatcgatatgtcccagcgtatccgtccccacgtcaccatagtccgccgcattatccatcgctccgatccccagggagtccagcacgatggtaaaaattctgcgatatttttccatattgtatcattctccttttacaactctattagtattgatctgttattggtattatactccataaaaatcaatttataaaaggacaaatgtcttaatgaaatattttttctctaaaatatcaattttcagcacaaaaactctctgtaacacacggtcttttcagtgacaaatctgtttacttttatccaaaatatggtatatttgtaattagaacgattacacttcaggctgacacaaattgtataataaaaaggagaagaggccctggcgggaaccgtgagatttttattctgctcatcgcaacgctggcctccatgtgcttatttatgaaagatattatggatttacacacccataccaccgcaagcggccatgcttacaacacgctttacgagatggcgcggtccgcttcggagaaagggctcacgctgttcggatcgacggaccacgcaccaaagatgcctggcacctgtcacgaattttactttatcaattttaaagtcataccgcgcaccctgttcggcgtaaagatactgatggggtcagaacttaacattctggattacacaggacgcattgatttaagggaaggaattctagaacgtctcgactacaccattgccagcattcacgagccctgttacaaatgcggatccgttgcggaaaataccaatgcctatttaggggccatcaaaaacccttatgtcaaaattatcggccacccggatgacggtcgttttcctgtcgattacgaaaccgtcgtagccgctgccgcggaacatcacacgctgctggagctcaacagcagttcgctgcatccggcgagcacgcggattcatgcgaaagaaaactaccgggttatgctggaattatgtaaacagtacaaggcatctgtcatcatcgacagtgacgcccacattgaggctgacgtgggaaatcataaacttgcctgggagctcatcgacgagaccggctttccggaggagctgattgtaaacggttccctggaccgtctgcttccgtatatccccaggctgaaggagtgcttatgatcaactttctgaatctggaatattttctggccgccgccgaggagctcaacatcacccgggcagcaaaacgcctctatatatcccagcagtcattaagcaatcatatttccaatctggaaaaagagtttgacgtccagctgtttaaccggacgacaccgctgacacttacctatgccggaagagcgctgaagcagcgtgccaagcagcttctggaattaaaggacgagacctaccggcagctggcagacatcaaggattttaccaccggccagatatccatcggagtgtcccacacacggggacgtttcctccttcctgcgattctgccggtctatcgcgaaaaatttccgaacattgagcttcacctggtagagggcaattcatccgagttaagcacttccctgatccgcggcgacatcgacttaatcattgacctgcttccatttaaggcggaaaatgtggagaccgtcaccatctgtgaagaagagattctgctcattgtaccagatcagatcctggaccgctttttccccgaccggcaggaggaagtaaagagtcagctggaagagaatgcggatgtgcgtctcttgaaggattgtccgtatcttcttattaataaaggaaaccgcgttcggacgattgccgatgaaatttttgaagatgcccagattacgccttctatcattctggagacggaaaatatagaaacggtactggccctggcctccaaaggaatgggaatcaccttttatccaaagatgtttatctcagggaccggactcataaccgagatgcccaggaacaaaaagggacttaatttctattccctgcccaaagggcgcacccacgggattctggcttttggttaccacaaaggccgctatctgtctcaggctacggaagaattcatccggatcgccagagaaaacatataaaacgatactaatatagaaaaaaccgcgtatttacctgcatttttggtcttcacggcattgacaatcatcttttggtggtgtattattaaatagtaaccattatcagtatcattactattttaatgcaaaggagctgctatgaagacattgaagtatagccgtcagcgggaatccatcaaatcttgtttgatggccagacatgaccatccgactgccgacgccctatacacatcgatccgcgaagaatatccaaacatcagccttgggactgtctaccgcaatttaaatctgttggtggagttgggggaaattcagaagctaacatgtggagatggggcagatcattttgatgcagacacttcaccgcactatcattttgtttgcagggactgcggccaggtcttcgacctgcctttgaaaaccctggataacattaaccaactggctcaggaatatgcggacggccatgttgacagccataccatctatttctacggtacctgtaaaaattgtttagaaaaaaatttgcaataagtattgacaggagcagaaagatgtgctaaattaatatcagtaatcattactgttattgattacaacaaaacaagtttaaaaaatacaaatatataaaaaagaaaaggagacatgaattatgaagaaatgggtttgtacagtatgcggttatgttcacgaaggagagacagctccggaattttgtccagtatgtaaggtaccggctgagaagttcaaattacaggaagaggatatgacatgggcagctgagcacgaattaggagtagctcagggcgttcgtgaagatatcatcaaagacttaagagcaaacttcgaaggagaatgttccgaggttggtatgtacttagctatgtccagagtcgctttcagagaaggctatccggagattggcatgtactacaagcaggcagctttcgaagaagctgatcacgcttccagattcgctgaattacttggcgagtgcgtaactgcaagcacaaagaagaaccttgaattaagagttgctgctgagaacggcgctaccgcaggtaaggttgacttagcaaaacgtgcaaaagagttaaatcttgatgcaattcatgataccgtacatgagatggcaagagacgaagctcgccacggcaaagcattcaagggtctgcttgacagatactttggctaattcataatattcacttcaccatcttcaggggacggcataacatgattataccgttccctggtttttcactgaaagaaccgcaggaaaaccatttggtgacgtcagaagctatcgttgaaacgatgcacactaaagaaaataataatcaggagggtttatcacatgtctaaatatgcaggaacaaaaacagaaaagaacttaatggacgcttttgcaggcgagtctcaggcaagaaataaatatacttattatgcttccgtagcaaaaaaagccggatatgagcagatggctgctttatacttagagacagcagatcaggaaaaagagcatgcgaaaatgtggttcaaggaattccacggtatcggcagtgtggaagagaaccttgcagatgcagcggaaggcgagaactacgagtggactgatatgtacaagagaatggccgaggaagccagagaagaaggtttcgaagagttagccatcaagttcgagtatgttggaaaagtagaggccgctcatgagaaacgttacttaaagcttcttgacagcttaaagaatgacaagacctttaagggtgacgctcctcttggctggaagtgccgcaactgcggatacgttcatgagggaccggaagctcctgaaatctgcccgacatgtgcacacccgaaggcttattttgaaagaaaagttgagaattattaatttttaatacgaaaaggaactggatgttacgctgtacagacagcagaataaacagtatctttgaaaataactccttattggaaggaatttggctattgcgattcttttcaataaggagtatttttgtgccttcgggaacgtctgcagaagtaatgatattctccggaaatatcatggcgataaccacaacaccatgctacaatagaagtatacggaaccattgtttgagttaacggtaacctcacgattttacatctacttttagagaaaggcaaaaggggccgccaatgcagaaacagaataacaaaagaaatccaaagtcccccggcatccacgcatttttcggtaaaaaacgtttcattctgattttactcccgctgtttttactcctgctgtttctattcttccttcttctgtactgcacggcagagaatcatgaagggccaggtcgccccgatgactttgacagctattcgaacagccgggtaccgccagacagtaccagaggcagtgatcctcttccggattacaccacggatacaaaaagtactgttttcgaagacagagacggaaagctggatttcctggacagatatcttgatatgccttctgagatcatcgatacggcgtatcacattatttatcaggataactccaaaggacgggttccaggtccttcagactatgatatccgggccgcctttacagtagctgcaggcgatctgccgctctggacaaaggacatgaagaaaattcttccggaacaggttaatccggactggtgggaagacttaaagacatctgactttacgtgggatatcccctcagatgctgaatattacaaacgccccggctcggaaagttatatcgtggtctgccccggccttaatatgatcttaaaaatggtatcgacgcagacgcttccggttcctcttgagaattccgctttccagaaggagctgccggaagaactcccggggtacgatcaattcaaattcctggctgctgatgcactgggatacgatcattctgccgtaccttacataagagctgctctgaccgaaaagacgtacacagctgacggagcggaactcacccttgtctgttaccgggctatgttctgcaatagcccactatatggaattcctgtccttgtcattatcggtgaagacaacacctcctgcacggttttgtgcggtggttcctacgatgatgaatggtatctggcggatattaatggagacggccgggatgaactcctgatgcagcatttaaccggcatcaccggaggcgccggcgcctatgagagcgctatctaccgcctgactgacggcggtccgtctaaactgttcggcagcccggatccggatggaaacggctatttcgatacgtatttttcgcttcatctctcagagggatatacccataccgtgcaaaacggctctgccggtttttacactgtcttcacacgcaaaggcccggagggaaatccatactttgacgcagaaggaaacctcaccgatgaaggcagagaaaataatgaaactgactggctgaacaccgatccctgtttctatctctttaagcctgtagatacggacggtgacggcatttacgagatcatgactgcccagtatacgtatctctatgggcgcgcagatggcctgggcaccgcgtatacgcttctcaaatgggacaacagtatggaacgcatgtatattcaaaaagccggctactggccctatgaggatcacgaagatgactctcaggattactaccagcggtgggaagactacgagaacacctggtatcagaaggaaaaaccgtctccgggcgattctcttaatgccaaggagctgatcaaggctgcctccaatcaaatccgggcaattgacttccatgtaaggcagtatcctgtcgatacatctctgtttgattcagaaatggacaggaaatacaggaaggcattttatcaggctgtaaccaaccggaaaccggtgctttgccgggcataccggtcactggattatgaggaaaaaacgtatcagtatatcctgagaagtgactccttaagcgaccaggaatttttaaggcaggaactgaaacaggattccggctactattatacagactatgacggcgataggctgccggagctgatcattcggaatacgggactctacggtttaaaatatgatccggagcaggataacgtttacctgtttctttcaacttacagcagttacagctatttcatgggcgccgggcagatcttctggcacaatccgtgtcttgccagcaaagatatctacagctacgaatcggaagacagaaatggaaatcggatttatgccggttttgaaacaatctaccattgggatgaagacagttcgagtgagtcatattacatatcgacaaacgattatatggatgtagaggtgagcaggaatctgtgggaagagctgatcagcctgttgtttgacgcctatgaggaaactcccgcaccagaatcctacgaggaatttttcaaagggtgttattaaaacgtattgtcttagaaaaggactggaaaagtccatgaaaaagaacgcctccaggttctgtacctgaaagcgctcttttttcatggactttttatacaggcttccatccgctcaaaatcacgttcctccagatggattctgttttctataatataccgaaaagactattttttcttcttcctcgccttccccttcctggcattcttctctttctccggctggatttcgcgttcgatgtcgtagtcctcttcctgatcctccactcccgcctccagttccttaatctgctccaggagctcatttttccgcccttttccgccgcgatgattttttccgctgttgttgtcacagatcaggtcagccgactcttctgcctctgctgcaggattttcctcttcgccgcagctgccgtcactctcgcagggtgcttcattctcccatgctccgtcatcttccccatgttcctcattctcccgggcaatcaggttttcctcatgtatctccgcctcccgctcctttgccacttccttcattttttccgtagtaatgctgccggaaaggaacagcgacatctttgcgcagaccggccccaccatctcatagaggacggaggaggacagaatgatcgtcaaaagcagctttcccatctcctccggaagcagcctctgtcccagaaaggccagaccaatggcgacgcctgcctgcgggatcagtgccaggcccatataattccgtatctctctgctggttcccgtaatcagacagctgatatacgttcccagatattttccaatgattctcacaatgaaataggccagtcccacagctcccaccgtagtaagcgccgttaaatccagattcatgcctgacacgatgaaaaagatggacattaccggaggtgtaaagttattgatctgacggtacagcttcttatcgctggtaagattgatatacgctgcgccgaagatcatacaggacagcagcggtgaaatatcgagagacgcgcagatacctgaaatccccaacagcatggcgatggccagaatcagcctgttatccttgcttctggccggtatcagcagccggcttaagaagtaaccgcagaaaaatcccagccccagagccagaatattataaaccaccggcatcaggagcgtagacatggtcacctcttcctcacccgtccgtccggcgatccccgccacaatactgaatgccagaaggcacaccacgtcatccagcgccacgatctgcagcagcgtattgacaaactctcccttggccttatactggttgatcgtcatcatcgtactggccggcgctgtagccgttgcgatcgctcccagaatcagtgcaaaattccactccatccgaaaaacccccacacagaacagcgttaccagcacgccggccagcagggcctcaaagagtgtaataatgataatccggcttcccgtctttaacagtacttccttcttaaaaaactttccaactccaaacgcgataaacgccagtgccagatcgctgacaaatcccatgtggccgatgatatccacggggatcaggtttaatccgcacggcccgatcaaaattccggccataatataaccgcttacctttggcaggttcagcgtattggtcagcctcgtcataataaatccggcaaacagaatcactgacagaatcagcagcactctggtgccctcacttaccccggctaaatatccctgcatttttttgccccctgttcccatttatactaaaaacttcccttactgccgcaaacggcaaaaaaagagcagggaaataaaacgaatactgttcgcttttattccttactctttctctcaaaggttttttattctgttcttttattcagaaaccgtattcttaatggaaccgatcccctcgatcacgcattccaccacatcgcctgcttttaaaaacttcggcggcgtaaagcccattccgactccggaaggagttcctgtagatatgatggttcctgccttcagcgtcattcccatggacagctcgctcacaatatgatcgatatcaaaaatcatccgtccggtattactctcctgccgcacctcaccgtttacgagagagcggatcggaaacttcggcgggtattccacactgtccgcagttaaaatacacggtcccatcggagtaaatccgtccagactctttccaaagtaccactgcttatgggcattctgcacattgcgcgcgctcacgtcgttaataatggtgtagccaaagatgtgatcctttacctgctccttcggaacccggtaagcctcttttccgatgatcacgcccagctccgcctcataatcgaggctatccacgatatcgctgtgagcggaaatctctccgtccggatcaaccgtcctgtttacccttttggaaaaataaactgcttccttccgtactccgtcaaacgcttccttcttaaatctggcggactcctccgcatgctccatatagttaagcccaagacagatgatatcctgttccggcgcttcgatcggagccagaatctttacctcggaacgcatggccgcccctgtgacaccgtacggctccaatccggatacgtgctccagcaaatccttttccgactggctgaatccctttactacctccatcatgctcgtatattccatgccgaatgcccgaagcgggtatacccacatctcatccctgctcatgaccccgatatcttttcttctgtcaacttcatatgtcagtaacttcaacgtacttcctcccttacatgaaccacggttttcccgtacacggcgaaaccgcgtccgcggcgcagccgaagacggccggaaaatttttcccaacttcttatactttagcaatccttctccacagagtcaagtaagaatccgaatttttgtcatttctgtgaaaattgcctgcacaaaaagccgtatgtttccgcaccgcgttccatataaagttcctttccggcacttttttgtctctccggtcagccttttttctcaacccagctcctgcagatctccggataattcgtaaaaatcccgctgcagccccattcataagtgttctccaggctttccatgtcgttgatcgtccagacatttaccccgattccgtggtctctgcagttttttacggtattttctgtaagtcccttgattcccggatggtaaaagtcataaccgaaacggctgcagtagtatcccgcatttcccaggcccgcatgctccagcagggctccccggggaatatccggcgccagctccttcatccgctccagcgacaggtggttaaaggaagagaacattacccggtcctccagatgatacttccttataagctccagggtcttttcctcgatgtcctcgtaataatacactcccgttttgatctccacattcgtcacaaatccgtactggccggcccattcacagtattcctcaaaagagggaatggggcagaagccatatctgccccccttgatcgtacccgcatccagttttcttaactcctcaaaggtataatccttcaccaggcccgttccatccgtcgtccggtcaactgcttcatcgtggatcaccaccacggttccatcctttgtcagctgtacatccagttccatcccgtcacagccggtttccgccgccttctgaaacgcgagcatggtattttccggataccttccgctgtaacctctgtgtgcgtatattttcatattgctcccccggtttcttatttcattgctgccttcgaatatccggtcagcatgtatttctggaaaatgaagaacaggatgatgacaggtacaaccgccatcaccgcgccggccataatctcatggttgttcatggattcagcgccggcaaaggtattctttaagtaggcaagtccgactgtaagcacgcggcgtttctcgcccttggctatgatcttcggccagaagtaagcgttccagccattggtaaaggttactaacgtcaccgtaaataacgtggagcggcacatgggcgccaggatcttcgtgataatgcccacgcggcccagcccgtcgatccgcgcggcctcgatatagctgtcatcaatagccataaaggtctggcgcagcatgaatatgtaatacggcgacaccgcttccggaagaatcaggcctaagaaggtatctgacattccccagtttgccatcatgatatagatcggaataaacgtaacctgaagcggaatcatcagggcgcccaaaacgatgataaagcagaagttctggcctttaaatctgcccttggaaaatccatagcccgcaaagataccggttacaacctgaccgatcaggatccctgccgtcatgactgccgtattaaaataatatctggcgaaattgccttttcttaacacattgatatagttctcgaagtggaattccttcggccataaggtcggcaccggaagcaggatctcctcctgggatttcacggaagacaccagcatccagtagatcgggaacacgatgatgatcaggacgataatcgcgagaacccactgaaccgccgtaatcgtcgccttttttcttctggcggaacggttaatatcccgtccgtccttcattgtatgtttctccatgttgttcccccctatgaatcgtacgtcacattgccgttagataccttcatggtagccaccgtcaccaccagcagaagcaggaagaagaagatagccactgtggaagcgcggtccattcggaagtcttccattgcataacggtaaatgttatacacaaacacttcggtcgaacggtacggaccgccctgcgttaagatatctacggactggaacaccttcatggaagaaaggaaggtggtgacaaataaaaacagtgtggtcggcgacagcatcggtatcgtaatcttaaagaaccgctgtaccgcgttggctccgtctaaggaggcggcttcataatagtccgtggagatgcccatcatggcggacaaatacaccatcattccataacccacgcaccgccacccggtcagcatcaggaccgagatcaaagcggtgtgacggtttcccagccagtctaccttactgattccaaccagagacaggaggtaatttaaaataccaccgtccgtatttaaaatccacaggaacacaacggccgctgaggacatggccacatatttcggcatgaaaacaatggctctcatggcggagaatcccttcgtcatccggttaaagatcagggcaaagatcataccccctaccagcgtgatgaagatttcgccggccgaatagagaatcgtcacctttaaggagttccagagatatttggtaccggagcctccaaacagccacttccagtttttaaatcccacatagtgccacgtatcatttaacatgttccagtccgtaaaactgatccggaacagctccgcgatcggataataagtaaataccgccaggaatatcagtaccggaagcacacaggcaaaatccttcatcgcggatacttttcttggattcatacgttttttctctttcatatgttacccccgccttactgcatcaggaatctcccaatacgtcatcaatttcttcggccatcttttccatggatttctgcgtatctccgccttccagcatgagctgtgccatgtcgttcttccagatgttggccatctgagaccatgccttatgctgaattctcggctgaattaagtccagattatcgaaaatacactggaacgccggtttctcttccaggaatgcctttccttcatcggttgtgagcacggactttctggtcggaatatatccggttcctcttgcccatgttaagtttacttccttgctgcataagtactgcataaactgccatgccgcgttcttcgtagcctgatcgttcttggatgggattaacagcacgcagccgccgatctcctggttctttgtctcgccgcccggaagccatgccataccgatctcaaaattacactggctcaaatagttcgtatacagggagcttgtatgtacaacggaaaatgcctcgccgtcgataaagtgctgacgcatgatggaggacgcgtcatccgcggttcctgtccagtatgtatagcccttatcgcaccactctttaatcttggccgcgatctccactgccttctcatcgcctaagtctgtggttacctggtcatcattgatgatctttacgccctgatttaagtagaaggtctcataataccactgatcccagcccggcataatggttccgtatacggcagtcgttccgtcggcgttgatcttggatgtcttctcaaggaacgcatccatatcttcccacttctcaggtatctcgactcccagctcgtccgccatatccttgttgtaatagacgatctgtgtggaaatcaggaagggaagggatacctgcttgccgttatagctggaagctgagatcataccgtctccaaaatcctttaagtcatagccgctggcctgaatgtatggcgtcaaatcttctgtcagaccgcccgcaccgtattctgcgacgtagggagtattggcaaccgtaattgccggaagatctgttcctgccgcatgagccgctaccagagcctcatttaatttcttgtagcttccgatatactcggcttccaccgtaatcatatcctgtgacttgttgaaatcgtctaccaccttctgcacagtctctgaatactgttcctccagcgcgtgccaccacttgatggtaataggttccgtcacttcatacagagacgggtccacctccgccacagtctgtgcttctgtctgcgcaccgccgcccgccttgcctgtggaacctccgccgctgcatccgctcagcgttcctgccatcattgcagccaccattaataatgcaataccccttttcttcatgtctttacgactcccttccgctgctctctgagacctctccgcccgaaggttacgactcctcccggcggaaaaaactgcaataaaaaagagattgtgcatgcgccgaaagcatattgctcatatgcatcctacacttgctccgatctcagtctctctcaagcaacccatattcttttctgataggactatggtatcacagattattccattatgcaagctattatttatctattttgtataatttttctattttttcttttctctttttatttccttttcataaaaattgacttttttttaacaattattaccagttactcttcctcatctttcatgtatttataaaaaatagaacgatagaaaaaggaagccacataacttcccagtgcgaaccagaacataaaaagcatggggaagaaatacgtaataactgctgtaattccatatattacaaggattgttatggaaacgtgaagatttccgacagacatgacaaaggaatcccttatcactttcaaggtaccgacatgaaagaaagcaagaagcggaaagagataaattattgttaataaatagacaaaaattgcgcctgtcagcaggaaaaacgcgatgaaacgaatcgcccccagcggagccagaaactgacagcaccacagatcaaacaccaaaaacgcgcctgccaggactgcaccgatccagagaatggtggcctggacgaaattcttcttaaacccttcccggaaggtcttccagacgtatccctcctcgtctgccgtcagccggagcgtatactgaaacagagcggtagtcgccgcccccgcagtcactgccgggatgctgaaaaggaaccagaagaagctgagaacacagatatccgttaccctttccataaatgcccagaaccggttctccggattaaaaaatctgttgatattccatctcatacgtcttctgattcctttcttacctaaagtctgttaagccagctctacattcttcgtcgctacaatggagacacccgtacccgcgcagtccggtattaccacatccccgatcttcaccggagccggtatcgtcactttgcgtatctcatccatacattcgaagatcttgcccttcggtatatcgtgctccgtctttacagaaaccatctcgatggttcctccagacacatgaacggaagaggtaacaattctggtagggcttaacacttccttcttcgcgtaatcggcacctctcgcacaggtattgccggagacctccacttcaccgccttccagacggaccgtcaggggacagccaagcggacagccgatacagattaactctctaacctccattttactccacctccgtacaaatcacaatattttttaagtcggggcagccggaaaagctttctttctttaacacgacctgctccatctcacccggtgcaaggacttttttcttctttttagacacacgcacgccgtcgtaatagacgctgatgaagcggtccttatagacgtcggccacacggaatctcactgtcaccttatccttcatatgatcgatatcgattgcctgggggaccgtataacggacgccgttctccgcctttaaagcgacgatgcggcctgcctctttttcgctttccgcccccacgtatgcagcggcattggcgccggccagcgtggcctcctcggaaacgtaatctaccaggtcatggacgtggagaacattgccgcaggcaaacactccgctggtatcggtctccagctgatcgttgacattcggtccctgggttacacggttcatggatgctccgatcccctttgtcagttcgttctccggaatcagacctacggaaagaaggagggtatcacagctgtaatgttcctctgtccccggaatcggtttccggttttcgtctaccctggccagagtaattccggtaacccgttcttttccctcaatatcgatcacggtatggctgagcttcagcggtatgccgtagtcgtcgagacactggacaatatttctcttcaatccgccggaataaggcatcagctcggcaacgaccttcacctttgcgccttccagcgtcattcttctcgccatgataagtccgatgtcaccggagcccaggatcacgacctcacggcccacgctgaagccctcgatgttcataaggcgctgcgccgtacctgccgaatagattccggccggacggtaacccggaatatttaaggcgccgcggggacgttcccggcagcccatggccaggatgatggcctttgccctgattacctgtaatccgtcctcccggttgatgacggtgatctctttctcctgattgatatcaatgaccatggtatttaatttatagggaatcttttcctcttccaccatgtctatatagcgtgctgcgtattccgggcctgtcagctcttccttgaacgtatgaagtccgaatccgttgtggatacactgatttaagatgccgccaaggcagctgtctctttccagaatcaggatatcttccgctcctgcccgttttgcagccaccgctgccgccagcccggcagggccgcctccgatgattacgatatcatgttgtgtcatatcattctcccccttatttctgaccggtcagcatattggatccgggcgcatttttgcagacttcttccattgtgattccaagttcccgggacaggatctccatggtcctcggcgtgcagaagccggcctggcatcttcccatgccctgtctgaccctgcgcttcaccccatccagagacacggctcccagtgttcttctgatggaatcgataatctcaccttcgctgacgccttcacagcggcagatgatcgtgccgtactccggtctctgccggatcagctcggccctctcttccacactcatcttctccggccggacaatcccccggcgttcccgcttccagtccttcttctgagctgctcccgcctttccggctacaagctctgccaaatagacgccgatggccggcgcgctggtaagacctggggactcgatgcctgccgcatcgaaaaatcccggtgcatcctccgcctctccgatgataaaatcatcgccgtcctcatgggcccggagaccggaaaacgatgtgatgacctgacggaacggaacatttttcacgccgatggaagacttctctgtgacaaatgccagttcctcagccgtcgtggcattgccttccttatcctcaatatccacggctgtcggcccggtcagcaagtttccgtgaacggtcggcgtcaccagaacgccctttcccagctttcccgggagctggaaaatggtatggcttacatggcagcctgcctccttatccagcagacagtaatcgcctttccgcggggtgatatgtattttactgctgctgaccatgttgtggaagcggtccgcgtaaacgcctgcggcattgataatatatttcgctgttatggctccctttcctgtctccaggatgtagccttctccgtcttttttaatctcatttacttcagtcaggaacttaaattccactccgttgtctgccgcattttccgccagagcgatggtaaggccaaaggggcagacaattccgccggtcggcgcgtggagggctgccaccacggtatccgttacgttcggctccatctttctgacttcatctccggagattatctccagcccctggaccccattgcgcttccctttttccaggagttcttccagcgccggaagatcgtcctcagaaaaacagagaacgagagaaccgtttctcacataatcaaaatccagttccttcgagagcggctccatcatctggcttccctgtacattgaatttcgcctttaaggagcctggtgtggcatcatgcccggcatgggcgatggcgctgttggctttcgatgttcccgagcacacatcctcttccttttccagtacacagaccgacagctcatagcgggacagttccctggctaccgcacatccggttaccccgccgccaataatgaccgcatcgtaattcaaactttccattttcattcctcctgattgatcctctcgttcctgtgaaacgaagcgttttggggaataagagcgctttccttctacgcaaaaagagtaagggaaacaaacggattacctccgtctatctaccttactctgtcgtctcaaggtttcatatttagtttcatgctatcacacacagtgaccggtgtcaagtataaatattctgagtttcaccgaacgcgtttactcttcctctgcccagcacagggcacacttcaccgcccgcttccatccctttacgagccggctgcgctgatcctcttccatactgctctcaaaggccctggacaccttccagttctttcggatctcttccttgtccttccagtagcccacggccagtcccgccagataggcggctcccagcgcggtggtctcgatacagtcgggacggataatggcagtattcaaaagatctgcctggaactgcatcaggaagttattggcacaggcgccgccgtctacccgaagctgccttaagcagattccggaatcctgctgcatggcctcgattaaatcatacacctgatacgccatggattccacggtggcacggataaactgttccttgctggtaccgcgggtcacccctacaatggttcctctggcatactgatcccagtaaggcgcccccagtcctgcaaaagcaggaaccacatagacgccgcccgtatccggtaccgcggcgcagtactcctccgtctgcggcgcgcttctcaccattcgcatctcgtctctcagccactgcaccgcagctcctgccacgaagacactgccctccagcgcgtaacgcacctcatttccctcactggccgcaatggtcgtcagcagcccgttccgggagagaaccgctttttcccctgtattcatgagcagaaaacagccggttccatatgtattcttcacttcgccctcgtcgaagcagcactggccgaacagcgccgcctgctgatcccctgccgcaccggcaatcggaatctttccgcccatcacgtcggaggacgtgtagccataaacacagctggagggctttacatccggaagcatgcacttcggaattccgaaatactccagaatctcatcgtcccagcaccttctgtggatgtcaaacagcatggttctcgatgcattcgtatagtcggtcacatgaatgcagcccttggtcagattccagatcagccacgtatccacggttccaaacagcagctctccacgctccgcccgttccctggcgccttccacatgatttaaaatccattcgatcttgcttcccgaaaaataggcatccggaatgaggccggtcttttcccgaatccggtctgcaagctcctcttttttcagttcctcgatccggtccgccgtcctgcggcactgccatacgatagcgttgtaaaccggttctccggtctccttatcccacacaatagtagtctcacgctgattggtgatgccgatggcggcgatgtcgctgtaatgcgcccctatttttcccatcgcctccatggttacggacagctgggaagaccagatctccatcggattgtgctccacccagcccggctgcggaaaaatctgtgtaaactccttctgtgccacgctgcagatcgttccctgctcatcaaacaggatacatctggagcttgtcgttccctggtccaatgcaatgacatacttccccatgtttcttctccctcctggtaactcgccccgcacactctgcgcacaggttgctgtaataataaacggcagccgacacggccgtttcttagatgaccgcctgatccccttgaaaacgggaagccatatccccgcagcgtttcccgttccggcagcatagccctgataagcataatagccctgataagcacagcagccctgataaacaaggaaagagcgggcaaaacaacggggtttacggccccgtgtgtttaacctgctctgtcatctctaaggtttctatataaactaagattatagtaccaccgggtcctggcttatgtcaagaaatttcgtcaatccgtcacgggaaagtccctaaccctggttcagtggaaagtggcacgccacaccatggccgtcccccatatcccttaatgccggtacctcttcccggcaccggtctgtcgcgtagggacagcgggtatggaacttacagccggacggaggattataggcactgggaacatctccctccaggatgatgcggttgcgctttctgttggcatccgggatggggatggcggaaagcagcgccctggtataaggatggagcggcgctccgtataaatcctgcttgtcggcgatctcaaccacactccccaaatacataaccgccacacggtcgctgacgtggcgaaccacgctcaaatcgtgggatatgaataaataggtgaggttcctcttctgctgcatctttttcatcagattcagtacctgtgcccgcacagacacgtcgagagccgatactgcctcgtcgcagaccacaaactccggattcaggatcagagccctggctatgccgattctctggcgctggcctcccgagaattcatggggaaagcggtttaagtactgtttgtccagacctacgtcatttaagatggagatcaccatctccttgcgttccgcggcgcttccgattccgtagacctcgagaggcgcgctgaccagatcatacaccgtcattcgcggattgagcgagctgtagggatcctggaagatgatctgcatccgcttgcgcatctcccacatctgcttcttgtcatatgcggcaatatcttcgccgttatagattacctgaccggaggtcatgggaatcagctttaagatggttctgcccagagtggatttcccgcagccggattcgccaaccagtcccagagtctcccccttatggatcgtcaggttaatatcatcaaccgccttgaccactgcaggatttaagttgaacagaccctttttcccgctaaaatattttctcaaatctttcgtttccagtaatacctgattctcacttctcatagttatcaccctcgtatctaaagcagctcaccttcgcaccgcctgcctcatagattcccggctgttctttcttacaccgttcatccgcataagggcatctggggctgaaacggcatccggccggcatctgcccgggtccgggcaccgttccctctatggtgttcagttcctccacatcctcttccaaaggcggtatggagcttaagagcccctttgtatacggatgcttgggggtattaaagatctcttttaccgatccgtattccacaactttgcccgcgtaaagtaccaggatgttatccgcggtctcggccaccacgcccatgtcatgggtgataagaataaccgccgtatccatcttctgccttaaatccagcatgagttccagaatctgagcctgaatcgtcacatccagcgccgtagtcggctcatctgcgatcagaagcttgggtgcgcaggaaacggccatggcgatcatgaccctctggcgcataccgccggatagctggtggggatactctttcagccgcttttccggcgccgagattcctacttttttcagaacctcgaccgcctccttcctggcgtccttcttgttgaagccctgatgaatcaccaggggctcgatcagctggtcgccgatggtcagagtgggattgagcgccgtcatcgggtcctggaaaatcatggcgatctcattgccccggatcttacacatctcgtcttcagacagggagagtaactctctgccttccagcttaacacttccctgggatatccgggcgttggttcctaaaagccgcaggatggacaagctggttacgctcttaccgcagcccgattctcccacgattcccagtatctcgccttttccaaccgaaaagctgatgccgtcaaccgctgtattaattcctttttttgtattaaactggactgataaaccgtccaccgtaagcaatgaatccataaattttccctcttaacttttattcttaagttccttactgtacatcccagttccaggttgaccagttcagggaatcgaaattctctgcatcgatgcctgtcaccctcttattgtgaaccgttaatgtattctttgtatacaggtaagccatggcagaacgctccttcaccatcacctgatactcatcaaaatatggttttctggcgtcgaaggtcagctctgcattgcccttgtcgattaagtctgtcatctcagtatctcttaactggcagaagttaacggagctgtccggatggatcatctcacggctctcgctcgggtccaaggtaccgccggaaccgatggttcccatatcgtgcttgccgtctaacatgttgctcataagggtcgggaagtctacctgttcaatctgaaccttaacgcccaccttctgtaaatcctgtacgatcagggccgctgtacgctcggtaatgctgttgcctgccgcaatatagaaggtcagcgtctgatcaaacgggaagttggcttcctccagcatggtcttcgccttgtcaggatcgtaccataccgttacatctttgttataatacgggctcatcggcgcaatcggagttatgatctgctggccctggccctgtaacagagcgtctacgagaacctgacggttaatggccatgctcagagcctggcgcacttcctgtgtcagatacggcttctgggtattgaagatcagtgtggtataggaagtggtcggaatcgactctgcaaccaggttttcctgctcgtttgccagatcccagtcatcgattaagatggaaccgtagccgattaaatccaaatctccattgatcaggcctgccagcatggaggcagaatctgtcacacggatgacgagacggtcgatctttggcgcgcctaagtggtagttgggattctttacaaattccattctctcaccgttgatctcgctgtcgtaaataaatggaccggagcctacaggctttgcccataagtcaggggaattgatctcctgtgccgtcttgccttcaaaaatatgcttcggaataatgaagacggtatcaatgtcctggaggaatgtatccacgaacatggagctctttaaattgaaggttacctcgtgatcaccgttcgcggttacttcgatggaatcctcggaaagctctgcaccggaatcatcaacaccggcaatgtactgcagatggtaacggctcttggcatccacgctgggatccgaatacatctggtagctgaaaactacatctgccgctgtgacaggttctccgtcggaccacacggcattgtcatataattcaaaggtcactgcgttggaatcatcgtttaccgtccaggatttggccaggcgtccctcgtacgttccgtcagccttagactgtgtcagacggtcatagatctggtcacagatcatacgtgtataattgctggttgtgttcatcggcatcatggtgtcccatgcggtactgaccgccgccgtaatcaccttctcgcctgctgccgcgccggctgatccctgcgccgcagtcgtctctcccgctgcctgggcagttgtgcctgcacctccggccgcagtcgttgtgctgcctgcgtcttttccgccgcaggcgctcagtcccaataccatggctcctgccatgacaatggctgtcaatcttgtcatcttactcttactttttctcatagagtcctcctttttgtgtagatcttactacgtttgttttgctttttaaatcttaatcttcggatccagagcatcgcggattccgtcccccaggaagttgatgctgagcaccgtaatgagcagggcaattcccggcggcatccagatccagagccgtttggaaagaaccgtgatcgactgggcgtcataaagcatgttgccccagctggcccccggcggctgtacgcccattcccaggaagcttaatgacgattccatcaggattgcactggccatctgaaaggtgatggcaatcaaaatcggggcgaaggagttgggcaaaatatacctggtgatgatcttataattagaagtaccgatcgcccttgcagactccacatattccttttccgagacagaaagcacattggcataaatcagcctggcgaactgagtccagcccagcacaccgattacaatggtaacggaccagatggatggcccgattaccgccaccagaaccaggattaatacgatggaagggaaggacatgaagatatccgccacacgcatgatcgcaatctccgccttgccccggaaatatcctgcgatcagtcccaggggaacaccgatggcgcagctgatgatggtggacagcaggcctaccagaagggaagtcctgcctccgtaaaccagtctggcaaatatatcgcgtccgatggcatccgtgccgagtatatggagactgctcggcgccgcggaaaatgccgtatagtccgaatcataaggattcaaatgcatgataaacggcagcactgccacaagtatgatctccagcgtgatgataaagagcccaaccatggccatcttatgctctgtcagtttgctaagtacctcggaaaggtagctttcattctctctttttttcattcgtctaccctcctatttgtagctgattcgcggatccagaagtccgtaggccacatcagttaagatattggcaaccagaaccgccgccgcaatcatgaccgtaattcccataataaccggataatcacgtccgttaatcgcagtcaccatcaaagatccgactcccggccagccaaatacctgttccgtaataacagcgccgccgaccagagacgggatggacatgcctaccacggtgattaccggaatcagtgcatttttcaatccgtgcttatagatgacgccccatttcttcagtcctttggagcgggccgtccgaatgtaatcctcctgcataacctccagcatactgctgcgcatatggcggacccagccgccgatctgctggaaggacagtacgaggcacggcatgatcatgtggcgcatcagcgctgctcccgatttcactcccgccgaatcatacattccccccgacggaagaatcttaaacacaatggcaaacaggtagataaagaccagacccacaaagaagttgggggttgccatcattaagagtgaaataccgccagaaacgtaatctctctttgagtttggcttcgacgccgcataaatccccagaggaatcgctacgataagagacagcagaatcgatgctcctgccagacatgccgtagccggaagacgctcaccgatcatggccgccaccggtctctgggtactgtaggagaaccccagatccccatggagcagcagattcagccagctaaaatactggattatcacaggcttgtcaagcccgagggcaacccgctttcgttccagttccgcaggagatatcctgggatccgcaagaagtgcatccagaggtgaaccgggagccagattcagaataaaaaaggccagcactgtaattcccaaaaaggtaggtatggcaatcagaagccgctttgctatgtatttccacttcatcttctcttgtcctttcgtaatcctgtcacggaatcttcattttaccggagccgccgcatattccggctctttttctccccgggccgcccgtctctgaaggctgaataaccacgttacagaataaaactttaatggtattatcgtatcgcattttacgttttttcacaagtagtttcttaaatttacagatatctccatgacagttcagcagccggaagcagaggccatacggttacatggctccggaaaaagggaacgtcccaaaggttgcctccggaacgcccctgatttgcagatattttatgattttctacggttctaccgcatactctctctcaccgtcttaaacgcctgaatcaccagcgtcggcaccaccgcgaagatcacgatggtaagcagctgtctcaccgataaatcggccacggagaagagagtctgaagccccggcacaaacagaactccggccagaagcaccacccccgcctcaaacgccataatactgtataaattgctcatcagtccaatcttaaagacggagtggctgctccggcagttaaagccgtggaacagcctcgccagcgtcagggtggaaaatgccatggtactggccgcagcttcgcttcccgtggccagccccgtatgataggcggtcatcgtacagaccgctatcagcgccccctggagaagaatctggaggatgaaccgcttcgtcaaaattccttccttcgggtttctgggtttttttgtcagcaggcccggctccgccttctccattccgatggcgatggccggaagggagtctgtcaccaggttgataaacagcagatgcaccggcgcaaacggagttggcagtgccattaaagatgtatacagtacgcttaaaataccagccatattgccggacagcagaaacttgattgcattccggatgttgcggtacacattcctgccgttggctaccgccttgatgatcgtggcaaagttgtcatccgtcaggatcatggaagcagcatctttagagacttccgttcccatttttcccatggcaacgccgatatccgccttcttcagcgctggcgcgtcattgacgccatcgcctgtcatggctacaatatggccttttttctgccatgcgctgacaatccggatcttatgctccggcgaaacccgtgcgtaaacgctgatccggtccagattccggtccagctcctcatccgccatatcgtccagttccggaccgctcactgcaattccgccttcattcagaattccaatcttttccgcaatggctgcggctgtgatcttatgatcccccgtaatcatgaccggtctgataccggcccttctggcatttaagaccgcattttttgactctggtctcggcggatccatcatggctgtcattcctaaaaatatgtacccggattccgacttctccgtcaggatctccttctcccccattttcctgtatacaaaggtgagcacgcgcagcccctgccgcgagaagccgaggttttgctcattgatccgctgacggtcattttcccgcatcgggcggaccccttcgcctgtcagaatcgattcgcagcggggaagcagaatatccaatgcccctttggtaaacataatccgcacgccgtcgacacggtgcacggtcgtcatcagcttccggtccgaatcaaacggaagttctccgatcctgggcatggagtgccgcagttcactttctgaaattccaagcttccgccccataacgacaagagcggcttcggtgggatctcccagtatttttccatctgtacacgaggcatcatttgtcaggacggcgtcatagagcagataccgctgaaccagattctcaagatttaaattctccggcggatagagacggttgtttacataaacctcctccaccgtcattcggttctgtgtcagggtccccgtcttgtcggaacagatcacagatacgcagcccaggctttccacggcctttaagtctttgataatggcgtgttccctggccatcttctgtgttcccatggcctgcacgatggtgacgatggaactgagcgcctcggggattgccgcgaccgccagggccactgcaaacatcagggagtccagaaccggcatccggcggtaaatgctgagtccgaacacaagcgcgcagatgatcagtattcctgctgccagatggcttccaaactggtccagactgatctgcagcggcgttttcttttctcccgtgctgttcatcagagcggcgatccttccgatctcagtgttcattccggtcccggtaaccaggaccgtgccgcggccggccgccaccagagagccggaaaataccatgttatgctgttccgccagaggaaccttttccgcccttattttccccgtctttttttccacattaatggactctccggtcagggagctctcgttcaccagcagggaatgcgtctccagcaggcggccgtctgccgccaccatgtcccccgcctccagaagcagaatatctcccgggaccacgtcggaagacaggatttcctgcctccggccgtcgcgaaggacccccgccatcggtgcggagagggattttaagctgtctaaggacttttccgctttctggtgttccacggtgcccagaaccgcatttaaaaggagcaccgcgaagatgaccgcggtgctctccacatctcccgatatcatggagatgactgccgctatgattaaaatgatgaccagaagatctttaaactgatccagaaatacctgaagggcactccgtttttcccccgcacgaagggcattgggcccgaactcctccttccgcactgccgcttcccgggaagaaagcccggatctcgccgcctctaagcgccccagtgcttcttcttctgataaatgaaaccattcttccatgctgacgctccttccccatctctcctactatggtatgagtcaaaaattgcttttcatgcatgaaatttcataaaagcggacagctgcccttccatttccccattccatccgttatactggtaccgataagtgtttatgaactgctgaaaggagacgttttatggataaaataacgagctttaccatcaatcatttaaaacttctgccgggcatctatgtttcgagaaaagataccgcgggcggccataccgtgacgacctttgatttacgcatgacccggccgaattacgagccggttatcaacaccgctgaaattcacaccatagagcatctgggagcgacatttttaaggaatcacggggattacggctcccgcgtcctctatttcggccccatgggctgccgcaccggtttctacctgcttctgtccggggattacgagtcgaaagacatcgtcccgctcataacagagctttttgagtttatccgtgactttgaaggcgaggttccgggagccgccgccagagactgcggaaactacctcgatatgaatctggggatggcaaagtatatcgcggcaaactatctggatcatgttttgtatgacatcgatgaggaacatctggtgtatccggaggactaaggaaatcggaaaccgttacaaggggaaagccctgacagtctgccatctgtcagggctttccccttttccattgttataaaccttagtacctgctgcatgaatatatgctgaaggtctatcatttcccgacaaacaccacaatcgtcctgggcggcacctcaaactgcctggtctccatcaccggcattccgcctttcttctccacatcttctccatcgcccggcttctcctgatacataccgttaaattccttatcgtccgtgttaaacacaatataccatttctgcttcttcggcagattcggcaaatcgaattcatgcggctcccaatgcatgttataggctacaaagaagctgtcatccgcggtgccatccggtttctttccatattctccacagtacataataccgatctgcctccggaaattctcaaattccggccgccacgccttcacgccgtggtacgatacatcgggcctgccgcaggataagtaatccataattttcggttccccggccatatgaaataccggatggctctttcggaaggcaatcaccgcctttgtaaactcatagatgtcccggttggttttcagaaggttccagttcagccatgagacctcattatcctggcagtaggaattgttgttgccgtccttggaattgccgaactcgtccccggccagaagaagcggtgttccctggcttaagaacagcataagaaccgcatttctgatctgctttctgcgcagctccacgatctttttccgccttgtatgtccttccacgccgcagttccaggagtagttataggaattaccgtcctgattgccctcgccgttggcctcattgtgtttcgtatcatacgataccatgtccatcagtgtaaaaccgttggtgttggccatataattaatcacaccgaaatccgccgggttgcgcctgcttcggaagatcagatgattcatctcgtcctcgtccccttttaacgcccggcgcatatccaccagaaaaccgtcattatactctgccaggtgcttttcatgcccgcccggaacgcccatccaggaagtagaaaacagcttggtaccgctcaaatacggatcgcgcccgatcaggtcattgggtgcaaatcctacgaggtgaatcccatctacatggaactcctccgcccagaaacgaaccgcgtcgagaacgaaggccggattctccttaccggtaaaataaagctcaattatcacttccattcccgcttggtgaaacgtcttcacaagatttttaaactctgataccgggtgcctgccgttaccggaactgtaggaagccttgggcgcgaagtaatagccgggggtatatccccagtaatttaattttccagtgggtttatccacagcgtagggactgccatccacatgctccggcatcatcagctccggaaactcattgacgggaaggagttccagactcgtaactcccagttcctttaaatatggaattttttctatcattgcccggaaagttcccttgtctttcgttctggaggtggaatgctttgtaaagcctctcacatgcgcccggtaaagaatcatctcttcatacggaatctttaaaggcttatccccatcccagtcaaaatcctctataacaaccggcgttctcatgggacggtctgctgccaacaaatctccccagatctcccatcccgtaaactgtctcccgtaagggtcggcaaatacctttccgtcaatctcgaaacaatactccagaccggaaaagtcatcgcccagaacagtcatgttccagacatccccacgctttgcctcctccgaaaaatgcagccgtacatattcggtctcttccccgctgtggtataaaaggagatcacatctctctccctgtgcagctacgcacacatgaatcccgccatcaactacggtaagtcccatggaataaattctgttgtcctgcttagcaattctgtatccttccataccgcttatctcctctatccgtcgtttcctccgatgccggtcaaatcagccggtggtctcacttcccattccggcccccgcataagacaagttactgcttctcaatctgctccgccagatcgtttaaaaccatccagcgctccatcttctcttcaagaagctgttcctgtattctcttttcttccattaattcactcaatttagtataattgctggcacactgctcaatctgtgcgtccaaatccgcaatcttctcctccagagccgcaattgtctcctctatggtatcccattccctctgttctttgaacgaaaacttcagtttctgctctcccttaggcttaccgacagtcttctttccctcttttgcatcggaagactttttgccggctcccactccagacggaagcacgccttccggatacttctgtgcaaatgccgcctgataatccgtatagccaccctcatactgggtcacacggccctcaccctcgaaggcaaagatacgccgcaccacacgatccagaaaataccggtcatgggagacagtaattacgatcccctgaaaactgtctaaataatcctccagaatcgtcagcgtctgaatgtccagatcatttgtcggttcgtctaacagcaggatattgggcgcttccatcaggatgcgaagcagatataaccgccttttttcccctccggaaagcttatcaatcacggtatactgcatactggatgggaacagaaaacgttccagcatctgagaggcgctgatgctgccatccttcgtcttcacatactctgcggccccgcgaatatagtcgatcaccttgacgcttccgtccatagcctcattttcctgggaaaaatatcccatcttaacggtctggccgacggtcactgtgcctccatccggctcaagccatccggcgattatcttcatcagcgtcgactttccgcttccgttgggtccgatgatgccaatgcggtcattttttaaaaagatataagtaaaatctttcatcagaaccttatcgccaaatgccttgctgatgctctccagctccaccgtcgtgcggcccagacggctggatacggagtccagctccacattctgatccgcctccggccccttctgatcacgcagtgtctcaaacctctcaatatgggccttctgcttggttgaccgggcccgggcgccgcgctgcatccattccagctccacccttaagatggactgtcttttgcgttccgtggcctgctccatatcgaggcgctgcgccttctgctccagatatccttcgtaattggcctgatagctgtataatttacctttgtccagttccacgatccggttcgtcacactgtccagaaaataccggtcatgggttaccattaagagcgctccgttaaaccgtcgcagatacgtctccagccagtccgccatggcgctgtctaaatggttggtcggctcatccaagaccagtaaatcagggatggaaaggaggacgcttaccagcgcaacccgctttctctgtccgcccgacagagtctccacacggtcatcgaaatccgtgaatcccagctttgtgagcatggttttcgcctgactctccagatcccacatcggaaagtcaccctcacctgcgttcagcgaagcgtgggcatgtccttcattctcacggacgatgctttccagtatcgtatcgccctcatggaacttcggattctgtgacaaaaagcggatatccagattccgtccgcgcaccacgctcccttcatccggctcctccagtcctgccacgatctttaacagagtcgattttcccgtcccattgataccgatgaggccgatcttttccccctcgttgatgctgaagctggtatcatcaaagagaagccgctccgtgtatgattttgttaagtgttctattgttaataaattcatctcagtctttcgtctccccgttccttaatcgccgcctgcgtctgatcgcctgaatatggaaatcagaaattcttctattcaatcaccagttccacagggcagtggtcggagccaagtacttccgtatggatatccgcactgaccagcctgtccttcagcgcttctgagacacagaaataatcaattctccatcctgcattcttagatctcgcgctgaaccggtaggaccaccaggagtatatctcttctctgtccggatagaaccatcggaacgtatcgataaatcctgcatcgagaagatccgtaaactttcctcgctcttcgtctgtaaaaccggcattcttccggtttgtcttcggatttttcaaatcaatttccttatgggccacatttaaatcgccgcagaaaataaccggtttcttctcttccagcccttttaaataccggagaaatgcatcctcccataccatacggtaaggcagacgcgccagaccatccttggaattgggggtgtagcaggtaaccacatagtaatctgagaattcggcggttattacacggccttcatgatcgtgttcctcgattccgattccatacgccacagataacggttcttctttggtgaacattgcggtgccggaataccccttcttctccgcatagttccagtactgatggtaacctggcagctccagttcaatctgcccttctgagagcttactctcctgaatacagaaaatatccgcgtccacttctttaaaataatctaaaaagccttttcccacgcacgcgcgaaggccatttacattccatgatatcagttttttcatttcacagtctctccttagacaatagataatgttagtatagcattttccatgacaatagaaaagatgaatcttggtggaaattttcatgccctcaaatgaaaatttttcaggtatgacagttctggttcctgtttacagaccgcagcaatgaaggaatccctgagaattattctcaagttgaatcctcactgacggggtggtatactcccactgaatacgtggaaaggaggacgaatctatatgaagcattttaacagcctggcagcgctggcgctgtcagtatccatgggtatttccggctgtgcgctggcgccggcatcctctgcttcttctgagacagtctcttctacatatgaaaaaaatacggaaaacacagaaatcgacacaatcgctgaaaccgccgaaaccgttcctccggattctcaggagcatgcccccgaaacaccggaagaaagcacgtcagaaacggaagcaaaagcaaaaacagaaagagaaagagccgccgcatttgcacagaaaataaaaaaagccgtcgcggcggccgatatggaggaactggcagatctctgcggctatccagtctgcattactctggaatccggagacggccgggagcttgagacgcgggaggattttactgcactcggggcagatactctgtttacacagaaagtaaaagacaccatcgccgcagtgcaggaatcggagcttgaattctgcggcgctggtgtaatgatgggcgaaaatggcacaattgtctttcatgacgtaaatggaactatgatgataacaggaattaatttatctgactgatccgatttaaaagtatctgtctgccaaaaaatatggggagtccggctcaccgggctccccagcccggaacgtgtctgaaaacatttctatgaaatcaaaaacggggattcacataaccggcacccatagctgaatctcactttccccatgttcgtccaactgttccccgtatcgggcaaaatcataccgtctgtcctcgtcaaaccgacaggtagaatccggaaaccattccccataaatatactccaccacaggctgaaggctgtcctcatttcttccgcggaaggaaaacacgacacagcggccggccggcagtgtaaatttctgcattcccttcggagccgtgtattcctgcataacctccgcgcccgcaatataccgaaaaacctgatccagtcccttacaggggtaataggagtagtcattgatcccgatcaggaattccttattcgtacacccggaaattctgtccttttttgcatgaaaccgtctccagcatcttccgattcctgcaaatccgccctttgtggaactacagtaaccgacaacagacagttccttcgcttccctcatggttacagtaattatcctgtctccccgcagcttttcccggcggaaaacatcgtatttcagctgaagagggaaaaaatccccttttttccggtagcgggaggggctgtgctgaaagtacttctgaaacgctctggaaaatgatcgctgtgtctcgtatccggacgccagcgcgatctccagaaccgggcggtctgtccataccagcagccgggctgcctcagtcagcctgcgcctcgtaagataggtgtgcaggggaaagccggccacagatgcaaacatccggtgcagatggtatctggaataatgaaagatggaagctatactctctaaatccatcttctcttccatcagatgctcttctatataatctattactgccgctatttcttctatattatttcttgtatgattagcggcgcctgcctcctgctgatccaccgcctccgtctgatttcccatacgctttccctccgtttttttctttattatatcagaaaataaaaccggttttatcacatttcttgcttcctgccgcaacagaaaaaagccgggatactacatctaaggcagtttcccggctctgataactgtatatttaactgttttttgctttcgtcatccatttcttccgttctacgaaacatcccattacgaaagccatgatgccgacgccgattccggtctgaacgcagaacagcaggctttccacctcccctgggagctcgccctgtatcagggtttccataaccggagtgaaccacggctcatactcttctccgcgaatctccgccaccatctggcttcccgcatcatcggatcccccaaattctgcacctttcagcgcaaacaggggaacgattgcgatcagacaggcaatgaccagtaaaacggttacaattattttcttattcttatccatcttattttgcctcctcgttacgagcacttggcggacgtcttttggccgcttacgtgcgatacatgtcatctccacttagtgagttttttcacgaacttagtggtgtggctttgcaaatccaatactggtcagctccggcccggcataggattccagtgcaatgatgataaccgtggtgagtattccttcaatcagggccagcggcagctgtgtcggcgcaaacacgcccaaaaacttcaccgccgataaagccacaccgcccggctccgcaggataggctaacgccagctgaaaactggttacgcagtatgtaaagagatcgccaagggcagccgcaagaaatacggatacataacggtttacctttagctttccgcataatttatagataccaaaggccacgaacggccccgcaatcgccatggagaaggtattggcccccagtgtcgtcagtcccccgtgtgccagcagcaccgcctggaaaatcagtacgataataccgagaatgctcacggaggccggtccgaacaggatcgctcccagaccggttcctgtcatatgggaacagcttcccgtaacagacggaatcttcagggatgagatcacaaaaataaacgccccggccatggcaagcacggtgatgttctttctgttttgccccagtgtgcggcggatagagaaaaatcctgcggccagaaacggcacgcagacagctccccatgccagacagtagccaaagggcagatacccctccataatgtgcatcgcatacgagaccggcatcacgccgaacacaaatgcaaatgcgactgcaagtgtcatgattcttctttctttcttcgtcatttctattctcccttcaaaaaaaataagcaccttatccgatgattcccactcatcagaccggtactttaacgacagcccctccacttcgcttctatctcctgttttcatggaaatatccggatttccggacgcaaaagggggcatcggcctccggtcatcgctcgtaaccggacgcatcgtatcgcaacaggcaggtcttctgactcaaggttcaacacagcagctcatcttcccggttacccagtgatctattgagccctgctcctcttttacagcggcgggaccgtaagggactttcacccttttccctattatcctgcggagaatttcacaggcacctcttgcgtaattctattgtattgtacacttaactaactccggctgtcaaatacatttgacattgtccattcctgttcttaccggcacagcagttgttccagttcctccgtatccttcacatatgtaccagccggcacaagcccgtgggccgccagccggctgcacacgtccatcaggacaggctttcttaaatttgcctgtgttatcatgctttcatcctggaaaatgcggcacggcgcgtcatccgcaatcaggcgccctccggaaaataccagcgcccggtccgcccatctccaggcaaaatccacatcatgggtggaaatcaagagagtttttcccatattccacagcttatccagaaccgcctcaaaaatcgctacattcagcgggtccagcgacgccgtcggttcatcaaacagaaagagctccgactccatcgcaacaatatcggcaatacagacccgtttcttttcaccgccgctcaggtaatggggcggccggtctttcatttccgttaaattcatgcattcaagggcttcatctacgcgccgtttcacttccgtgaccggaagctttaagttcatggggccaaaggatacctccgccgccacagtcgacgcaataatctggttatccgcctcctgaaacacgattccaacgtgtttgcgcagttccttccggttctttttcgtaatttcagtcccccggtataagattcttccggaatccggcgtcagcaccccgttcaggttcagaaaacacgtggattttcctgctccgttggatcccagcaccgcgatccgttcccgctgtctgactgatacattcacatcctgaagcgcaattttcttcccgtcataggaataacagagatgctctgtctccagaatcacatctcctccgttcacctccacatactcaccgccttttctctcattttccctgtactcctgccggaacacacagttcatggccacaggacggttccccgccgcagtcgtcagaacacaagccatactgccgcagtcatcagcagatatcccaccgccgccgctgcctggccggccttaatctgtttctcctcctccaggaaacagagatctccgtcgtaacaccgggataatagagagtcataatacgtgtccgccttttttaacgatatcaccagcagattaccggcggtacttccaaaggtgcggcaggatgtcctgaaatcacaggtcccgagccgggagcccgcggcctgtttcatctggctgtaagtatcgctcagcacgaaaatgaagcggtaaatcaggtacatcagttccacgatcattttcggcacgtgaatccgcttcatgactccgatcatctcgctggccggtgtggcaagcgtcatcatgtacatggcactcacagcccccagcgctctggtaaacagccgcaccgcctggataagcccggccttcgtcacatagagtgaaaaccacggagcactgagataccagtcgccatagggctttcgcgatattcccaccgcaatcgccacggttcccataaaaaggaaagcgagcggaatggtcagcagttttagataccgtaccggcgccagacctcctgcaatcaccgttatgcaggccatggtaagaatgacaaataccgacaccgccagtttgtccgccgcgatgcacaggcagagcgccgccatgcccaccgccatcttgagccccgcattccagcttctaagccttgattcacaggcatagaaatcaatggaatacgccgcatcgtgtttatgacctctgtgtattgtgttcacctcctttaatttatttaccggcactggccgatatgacttattatataacgggaggcggtgtatggcaattgaaatgaaatattactccttccgggccgcacgcttccggtaccacacataccacaccgtaaaaaacacaatcccatacaccgacgccagcggtaccgccagtccgatatcaaacaggctggcgccttccttcaggctgaacacatatgacagcggcactctcacaagaaatgacgcggttattccctgcagcataacagggagcgacatgccgtgaccgttaaagtaaccgatgtagctgaatacaatacaggtaagaaccgcctcaaagctgaagccctttaagtactccgccgcacgcataatatatgcctcattggcggtgaacagcgacgccggaagatcccctctgaaaaatgtgaccccaaagataagcactccgacagagacgccaagccccatgcctgtgagcatcgccttcctggcccgctcctcttttcctgcgcccacattctgggccacaaaggccgacatggactgcatcagagcggaaggaatcagcatgacaaaggagataaccttctgagcgattccatagccggaagatgcctcgagaccaataccgtttacgatggcacagagaattagaaatgatatatttgtcagcaattcctgaagcgccagcggtattcccagcttcagaaagatcggaatctcgcggttaaaccggatgtcgcttctttttaccgtaaacgggagttcctgtctgcggataatcagcagggacaggaccacgctgacggcctgggccagaatcgtggccagcgcggcgcccgctacattcatatgaaagactgctacaaaaagcagatctccaataacattgacgatacaggcaatcaatacaaagatcagaggaagctttgagttgccaagcccacggaaaataccgctgatcacgttatatgccactacgaatacaattcccacaccgcagattcttacatactgaaccgtcagctcataggcctgctccggggcattgagaagcgatgcaaacactggggccataagcagaagcagggccataatcaccacggtgaatattacaaaaaaacagaccgttccgccaataacaccgccgatccgttcattccgcttctctcccagataccggctgatcaaaaccgtcacgcccatgaccagggcggttataacgaatgtaaccaggttaatgacattgcttcccgtggctactgccgagatgcccgcgtccgttccaaactgtcccacaacgagcagatcaaccgcgccgtacatcgcctgcaggatcagggctccaagcacagggatcataaatttaacaagctttcctacgatacttccctgtgtaaaatcatctgataacgagttattctttgacatcatttcctcctttttatcgttccaggttcgcaagcatggtttccgcgaccctcataaatgtatttaaatcctcctgggggatcccctctatgagcagctcctccgtcttttggatctcctgctgcagcgcagttctgatatcatccgccgcctccgtaaactgaatttttttgtatctcccgtcttcctcactgctgaccctctggatcatctttctgctctcaagtgttttcagaagctccgtagccgtagacggacgcagtccaaattctttttcaatgtccttctggtacagcggcctgtccctgccgtcaaccagtatgaaatccagaatccttccctgaatctctgtaattccaaaattttttcccattttttctgatctgcgccttaagcggatggatattttattgataagttttccggtgtccattgtattcctccaggttttactgaccttatgcattatatagttcggttcctaactattaaattataccatatttcaggcaattgtcaagtacgatcaaaaacgcctctcccgcgaatcagcttcgcgccggagaggcgtacctcatatgatgcagctaaatattcagattttttacggtttcccgtataatcaatttattttccagataaatccgccggttatctatgacaccatcctccagacggcgcaggagaatcttcgtcccttcccgggcgatctcacccatgttccgctccacggtagtcagcttcatattcgcgtaccccgacaggtcccagttatcgaagccgaccagcgatatatcgtccggcacctttaacccaacctcattaatcgcctcacgggctccgaatgccatctcgtcgttaaagctcaaaatagcagtcagatcctgctccagaagcctcttagccgcctgatatccgctggcatagcggtatgtaccatgttccaccggcagactgtccggatccagaccgtattttatcatggaggcacgccagccgcggtgacgcattctcgtagaatccagatttgaattgccttcgataattccgattctgcggtgcccgttttccagaagataatccatggccttttccatcgctccggcctcatctgtggtaacgttgggcacgtccaaaaataccgtccggcagatcgccaccatgggaatctccttattcagtacttcatccataaattccagatcgtcatccttctgcgtgagcacgataatcccgtccaaaaaagaggggttcagcgtccccggctcatgcatatcgatacctttgacaatgacattatatttgcttcccaccacgctgtaaaccccggtcagcacatcgtgaagaacaaagggggaactcatcttgctgatggtagagaaataaagtccaatcacataggaccgcgacatcttcagctgaatcgccgcctgattcggcacatatcccatctcttctgcaatttttaaaatacgtttctttttatcggatttgtccgcgttcggatcgtttaaggctctggataccgtagagtaagacacccctgctttttttgccacatccttaattgtaactgccatatcccacactccctgccataaatacgtaatagatttagtatacctttgacgtccgaagattgcaacaccttaattctctcagttttactcagaggaagacaaaaaacaggcggaggtacagcaacctccgccattcacttaaccctttacgccgcccgctgcaataccgtcgataaactgatcctgagccagcaggaacacgattaaagacggaatgatcgaaatcagggacatcgccagcacacggttccactcgaaaccggtatccgcgtccatagacatcttcacaaagatggaggccggataacgggccggtgtgttgacataaagcagcggtcccataaagtcattggaagaccacataaactggaataacgcacacgatacaatcgatggctttaacatcggcacaatcacgtaccataaggtcttgatagaaccacagccgtctatggtagccgcttcctccagttccttgggaatgtttcttaagaactggatcagcatgaatacgaaatacgtgtccgtcgcaaacagagtcggtacgatcagcgccagataaatgggggaatcgatccagccaaatttattgaacagaacgaactgcggcacattgagtacgacctgaggaaggaacagcgtggacatcaggactgcaaagagtaacttttttcccttaaactcaaacctggcaaatccatacgccgttacagtggcggatacaattgtaaatactaccttcggcaatacgatagagtatgtattgatcatggccttaaaaatgtcaatatcaccgccatagcttttcaacgcatttttatagccgtccagagtcggattcttcggtataaatccaattccgctgaatatctcattatttgttttaaatgtagccccaaccatccagatcaacggataaatcatgatgaagcctactacaatcagcactacgtagcgcacgattgtattgacagtctttcttgtctctctcgtcatcttttttacctcccgtcctcatctgaatagtagacccagtgcttctggctgaagaatgcaaccgccgtaaaggtcataacaatcaggaacagcagccatgcctgggcgcttgccagacccatttcgtagctcttgaacgcattgttataaatcagcatggagatcagcatggtcgaattacgcggtccgccctgggtaatgatgaacggtccgttgaattcctggaatgcctggcacagctgggtaaccagattgtagaaaataaccggggtgatcagcggaactgtaatgctgaaaaactgtctccattttccggctccgtcgatggaggccgcctcgtataaatcttccggcacaccctttaaggccgccaggaaaatcaccatggccgaaccaaactgccagactctcagcaggcagattacaaacagcgcatgagaggggcttgccagccagttaggaccctcaatccccatatagctcagcagcatgtttataataccgtcgtccttaaatactgctttccacagcacagcaatggcaatggatccgcccagaatagacggaatatagtaagccgtacggaagagattgactccctttaatttaaagttcagaatatatgcaataaataacgcaaaaaccagtttcagcggtacggtcatgaacgcatacttcatcgtaaccacaaaggcttttacaattttcttggtatggataatctcatcatagttcatcaggccaactttggaaactccgtcaaacaaatgatagtccgtaaaactgtatacaagtgatgatccaaacggatatactttaaagataagaaatccgatcagccacggcagtatgaagaaaaagcctttattttcttttacgatcctcttaaagctccttctttctgcggttgcactctgagccgctggttgcttcataccgttacctcctctttcctgcgcagcggcctccgttaccggcggccgctgactgtcactcattatttacttaacactttatttacaccgtcaatcagtacttctgcagcttcatcaatatcgtaatcgccgtagcttaagcctgccatgacatcccagtaaacgccttcgtttgttgcctttaatgcacttgcttcaaatttcggatccagcgggaaggaaacatagcttaaaaccttggagtttgcttctgctaccagttcatttaacaggccgttgtcttcacagatcttaaggccttctgcggaacatgggattcctctttccgaaccaaggatcttaacaccctcttcttcatttaacaggaagttgaccagtgccgcacactcagccggatactttgtattttcagaaataccaaagcacatggaaaccttcgcaaagccgcccttatagtcgcccatatctgcaaattcttcccctactacgaattcctggccttcatttaatgcgccctgctgcttggttgccgcagaatcccactcgaagatgcctgcgtatttgccttccatccatttcgggttcttgtcgaaggaagctgcgccgtcgcctgcgatggttgcgatggacggaatcacatggtctgcttccagagactgaatgaattccagtccgtctttgatctcatcttcggaatactgaagttcattgttttctacccaggcttttccgtacttggactctaagtagtaaaccatgaagatggttctgtcatactcgttcatagccagaggatagtaatcgtcgccaagcttttcctggaatacctttccggctgctcttaaatcggccagagacttcggagtctcaattcctgcctgatcgtatgtagtcttgttccagtagaagattcttcccgtcatggagatcggaacgccctgcagtttgtctgcaaccgtacactgagccaggtaatcttcagaaaactgtgacagatccagaatatcggataacttgttcagatcatagaaagcgcttccgtctgaactgaaggaagtaatccagttccagttaatctggttcacatcaggcgctgttcctgtggcaaactgagatgacatcttgtcttcccagccgtcccatgcagaataagaagtttttaccgtaatattcggatacttcttcatgaatgcatccactgcagccagggtagcttcgtgtcttgaatcgccgccccaccagctgaaggaaatctcgatgggatctgtggtgtttaccgtcaggccttctgcctgcgccggttccgctgtagtttcagcctccgttgctgccgcctctgtcttggcagcctctgtctgtgccgccgttgtctcctctgtctgctttgctccattgccgcagccagccagtccagctgccatcgcagccgccattaccagtgttaaagcttttttccagttctttctcataagacaatctccctttctttcctgggtgcagttctcattgctttgattttgcaaaggtttgcaatcccgtttttaaaaatatgcatatctgctacatcccagcccctcgtttgtgtctttttgccagcaaatatacattgtctcgttgatgtttttatcttaacaccattcttttcccatgtcaattgtatattatgcacatcatttttttatctttttatgtatatttactaattttatttttccaataatatgatattataataaaaactgcaaacgtttgaattatcaatcttattttattttctatagatagaaaaggagcatttaatatggaaatactggaccgctatattcatcaattattagatcagagcaccccggagtctccgatctggtataaggaagaaagcgatgcatcggccccggccaaatggaactatatggatggctgcatgatcaaagcgattctggagctctatcatattacacaaaacagcagatacttggaattcgccgatcatttcatcgatcactttgtccgcgaggatggctctattgtttcctatgatccggaagagtataacctggacaacgtaaatgcaggcaagaccctgtttgatttatataagctgaccggaaaagagaaataccggaagggaatcgaaaccgtatacagccagattttaagacagccgcgcacctccaccggcaacttctggcacaaaaagatttatcccaatcaaatctggctggatggactctatatggcccttcctttctatatgcagtatgaggtggaatacaacaactgcaaaaactgtaacgatattattgatcagttcagaaacgtcaggaggctgatgagggaaccgctgaacggcctatactaccacgcatttgatgattcccggaagatgttctggtgcgataaggtaaccgggctctccgataacttctggctccgcgcgctgggctggttctccatggctctcatagacaccatggaaatcatgccggattccttaaaaagccagcgttccgagttaaataccatctaccgggaactgatcgacgccatgctcccttatcaggatgaagagaccggcatgtggtatcaggtcgtaaaccggggcggtatttgtcccaactaccttgagacttccggttccgccattttcgcctacgccatcatgaaaagcgtccggctgggatacttgccggacacatatcttccatttggcgaaaaggcattctccggtatctgcgataagtacttatccgaagaaaacggggaactgcagctggatggcatctgcctcgtggccggcctcggcaacaccgagaaccgggagggaacctttgaatattatatgcgggagccaattgtgaaaaatgaagcaaaaggcatcgcgcctctcattcttgcctatattgaaattctaatgaggaagtagacctccgtcatctctatacagcgctctttttcttgcaacgctatggggcttatggtatcatatgccataagccccttacttggcgccggaaaggacctgtacatatgaatgaagcattttttcaactgatctcttattttttcatctactcattcctgggctggtgcatggaaattgcctatgcggccctgaaaaagaaacatttttataaccgcggcgttttaaacggccctctctgtccggtttacggaatcggtatgatcctgattctgacctttttcagttctctaaaagagagtctcgtctttcttgccatcggaagcgctgtcatcgccacccttctggagttttttaccggagcgctgatggaaaagctctttaagaagcggtggtgggactactccgattataaatataatctgggtggttacgtctgtattccattttcagccctctggggcgtgggcgctgcccttacactacggtttatccatccattgatccatatgatgatcagccgggttcccgcactggccggacagattatcctgatcgccggactcgtaatcctggccatggattttatcagtgtcctcggtgtggtcttccaggtgcagaaatacaacacccgtgtggaagaactggcggaaggcatgcagcagatttccaacaggctggcccgcgccatttttacccggatcgaaaaacgtatggcaaaggcccatcccggagcggcggaggaacacccggaggcagataccggttcccgcgtaaaaacccgttcctgcaaggcggttccggccgtctttgccgacggctgctcgttccataagcttgtctggctgttctttatcggggcattcctcggggatatcaccgagaccatcttctgttacgcaacctccggaattctgatgagccgcagcagtgtggtctatggaccgttcagcgtcgtttgggggctcggagtcgtggtcctcaccatgatgctgcacaagtataaagaccgcgacgaccgctatattttcctgttcggtactgtggttggcggcgcctacgagtacatctgcagtgtattcacggagatcgccttcggaaccgtattttgggattacagcaaactccccttcaacctgggcggaagaatcaaccttctgtactgttttttctggggactcgccgctgttgtctggattaagcttctctatccgcgcatctcagcgctcatcgaacgggtcccggtaaagaccggaaagattctaagctggctcatgatcgtctttatgactgttaacatcataatctcggccatggcactggcacgctactcagaccgtcagacaggcaaagaagcggccaattccattgattactttctggatgaccatttcccggataagaggatggaatggatttatccaaatgcaattgtcaaagacaattccgccgtgcagccgtaatgtttcaaactccggattcccgttaaagaaagcctccacttttcagtggaggctttcctgcctgtctgccatcgatcccggcaggcactgccatgttttatttattcattctcctgcatctgctcatcagtcagagtaaatacctgtctcttacgtgccatctcatcgcttgccaggtactcatcgtacgtagtgatcttatcgatcagctggccgttcacgatttccataatacggttagcggtcgtctccacgatctgatggtcacgggaggaaaagatcagcacgccctggaacttcaccagaccgttgtttaatgctgtaatggattccatgtccagatggtcagtcggctcgtcgagcatcagcacgttagcgccggaaatcatcagcttggaaagcatacagcgcactttctcaccaccggataaaacgcgtaccttcttcacaccgtcttcgccggcaaacagcatacgtcccaggaatccgcggacataggtcgcctccttctcaggagagtactgcgtcagccagtccacgatggtatcatcgttgttgaactccgcactgttgtccttcgggaaatagcactggctcgtggtaagtccccacttataatcgccttcatccggctccatctctccggcaagaatcttgaacagcaccgtcttcgcctgctcgttggggccaaccagggccaccttatcttctctgtttaagatgaaggagatattgtccagcaccttcacaccgtcgatggtcttggataaattctgtacggtcagcacttcgtttccgatctcacgggccggacgaaaatcaatatacggatatttacggctggatggtttgatgtcatccagttcgatcttttcaagcgcgcgttttctggaggtcgcctgtttggacttggaagcgttggcggagaaacgctggataaactcctgcagctccttgatcttctcttccttcttccggttggcctctttcatctgcttcaccatcagctggctggactcataccagaaatcgtagttaccggcatacagctgaatcttgccgtagtcgatatccgcgatctgggtgcagactttatttaagaaataacggtcatgggataccacgattaccgtattttcaaaattaatcaggaactcctccagccatgcgatggcatcgagatccaggtggttcgtcggctcatcgagaagcaggatatccggattgccgaataacgcctgggcaagcagtacctttaccttctgggcgccgtttaattccttcatgtatttgtagtgatactccgtctcgataccgaggccgtttaataagttggccgcgtcagactctgcttcccagccgttcatggaagcaaattcgccttccagctcagctgctttgatgccgtcctcatccgtgaagtcttccttcatatagatggcatctttttctttcatgatctcatacagtctggcatttcccataataaccgtgtccagaacctggaactcgtcatatttaaaatggtcctgctggaggaaggaaagcctctggccggccgtcatcacgatatcgccgcttgttggctccagctgtcctgataaaatcttcaaaaatgtagattttccggctccgttggcaccgatcatgccgtagcagttgccctctgtaaacttaatatttacatcttcaaacaatgccttcttgccaatacgtaaggttacattattcgcactaatcattcccaataaattcctttcttcaaatgccgctcactctgccaatatttcagtgccgcccggcggcactcgtgagcaggcaccctctgcgggagtttccgctcacacaaaacagggctcatacggccccgtctctcatctctcttattttacatgaaaatcccgaatttgcaagccttttatcaaaaaagcctgtaaatccggtgattttcagctggatcttcatattctatttggcggactctactttcagcgggaaattagcctcgctgcccgcgtcatagttcactgttacatacgtcacttttaccatggcgccgctgccgttgctgtcatctgtggcctgccccagtacacctgtattaaggccttcgcagttatcttttaagaagcccgtatcttcccctttttcattccggatcgtaaagctgctcatggcctgatccgttacgcttccggtcatggtcttcacttccatgtcctcctgggcatccagcaccagcacgatcgctgcattagcggcgtcatctccggagatctcccccttataaatgatggaaaccggaattcccgccttcagctcataggacgtctcgatcaccacgccgtttaagttaaatttcacttccgcatcgccgtttttaacggtcatatcctccagcgtatccgataccgataccacatcacacgtcaatatcttaaactctgcggtatcgcccggcgcctccagcgtcgcggccggcgttgtcgccggttccttcgtctccggttccgtcacggcaggggccggtgtcgtctccgtattactggctgattttccgcaggccgtaaatgcgagggccgcgcagaccgccattatcacaatcagggttcgtttcatttgcatcctcttctctctgttatatactgtcatgatcttattgagtgctcatagtatatcatccgattgtgaatattgctttgcttttttcttaatttttgagagaaccgtatccatcgccgtaacggccaagaaaactctgcgtgcgctcatgactggaagtgaaaacttcctccggcgttccctcttccacgatcaggccgtcggccatgaagatgacgcggtcggagatgtctctggcaaatgccatctcatgagtcacgattaccatggtgatctgtaaatcggccagagaacgaatcactttcagcacttccccagtaagctccgggtccagcgcggaggtgggctcatcaaagaacagaatcttgggatttaaggcgagagctcttgcgatggcaacccgctggcactgaccgcccgagagctggcagggatatgcctccgccttgtcctccagccccatcttgcggagcagatcatatgcttcgcggatggcctcatccgcctttcgcttctgaacatgaatcggcgcgtcaatgatgtttttcagcacattgtaatggggaaataagttgaaattctggaaaacgagtccgtaattttcctggatctcctttaatttttcttttccggcatagacggccgttccatctgggccgttccatgccgccttctctcccaggtacaggagctcgccgctgtccatcttttccagcattgttgcacagcgaagcagggtggactttccggaccccgacggaccaatgatggagacaatctcgccttcttccacagataaggagatatccttcagcacgccctgtccgtcaaatgattttttgacatggttcatttccagcagatacatatgggttctcctccttattggtagtaatccagccgtttttccgcgtattccataataacggctaccagcagattaaatatgtaatagaacagtccggccgccacaaagggaatcagactcgtctgggaagacgccagcgcctttgccactgcaaacatctccagcacgctgatggtaaatgccagggaagtatccttgaccagtgtgataacctcgtttgttaccgaagggagaatccgcttcatcacctgaggaaaaatgatccggaaaaacgtctgtgtcttcgaataccccagcagcttcgccgcctcatactggccaaccggcatggactggattccgcttcggtatatttccgcaaaatatgccgcataattgatgacaaaaccgatgaaggccgcccatagacggtagttgttgcccactttaattttaaacagataatacggaccgaaatagaccaccatcagctgcagcatcagaggtgttcccctcatgactgaaatataaaattttacaatggttctgattacaggatttttcgacatcctgccaaaggatatgaaaagtcccagaggaagtgaaaaaataagcgtcacaaaaaagatctggatgctgatccacatgcctcctgtcagctgtgaaaaaatctttgttaaagtcatggtattcccctcttattttctccatggtttcaaacaggggccaggcccaaaaaagggtaagcccctgctgtctgtctctatttaccgatcgttgtaatatccttatcgaaccatttttcggaaatcttcgccagggtgccgtctgctgccagcgcttccagctgtgcctgcacctgatcctttaaggcgtcattccccttcttgaagccgactgcataattttccgcggcaagcgtttcatccaatacgataaaatcaacctgtctctgctcgatctggaaacgcgctactacctcgtccatggcaatcgcgtcaaccgcgcccatctgtaaatccataaaagccgtattataatccggcgtggtctgaagtgttccaaacgtaccggtcaggtccgggtcatcttttaacgccgcttccgcagaagactctgcctgaacctccactacctttcccgctaaatctgccagtgtcttaatgccggactcagccgtcaccacaaatacctgctggttcgccatataagcttccgtccatgtataatcgtcctcacggcccgtcatggtaaatccgttccagatacagtcaatattgccggattccagctccatgtccttagccgcccagtcaaccggctgcggaacgaattccattccgagacgtttggcaacctcttctgccacctccagatcaaaaccggtatactcaccgtcatcgcccacataccccataggcggaaattcctgatcaaatcctaccgtaaacgtaccgcccgcggctcccgcctcagaagcctctgtctccggcgccttcgtatctgtatcggtatctgcagcagcctccgctgccgttgtctccgcctctttcgccgtagttccagcggtctccgccgccgtattgcccgctgcctgtccggaacatccggacaccaccgccatcattcccagagctgccgccattaagattgctctcttcttcataattgttgtttcctcctctgcattttcatgtgctaccatggtagcatactaaagtacttctgtaaagcagaattttaatcttttactcttatttgcagagtgtccggcatacagctaaaagtccgggccggcccaacgcgtctttctttggcgcgttcggcggatccggacttttggtgtctcttttttatgcatttgccctttcatccagatactccagaatctcctgtgcgttcgtatccggttttactttctcgaagaccttttcaatcacaccgttctcatcgatcacgaaggtgcttctgaccacgcccatggatacttttccataaagctttttctcctgccagacgtcatacgcctttatggcctccagctccggatcggaaaccagaatgaagggaagttcgtgtttttgggcaaagttactgtggctctttacactgtctttgctcactccaatgacttccacgcctctctgctgatatcccgcatacgcgccggcgaaggcacacgcctcacgggtacagcccggtgtgttgtccttcggataaaaatagagaacgaccttcttccccagaaaggaggaaagtgttacgggattgccgtccttatcgtttaatgtaaagtctggtgcttttgttcctgcctgcagcataatttagtacctccaaatttaaaatagtgatgattctttttatttgccaggccatggcggcagatggaacgcccgggttcccgcctgccggctataaaaattctttcagctccttaagcgaccggatctcccggctgacagtgacaccggcggtgttaagggccccctgcggattaaaccagcaggtatcaattcccgccgtatttccgccttttatatctgaatttaaggagtctcccacgatcagggttcctttcctctccgctcccggcatcgcctcaaagcagcggtcaaaatactctttctgcggcttctggtacccgacctcctcggaaataaaggatttcttaaaatactggtccagaccggaatccgccatccgcatcttctgagtctctgtaaaaccgtttgtcaccacatacagatcataccggtcctgtaaatacgtaagcacctccacggcttccggcatgacgatggcggtatgattcaggatttctctgtatctgtgctcagtctgtatcccgtcagcactgatgccatgggcctcaaacacggcgccgaatctggtatccgtgatatggtctttcgtaatgagacctttctcataggcatcccataagccgcggttcaccctgcggtacgttccgattaaatccgccgtccggcataccccgctttcttcatactctttgaacacactggcaagcccgcgttcctccgcagaatcaaaatcgagaagcgttccgtccacgtcgaaaaggatggtcgtatattgtttcatgaaagtttccccctccggccttattctccatcccgatacacgattttcccgtcacaaattgtatattttacttttccatacagtctgcttccggtaaacggtgaattagaagattttgatgcaaattcccctacggtccactcttcctccggatcaaagagcaccaggtccgccgcctttccttcttccacagaaccggaatccagatgatagagcttcgccggattaaggctcatcttctccatcagctgaagcaggcttaaatggcccggccgaaccagatttgtaattgccagtcccagcgccgtctcaagcccgatgatcccgctgggcgcctgctgaagcggtctggccttctcttcctcactgtgcggggcgtggtccgtggcaatcatatcaatgctgccattttttaggccctctattatagcctggcggtcccgttccgtccggagaggcgggttcatcttcgccagagtcccatgctccagaacggctttttccgtcagtgtaaaatggtgcggcgtaacttccgcgtatacacgcgctcccagctccttcgccagcttcaccatccgcaccgcgccctcggagctgatatgctgaatatccacctcggcccctgtgtgcagggcgatcatgcagtcgcgggccaccagagaatcctccgccagtgcgggcgagccatagatccccagctcgtccgagacagccccgtgattgattccattattgacaataaacgccggatcttcctcatggaagcttaacggcagttccagacgcgccgcttcctccatggctgtctttaaaagcttttcatccataatcggtatcccgtcatcggtgaagcccgcagcgccatgggctttcagcgcctccatgtcggtcagctccttcccggcgagtccaaccgtcaccgcggcggcctgaagcacatgaatcccggtctttttcccctcctcgagaacgtaccggagcgtctccacattatccaccggcggcttcgtattcgccatacagacaaccgtcgtaaaaccgccttttgccgcagcggcagcgccggtatgaatatcttctttatacgtaagtcccggatcccggaaatggacgtgtacatccacaagtcccggcgccgcaacaagtccccggccgtcgatgaccgtatcaaatttgtcctccggctccgcgcactctccaacgcgaagaatggttccgtccgaaacagcgatgtccccaatcctgtcgagtccatttcccggactcacaatccggacattttttatcagcatcctcatgccgtacctccttatcatgagcactccgcccagccatttaccggcttcacagactgccctgtttctcttcttttttcgaaaacaccttaaaaatcccctgcggcagttcaaacacaaacacaatccccaggacgatggccactgccaccttaagagccataaagccagtctgagacgccttgtccagctcatttgtcacaatataataggcggtccaatataccccggctcccggtaccagcggaaatataccggaaatcagaaatatggtaaccgggcaccgctccctgaccgcaaacagccgcgacagcaggatcactacgattgtggcaagcagcgccgcagtcggtgcggtacagctctgaatcaaaatggagtaaacaccccagccggctccgccgatcataccgcagtatggataataccttgtgggaaccccgaacagaagggaaaacgaaaccgtccctccaatggcagccaccactgaaatcaacagcgtcacagcatcacacctcccgtcagttgatggaacacgctgaacacgagtccaacccccatggcaatacagaaaaataccagcagagcgtccagcatccgcacagaaccggagatatagtcgccatccgcaatatccctgatggcattggtaaatgcgactcccggtatcagaggcataatagaaccaataatcatgaaatttaaatgctgccctatggaaaacagatacatcacagagcagagaaaggttaccagtgctccgcctccgatatttccaacgattttcgataaatgaggaccgctgatatacagcacatagaaatacagaagcacaccggatacaaacgccgccgcactgtctgttaaattacctccgaacagcatgcagaagcaagcgcttcccacaccggaagccagaatctgcatggtcttcgtctttcccggcataacgcggatctcatcaagccgttccctcacttctccaatggtataccgtccttccacgatctccctggacagctggttcaccgcagccacccggtttaaatggaccccgcttaccgggatatgctgaaccttggcgaagatctcctcccgcgtgctgccggaggtaatgaatattccattgctcagtacaaatgcattctccgactcaattccgtaatagcggcatattctgtctaccgtctcctccacccggaaaatctcggctccattttccagcagaatatggcccgcctgcatcgcggcatccaagatttcccgctgttcctccccgtttaactcacacgaaacgctcatcttcctccgtaaaggcctccccatccccagtaatctcctgtattctgtctctgtaaccggccgagcagtccagcgctctcatcttccctatcacagaataatctccccagcagtgcatgggaaatacatgttttacatcgactttattcaaaaactcgtccattcccagataaaagtcgtcttcctgcctcggatccagcggcaaaaatgccacatctatatgcatacccgccattttatcaatctgtgcgctgtatttttttgccatggaatcgttccagttatccggctcgccttcccatctccagttatttaaatctcccgcatgatagatcgttctgccttccgcctcaatcagaaacgccacaccttcatccgttgatttataagtatgtatggttaacattccgccattttccagcctgtattccgccgtctctcctggcttcatggaatccgtgaccggtaatgcctcttccggcaggcgcttcctccagatatcaccagacaggacaaaccgaacgttttcatgtttctttatcaactcaaatatcaccggtgaatagtggtccccgtgcctgtggcttgccaataccagaagcggcttttcccgcttcagcccgggaatcactccctctgtataatcaaacagcagataaaccgactccagttccactaaaaaagagctgtggtggatataagtaatcttcatatgacgcctcctttcccgatatccctattctgttataacggaaggcgtttgtcaacttttttcttctgtaaaaacaggggactgccgccagaaatttatcctgtataatcagaaagggcggagacactcgtctccgcccaaataaaatacctttttactgcaacagtttatgtcagttctgattagttagctgctgttgtagcttcttctgttactgtttctgcgtcttcaagagatgcttcttcaacttcttcggaagactcttctgcggaagcatcctcagattctactgcttctgttgtttctgcgtcagcagactctgcatctgtagtttcatctgcagcttcttctgttgttactgcttctgtagttgcttctgttgtaacttcagcttctgttgctgcagttgtctcagcagttgtgccgctgccacatgcagagatagatgccatagttaatactgcgatgcctgtaagtacgagtttctttgctgtcaatttcataattgttctcctccttgcgactacataggtgtctttttgttatgtcttagaattatgtcatgaccttcggttgtcctatgccctcaagtcgagagtcagtttatcactccaaacgtttaaagtcaatgttctttctgtgatttttttcttaattaaaagtcacccgatttcttaaaatttattacaattgacaaaagcggttctaaactgaaaactatgaaaatatactcttgtaaccatactgtacttttttaggtgtccgttatgccatgtgattatgcactattattcgccgttatatcgcagtgttttttgtatatttttttgctattttcctttgtttttgtgtttttaccacgtttatggtggtttccaccccaatttccattatttaccgctggcagtagctttcaatcgcccggctcataaattcggctgtatgttctccgaactgatcgatattttctttaaaacgtccgtcctccacgtacattttccccagtccctccaggatttccagggtgcattcatagtagttttcggtaatatggttcctccatcgttccaccagtccggccgcgcggctgccatccggcgcttccccctcctggacgcactccgcaaattcccggaaaatatcactcatctctctgtttaaatccttccatttttcctcactgtaaccggaagtcttcttttcgctttcgcggtatgcttgggtatcaccccagcgtttcttcgcttcattggcgtactttttctttgcttcttctatctcgtgcatatcaaattcctgaaaactcatggtattttctcctctcatcatactgtccaccagtccggtaagccggcgcagccgctcgatcttcagcaaaagcagcgacttatgggccgcaagcgcttcctggcggtcatagtcaggcttcgacaacatgtccttgatttccttcaggggaaaatccagttcccggtacagcaaaatctgctgcagcactgccagcgcctcttcgtcgtaataacggtatcccgcttccgtcgtgtcggttggtttgagcagtcctatctcatcgtaataatggagtgtgcgcacactgatattcgttaattttgctgtctcgcttactgtcagtctcatagttatcaccgccttcttttttactataatgtatgacgcagcgtgagagtcaagagttttatttattctgataataaatatctactaaaatttacaatagtgctgatttcccatttgtgctttgttttctctatagtataatagagaaagaaagtttttataatgacagaccattaaaaaagtcaaacttatcagtcagcacggcatccatcacagaattacgagaaaagaacgttggcaaacaatatgcggcaaatattacataaggagatttctatgtcagaacgaaagaaagaggaaacatatctaattaatttaataaccaacccgaggcacaaattagaagtggaaaacgcttgtgaaatagtaaaaaagatctggacctctgaagtcagaatagttagagaatacaccgaccatggatatgaacattctcaaagaataattcaaaaattatatgaaataatacagccgaatcctcaaattttaacagaaactgaattgtattttttattactgggggcatatttacatgacattggtatgcagtgtgacattaaaaaatataagaaaattaaaaatttagcagtaaatacttattctgcatcatttaatcttgaattacaagagggcactgcaaactcatattcctctgaagagcaaaatgaaattcggcgtaatcaccatttactaactggtgcatggattgaatattcacaaaagaataatactatattatcaccgtttgttaatatgattgatccatcatacctggatgacttaataaaaatatgcatatatcattcgaaattacaaatatccgattgtacggaaaaatcaaagctaacctctattcgaaccagactggttgctgcattgttgagatttgctgatgaattagatatagatgcatcccgtgtccatattgaaaccatggccgcatttggatataaaacagaaaatgccgtgttttggtatttacattccaggacaaaggtaacaataaaagattccgcagtaactgttactgtctttttaaaccaaaatgactataataattatgcctcatgtattgacaaaatatatatacaaaattttaaatttaaaaacaaaatattaactgacattatttcgcaaaataaaattaacgtttttattagtgaatgctctgaggtcgcaatagatcgttttcaacaggatttacctcaagaaattgcctccacattaaaaaccatgtataaagatcaattaagagcagaatccaaggatagcatcgaattattacttagtatgtccgcagatgaaaatcaagaggaaattcttaatatgttattaggaaaacctgataatttaaattttatgcagaaatacaaaaataactttattaccaatgcacaaaatttaaaatctcttatagatgagttaaagacttcctattttataagcgaaacatctgttgaaaatgctattacaacaataaattctcttagacatggtgtaaagccgggtatttttacggacaacgaagacgcatttactaattcatacaaaatttttctttttgtaaaagcatttaccactgaacagttaacatatttaagtgatattggaatcaaaatcccctgtcaggtatcctccggacaggctctgccatatgcaaacaattttttcaacttttattttaaatataagagtaatcctgatttattagaaatgaaaattaaatcccatgatttatttgattattatacattcgaacaaattgaacggatattacgatcttataataagatcattaatttttttaccaatcatattgaattttcaaattcgtatgtatatccaagtccatcttatggaaaattgcttgccgcaagtatttatggcgaatcaaacaaaattctcatatgggatatcgaaaacaaaaaacgtgaacccatagcagccttaggcggcctgttcgaacctgtcaacaatataaagatatacagacttgacaatcaagtgattattacagcagcagggattcggcagatatacttttggaaccttaatttaaacaatggagagcccatatacattataaaatctattaaaccaatatctgattacttaatctatcgatccataaatggcatattatattgtatgggacttgtagaaagaaatatatttatttgggaactgtataaagaagaacagccaattacatgtattcctgcaggaaatgatgtttttatggtcaatactcatttatcaacagccgaacctgcgtatgaatgtttaggattacattcttacagtgataatgtggaaccgaacataatagaattagttgaagtctctgccttaagttttaatcaggaaataagacttgagatctacaaacatatagatattagcaaaagatccgcagatggctatgcaaatcggctcaattcatatttcatagactcacagggaaaagaaatatttttattaatcaataatgatatttatataggtgatttctgtagctctaatatgataaagcttgcaaatctggaatctcaacgaatattacatgttgtatccaaagtgattaacaaccagctgtatttacttacatacagcatatatcaacaatatagaaactccgtagatttaattcatctttacaaattagaaaataaacaaattgtggagcaccagaattggctgtgcgaaaaaaaagatattgcttacgctgcattttcagcagctgatcaaaaccctcagatttattttgctcatctgttcgacaataaaataaacaaattactatttgatcctaattcctattcagaattttacaccattccagatacatttagtcttaaatgcttaacttcggaatagtatattctgctgtccggtaacaaatacaagagcagagtctcataacccagcagtatttttgtgggttatgagactttttccttaaaagatcctgtacggcttgatctttcatactttttatagcatatgctaattattcgtacgattattacttcattttctaattctccaggtccgaatcttctgtatccgtacttcacccccgattccacatattctaattttgtctgcgtcttccggcacataaaccatattggtcatacaggtcatatagtcatcggtaaacaactctaccgatgcggaatcaataaacatatgaatacggcaggacgcttcaccgaccgagcgaaaagagcagcgtcttttactcttcaaatggtcaaaggtatgggaacgatcaaattctatttcgccaagctttaagtttacgtttacaagaaccttctcctttccattactcttaacctctaactggatgatttcagccgtcgtctccttcaagttaaaatcaattatcatttcacaatgggaattatctgctgtttctatggcaatcccctcttctcctgccgtttcggataccaactctgacggttcagtccgataattctttagctcctgcacaggctcaaaatgcagccgtcccacctcatccagacgcagttctctgggaagtgccattccaccgcaccagcccattttcgatgtataataggtgccgtcacaccacggcatccagttccagctgttcatccagccaatcataatacagcggccgtttccgtctttcgttacctgcggtgcatagtaatccattccccagtcaatttccccatacgtatcccagaaaaactttccggccggataattgaagtccccggttaaatatacagactttctaagattcaacccatgcggcgaaataaacaggatgtgttttcctccaagttcaaagaaattagggcactcacatacagaccctaattcccccagactctcggccattgtattgatgaaacgccagttttttaaatcattcgagcgataaaggagtgcttgcgcaaaatgattctttgtagatcccagaatcatattccactctccattctgacgccaaatgtaaggatctctgaagtctttcttatctgcctcacaaagagtatcagctaaaacagggctgtccccggtctttgtaaaatgaatcccatcatcactgacagccatgcactgtccctgctgcatgccattcctggcatcgagccccgtatacattaaatacaccttctgatcaagttccagagcacagccagaccagcagcctcctccatcgcatttgtcaacaggtgccaatgcaatcggaaggtcttcccagtccaccaggttttcactgactgcatgcccccaatacatcttataatcccctggttctgatacatatggcatatgctggtaaaataaatggtattttccacccagaacggaaaaaccattgggatcgttgcaccagccagccggaacctcaaaatgatacttttgtctcaacggattattcttaatttcttcatgccactccataacataggcagtcgccctcgcagcttcttctatattcttatttacattgcccatttttattctgtaatcctttcttatccttttatccccgactgggcgataccctgtacataatacttctggaagaaaataaacataactatcaccggaagcgtgcttaatgtcaacgccgcaaaaattggtccatagtgaaccggaggggccgtaaacaaagtttgaagtcccagctgcacggtctttgtcctgtcgtcggtaaccagaaccggccacaaaaagtctccccagtgttcgataaactgcagaatcaacacggtcgcatacaccgggaacgataatggaagcacaatcttaaaaaatgcctttaatggagacgctccatcaatatatgctgcctccagaagtgaatccggaatatccacgaaaaactgacgaaatagaaagatactaaagcagttggccgtaaacggcgctataagtgcagaaaaagtgttcagcatcttaaacttaaaaatcataaagtacaacggcagaataatactttccagcggaataataataagtgctacaatcaagctgaacaaaaaatcacgccccctgaattgaagttttgcaagagcaaaaccgcacatggaattgacgattaatcccaatgcaatcataatcgtaacataataaaggctgttaagcattgttctcacgatctcccctttctccaggatagaccggtaattatcgaggctcccgctaatgggcagaaatgccctcacagaagtcatatctgcaaatatattgacctcaggttttactgatgataccatcatccatacaagcggagccaggaacacgacggcaagaaaaatgttgagtgtatacatcagtattcggttaagcagtctgctttttttaattcccactctcgttcctcctctcagtcccgttcaatgaaaagacgtttaagcgccatggataccaataccacaatcaggaaaaagactactgccatggcagatgcgtagccagccttcttatattgaaagccctgctggtaaatataatacaccaacgtccttgtgctgttctgaggccctccaaaggtcataatataaggctgtgtaaataccttaaatgcctgaatcgttacgtaaaccacaataaatgagatcacatttcttaatcctggaagagtaatgtagaagaacttcttcacggaattggccccgtcgatggccgccgcctcataaagttcctgcgatattccatttaatcctgcaataaaaatgatcatctgatagccaactccctgccagattgacataaccagaatagaattcattgcctggtcagcgcttcgtaaaaagcgctgaccaggcagtccaaccatgttcagaattgcgttaaacagaccgtcattcgggttgtataaacatacccataaaatggataccacggttaatgatgagattacaggagcaaaataagcggttctgaaaaacgtccgtccaactatttttcgatttactaaaatagccagacccatagcgattaccgcttcaaccggcacaattactactgtaaaataaaaagtatttcgtaaacatttaaaaaacagttcatccgagagcaatgaagcataattatccactcccaccatctccatgcggtccggtgtcaggacataaaagtctgtaaagctaaaccccaaagccataaatgcaggtataataagaaatagcaagagtaatattagcgccggtgctacaaatatataggctgtatttctctgtctcctggaatagctggatttcatctttctatagtttgcctcacccatttcaccaggctgcctcccttcccatattatttattttgcatacgttgcttcccactctttatcaaaggcgtttgcaatatcatcaagagaagtcttcacatcagcacctaacagaatgtcgtaaaacgcttccgagaatttctgtgtaaagattggatagtttggtgtagccggacgtgcatgaccttcttcaaataaagtttcctttatgatcttattcggtccatcatcataaatatcgagtaaatcatacgcagaataccgcactggcggataagcaggtccatctacggtaaagctcgcacatgcctcagggctggataagtaatgaataaattccatagctgcatctacattctggcagtttggcgtaacgcctactgtccagccgcctgatgtacttcccgcataagcctcttcctgcggaatatacgttaccccccagttaaaatcagcctgttcaagcgtcggtataatccatgctcccgccagcttggtcgcacatttgccttcctgaaactccgtcgctgtaggatcgacattaatcagtccttcatctgcaaacttctggagatagatacccgtctggatggccttctctgaatttatatatccctcagctgtgcttccatcatcagaaagcagctgtgccccgtttgcaactaaaaatggctgaaaagctacaataatccactcaccgctcttctcctgaataaagtttccaccatagataccatctttggtcagctttttgcagacatcataatactcgtcccatgtccaggcatcctcaattttttccggagccgtaataccggctgcatccagcatatccttattataataaatattaataattccctctcccatgcctaccgcatagaaatggccgtcatacgttccctgcgcaattgttgatggaagaaaatctttcatttcctcttccgtaaaataatcttctatcggtataaacatattggaatatgcgtaactcgccacattggggccatctgccatcagaatgtccggaaggctgttcgttgcggcagcagcactgactttatcctcataggcaaaggactctccccgtgtattggcagtttcaagtatctttatcttacccgcatattcttcattaaatttctgaaccatcattgcataccagttggcctctgattcctggctgattggataccagaaggacagctctacctctgtgtcacctgttttagcttccgattcttttaccgtctcggtatttccttctgatttttctgtctctgcaacagccggttccgcctttgtggtttccccctgtttcgtaccacagcctccaagaagggtcgttatcattaacgctgccaataaactgcttaccattctttttttcatagatcatcttctccttttcgtcatatgttttaaaatgtatacgtttacattttttgccaaaaaaattttatccctcctcacttcactcaattttaataatctgcagaatgtaaacgtatacaacttttctaaaaaaaatatactttttaatatttttttgtttttttctttactaaaaagccaattaatagtataatttatattcagataatatcatttcggacatcttttgtcaatatattttgtgcatattgtctcaaaactatttgtatgcatgttttacttgtgataatttaactaaggtggtgtaaatttggtaaccagtagagatgttgcaaaattggccggcgtttccgtagcgactgtatccagagtgtattccgacagcaatgccgtaacagatatcactgcaagaaaagtacttgatgccgcaagacagttgggatatattcccaatacggttgcccgcagcttaaaatcgaatcgttcccgtaccgttggtcttgtcatcaccaacatttttaatcctgttttctaccaggtagcagccgtaattaccacagagctggaaaaattcaactataaggtcattctatcatttaacagcacttatgaacgaagccttttaaaaaatttgcaaacgcttcttgctgcacgtgtagaggccattgcctttactccgttatttgaagattccggagtacttgaattactgaattcctcaaatgtctattcccttcaggttctcgggaatgcctatcagcaattcgactctatcatgtgtaatgactacgctgctacaagcaaactgacacaatatctgatcgacagaggccatcggaatataatgcttatctgccctacagaagacagaaaagagggcttactacatacactggcagtgaatagaattgatttgtatgaaggtaattatatatcgcctcttccattggaaaactccgctgccatcattgaagatgccatcacaaaatatagacccacagctgtcgttgccgttactcaggatgttcttacaacgcttatgattgtcttaaagaaactgcattataagattcctgaagatataagtgtgatcgcctacgatgaaaatccactgtcccaatatgaaaacatcacaacaatcggacataatattcagtacataggcaccgaaataagccgttttctgttggatcatctgcttgaaaggaatgctcctggagactccccccgtcacatatttttggacaccacttttattgaacgttcttcggtcaaggcacttaccaggggaagcaaagatacataggtcatcttctaaaaaagagtctctgaatcccttgccaggcgggaacaggcattacagcaaagaaaaacattcttaaaatcgagtaggagggagtgattaactcccgtcctctcacaccaccgtgcataccgttcggtacacggcggtttcaacagttgacgtgcacggactgataggctgtggctaaatcataatagccactgtttatcagtctttcttttgtcattgccatatttaccgctaccgtttgtgtggtaaaccaatagcctcttcggctgttccctgccttccatgccaattctttcggcactcccattttcagcaggttcttcaccttcgttttcggtttcttccattgtttccatatacacattcggattctgtgatatagccattggttcagtccctctattcggttcttcatatctgctactccataataattcagccagccccgcatatacacctttatcttttctaacgatgggcgtatgctctgaacagaccttcgggaactaaggtctttcagttttgacttcattttcttccatgacttcccatgaacccggacataaatgccctttccgttctttcccaatgtgaagccaaggaacttaaaatttcggattgcaaatacacttactacacggcttttcttctggttcacctgcaatttcagcgtcccttccagatatttcgtgcttgtttccagaagtctctttgcggctctctcacttttagctaacaatactatatcatctgcgtaacgtacaaaagccactcctcgtttctcgtactcctggtcgaactcgttcagatagacatttgccagcagcggggatagatttcctccttgcggcgatccttcctctgtctccatgactacaccgttttccatgacaccactctttaggtatctctttatccattggataaccctttcatcctttacatctctgcgcaggatatttaatagcatttcttggttcagagtatcaaagtatttcgacaggtccaatgcaacggcatgggtgtatccctgttctgcatactcttttacctttaaaatggcgtccctggcgcttcttcccggccgatacccatagctgttctccgagaacagcgcctcatagactggcattaactgctgtcctatggcttgctggaagatacggtctttcacggttggaatgcccagctttcgcattcctccctctggcttgggaatctctactcgtcttactgggtcgggggtgtattttccccttttgattctctctatcagttccttttgattttcccttaggcagtcacctgtttcctctacggtcattccgtcgattcccggcgctcccttattcgcctttactctcttaaaagctctgtttaagttgtccttattcagtatcttctctaagagttccggctgtgcactgtctctttccttccatatccggcggaaagaacggtgcgctctcacatacccttcacgttccgcgctgtctctttgtgagcagctatctctgttttctgtacccaatgttctttcctcctttcccggttgtactaaagactcctgttgattcggtccttcgtctctcgactactatgacctctgctgacttctgtacgttcagcactacctcacgatagtggttatccctttcaggacattccgcacagacctccccgggtaccacacgtttctttctctccatctatctgccacatttaccatacatgattccgtgtggttattgggcttcgacttgtttggcagccttaccctcacgcatggcctgatgtgatttctgttcgtcagaccagagatttgcccatgggttagtatgttccccatatccagcttccttcagattccacctcacgatggacacccttgccttcggctatatccttcccaccaccgggcggattccggacttgcaccggttagaaacgtgcgccgccgggcgcacacaaacaagcgatgatacagggtctgcctgcctcatcgcttttcctttgtcagatcaaagctctcgccaatcattctttttatatccggatccgggaccgtaccatccagtaaaatcgtattccagtacttcttattaagatgatacccgggcagaacgcccggaaatgcatttctccagaattctatccattcaggatcacattttacattcacacaggtcttttcctcacgcgtatagatccatgcaaatacctttttattcttcctgtgccggatcacagcccattccgtatcgtgaaacggatagtcctcgtaaacatccggataagtcagacagtacttaattaaatctttcttcgtcttaaacgccatagcagatccccgcctttccttgattctaaaactgtaatggaacagtttcggaggatttaccggcgctgcgtgttgttggtgcagatgagccgggcatattaattgtactaagtcgctaggattagtctatcatgaatttttaaactcaacaactacatatcggaaattttttatcgtcccccacttctttcatgttttactctgtttgctttttcaaaaataactaaagaggttccgttatggacaactatttaatttctttccgggaaatgattttcctccgcggtctcacagaccataccctcaaaaactattgacctatatcctggcatatcttgattaccttacaaccttcctgcataagcctcctgggctgagatgcgtgattgtgtccgctggctccagaagcctctctgaccgtaccatcagctgtacaatctcgcagttccgtttctttaccattttgtcctacacaagccttggaatgacacctagcttaccatgagacgttttgatgaaccttctccttttgtcccttccaaagaggaagctgctattctcattgactctaaacctgacttaaaacagcaaacaatgactgccctcctatattcctctggcctgcgtatagaggaagtctaccattgtccaaaagattggcttttccctcagcagcggcaccctgacagacctattgataccttttaaattccttccaccccttcggggtgcaggtgaaagctgtccacgacatccccgactgcaaaaccggaaagagggggagggaatctctctctgaccagaatacggatgttgccggatacagcacctcggaaggatctatggcccttcctgaaaaaaatccccttcactgaatagatttttttagacctccaaaagaaggtccacaaagcatcctcttttacaaatgttcccttttttagttgacacacatcctattatcttttaaattagaagtatagaaaacgacatatctcttttgaaaggaaccggatatgagaaacctggtattaaacacttttctgacactcattgggactgttgcagcacttacattatccggctgtcaacagactgaacaaacagccgctcagaatgagaccgttgtctttcagctgactccctccaccgcaggcgttggcgaatttctcaggcagtttaaaggttacgagaccacatacgaccaggatatctgttataatataacaccaaaggatattacagaccgctatgatttttgcatatttaagtatgatacatcctgtggcagttttttgtcgtatgataaggaagtatatccgcttggcatatggtttgggggatacggcgtgacctcctttgctgtctccgacttaaatcaggacggctattttgaactgttcttcacctattcctggggctccggtgcgcatcgctccctcgtcggatactttgattctgccacaaaggaaaccattctccctgatttcatttactggggaaatgatatggtattaaatacagacagcaacgggattttagggatttaccatgcagactgcgatattgaatcctttgtagacattgaaatggaggcgaaagacaggttagcctctattgtatgggaatctcaggaaatatctgttgtggaagagactgaatagcaaaactccccgttgagaacaacgggggattttctttatactgcagccacagccaccaatatacccatatctgtcaaggccggaacctgctgtacaccttccccggctgtattccgcctctgtaactcgccatctcactaaccgtcaccagctgaaatcccatagctttcaattttgggataataacctctgccgcatcagccgtaggaccgtatatatcatgcatcagtatgatatcgccgtcttttacatggccgattaccgcatcaatcgttttctgcttattcttggttttccaatccagagtatcgatagaccaaagcactgcagacattcccatagatcctacggtcttcatcgacacatcattctttgcaccgcccggcggccgcatgagcaccggtgatacgcctcctgccatgcggatatgatcattggtctgctctaactgggactgaatcccggccgcgctcagcttcgtaattgctttatgctcatacgtatgattggccacttcacagcccagtgcggtcatcctcgctaccgccgccgtattggcttttcccttcacccggtttcccaccataaagaaggtggcacatccaccgtttgcctccagactgtccagaatccggttggtaacgggtgcgtggggtccatcgtcaaaggtcagtgcaaccataggccggtttggatcaataccggttttctccgctttttcgccgggaatggctgcaccttttgtaatgactgtcatgcgcattcctgtgattttaagcccgcttccctcctggcctgctgtgccctcatcgtttctaacccagggagaccatgtcccattctgctgaatggagtagcagacatcgtacaaatctttcagtcctccggtcaaccgcatacagagagcggcagccggcgcttttccctccgtatgccccgccatcacagctccagccgtccattccgtccagccggaaccgctcacctccacctggtattccaggccgccggtgacgttctggggcttgttgagtaaaacagcctgaaaacctgtcatataagtaccttccggtgcagtgtacggtgtatcatctgcctgcttatcactccaggcagtgggataattgaatgcctgatagcttatttttacaggctcctccgcccgggcgctgattgcctgcacgggagcctggatcgtacctgcaaagaccagaaataccagtgccaatgcttttattttcctatgtaatcgtttcatcctgttacctcttatctcttttctcttatctttatctgtcttttctttatctgtctttccctcttaacctctaactataatctttagacgagccacaaaaaagaaaagtttcaaccatgtaaaactttatgaaatattttattcctcccgtattatatcacctattccgagtaagcttaaaagggatctgctggaagacagcccgccagaataaacgcattgtttcgtaagagtcaaaataacagtgagaaaaaatcgaaatagcagtaagcaaagatcagaacagcagtaaataaagatcagaacagcagtaaataaagatcaaaacagcagtaagtaaagatcagaacatcacaaaaaagagactcccccaaaagaaaagtctcctgtcattgctctcttgcccgatctgctgcatgcgcccagtcactatatgttaaaacttcctgccgcatttggggcagtactcaaaatcttcttccgtctcatacccgcaggcttcacaatgcttccggttccagccggatgttctgcggcctgcctgtacaagtgttaaatctgtctcggttatatcggcctgttcaccgtgtctcagccgttttccaacctccgggtccagctcataaacagtgctgcagcatgacatctgtacgtaataatggcggttccattttataatgggaatgaaaaaaaggctgaaataggagtatgtcataaaaacctgataccgtccgtaaccgccgcattgcgcacagataacggtcttcgcataattcagcattttcttcccctgactgattccaaaaacgaaaaacatagtaaatctccttcacgagtaaatttatagatttcagtataccatattttttatattctgctaataatctttacagaaatccgccttgaacttttacagacaaaccatttataataagcgtaaactatcacagtctgccatttgcaggccgcaagaggaggaaatatatcttgaaaaaaatgatactggtaacctcaccgccggcatgcggaaaaacctacatctcgaaacaactggcaaaaaatctgaaacacgtcgtctacctggacaaagataccctgatcgtactgtcaaaccgtattttcgatgtggcgggtgaggagcgcaacagaagttccgatttttttgaatccaatatcaggaattttgaatacgaggctattatcaatattgccatggaggcattggattatgatgatatcgtcctgattaacgcaccatttacccgtgaaatacgcagcccggaatacatggaccagttccggaaacggctggcatccaaaaatgcccggctggaaatcatctgggttgtaacagatcccgagatctgccaccagcgcatgatccggcgcaactccagccgcgacacctggaaattggaaaactgggatcagtatatcagcggcgtggatttttccattccttcagccatcgaccggccggacagttctgaggatgacctcctgttattctataactccaccgatcaggagtaccaggaatccatgaaacgaattgttggaattctggaagaagactgctgagtgaaataaaagatacaaaagccggccagaccggccgtatacagaatcttccttactggataatcctgtacacagcagtctggccggcattttatgatcgagatccgattccgctgcggcggatcaataaaatcccgatggattctcagacaaattaatcataatgttcttcatctgagtatagtgctccagaataaccttatgggtctcgcggccgattcccgacttcttgtatccgccgaatggcgcgccggccggaatggcgttatacgtgttcacccacatacggcctgtttcgattgcacggcagacacggacagcccggttgatatcgcgggtccacacggcaccgcccagtccgtactcactctcattggccatacggatgacctcctcctcatccttaaatttcatcacaactgctaccggtccgaagatctcttcctgcgcaacccgcatgtcgttcgtcacatctaccagcagtgtcggctttaagaagcatccctttgccagttctccctccgtgattcgttcaccgccgcaggctactcttgctccctccttctttccaatctctatgtaatccagaatcttatttaaatgtgcctcgtaaatctgagatcccatcatcgtgtccgcttcccagggaagccccacttttacactgttaaacttcgcaaccgcctcttccacaaaccggtcatagatatcttcatgcacaaacacacgggaaccggcgcagcatacctgaccctgattgaaaagaattcccagctgaaggccatccatcgccatatcccatttgcagtccgggaagaaaatattggccgatttgccgcccagttccagggtggatggaattaatttttccgaagccgcacagcccacctggcagcctacttcggaagaacctgtaaatgccagcttccggaagcccggatgctccagcatatactggcctgacttcgatcctctgcctgtcacaatattaaaaacacccggaggcaaaattccgtcgatcagcttcgccagctccaatacgcttaaagaggtatagctggaaggcttaaataccgtacagcagcctgctgccagcacaggcgcaagcttccatgccgccattaaaaacgggaaattccacggtacaatctggcccacgacgccaatcggttcccttaaaatcaggctcagcgtattctcatccagcatggccgcctcaccttcttccgtcctcaccgctccggcaaaataacggaaatggtcggccgcatacggaatatcaatcgccatggtctcccggatcggttttccattgtccaaagtctccaaaagcgccagtttttccttattctgatcgatcacacccgcaatctttaacagcgcatctgccctctccgcaggcgtcgtctttttccagctctcccacgcagcccaagcggcgtccaccgcagcgtccacatcctctctcgtagcttccgcacatgtggacagatattccccattagccggacagtaggatttgaatgtaccgccatcggaagcgtcgacccactggccgttgatgtacaggttatagctctctcttgctacattttccatatcatgtctccttcctgataaaaattttggtgcagggcattctccgcgaccctgccgcactcttttgttctattttcagtatagcagttcgcaaaaacaatagcaacaatagatattttattcataattaattctattatttttgtatatattatacattttctgacaaatttatgttttgatcgataattaactatcaaaatcttttttagattaaaggtacttctgcataacccaaatggcagaatctcattccagataaataaaaaagcgggagaactgccaagacccaagggcctgtcaattctcccaccgttttcctgttaactatctttctgtacttacttctgagcgaccataaaaggtgagcaggtataatccgcagattcctaccagcgcatatacaattctggatatccaggacatgctgccgaaaaggaatgacaccagattaaaattgaagaatcctaccagaccccagtttaccgcgccgataatggcaatggtaagggccgtatagtccaatgctttgttacccatggcactacctccttgttgtgagcacccggcggctttttctccgcctgtgtgcgataactgccgcctctcagagacgggaagaagttcctttccctttgaagtggctttctttttttattatggggaagtttttgggattttatacactttgtactaaattaacagacaatctttcgctgtcttacctcacatcatctgcccagatggtcaatccgctcctttatctcatcctcacgccggttaaataaaagccgctcgttgtactgatagtatctcccgcactcgtattcctgaaggaattttatgctgtaataattcgtattcagttcagtgataaacactgccatctcctggctgtcgccaaaggttatctccataaagtcaaaggcgtgttccagcatggctccgctttcatcaaactgtgtctcatatacttcccgctcacggccgaagtaagactttaccgtctcccacgctgcctccggatccggagcttccgcaaaatggatttctttttcatactgctccaggagatgttccacatcgcgatgcagataatcgctctgacgatttaagagcccggcctgccgcttcttttcccacgcctgtttaaattccttcctcacagtgcaaaggcgcgcttccatatctcccgacagacttccgtcatgcagcttctttaactccgccatcagaatttccagtttttccgcgtctcttaccacctgcttaaatccgccgttcagcttcgagagaagaaggccgatcacattcagcttctcatcaaactgggcgcgctttaacttattagagagagtttcccgtacggaaccggatagaatctcatcgatctgataatcgtcctgatatttataatagagttccagataattggcaaaatccctggcaatcttgggaaactgaaggtactgtccaattacctcgcgatccgtttttttgcccagcttctcatacacctcgatgaggcgtgacaagtcttcccagcctcgcggcgtggcgaacaggcggccgtccaccgttgtttcaatccggcagaacgactccggtctcgcgttcagataggaaatgatggcaggatggattgactgttcatacgcatactgcttccatacctcatagtccggctctacgtgaatcattttaattcgatccagcgtcaccacatcaaaatctcttacagatttgttatactccggcggattgcctgctgccgctatgatccagccctccggaatctgatggtttccaaatgtcttgcactgtaaaaactgcagcattgcaggcgcaagcgtctctgaaacgcagttgatctcatcgatgaacagaattccctccgaaaggccggtctgttcaatcttattgtaaatggacgctacaatctcactcatggtgtactccgtcacgctgtacggcgtcccgccgtactctttctttacgataaacggcagtccgatcgcgctctggcgggtatgatgggtgatggtataggctaccagtccaattccgcattcccgtgagatctgctccataatctgcgtctttccaacccccggcggcccgattaacagaaccggacgctggcggacagacgggatttcataggcgccgtactcgtccttcagcagatacgcttcaatggtatcctttatttcttcctttgctcgtttgatattcataatttgtaaatctcctcctctgtcaggattattttcatcgcccacgccggaacggacacatcttcatactgtccttccacgaagataaacgccgtgtcgtaggccggcatccggacagggtatattccctttccgtcagtaaagtataaaagccctttaagcttcttaaatttcccctgattcatcagtccattgacgtattcaaaggccggcctgaaatcagtcccacccagaccggatatggtaaagttctccatataggccttcatctcgtcctggctggtaattgtctcatcggaccgtatcatctcgtcacactgaatgatgtgaacgttgattttccgaaaataactctcggattcgcacagcacggaatacgtctcctccagaaagcgccgcaccagatccccggaacaggacatggaagtgtccaccacaatcacaaaatcttcgatcctgtgaacttcttttgattccagcggttcaatcagaggcatattgccgtaaagctccattccatacgtgtaaaacacgtagtcgaaggaatcctgatccacctcgttctcttcccggagcacggaaaatctgcgcagaaactgcttgtaatcataccgctcccggttttcaacccgcacggcctccaacagacttctggagtcctccgcgtccttctcaccgaaggattccatctccgtctgcatcttctctctgttattctgccatatattttgacgttcctgacgaatcctgggctcttcttcctcatcccagcggtcatggttatccacgtaaaattctgcggctatacgctcgtattcgtcaccgcttaaattcatttcctgaagcaccttataaatgccttccgccgtcaataccctgagcttttccttaagcttcgcatacacttccctccggcagaccgactggtggcggtacacattctttacgtaaaactcatcaatgatggattctatggcaatgtcacaggccagattccagtacggaaccgcccgttttccccgtgtatccagatggctcagcaggcagtggaataccatgtgaagaaaagcccggttaatcagcactcttccccgtttatacatactcatcaaatgctccggctgataatagataagaaatccatccgtcgccacgccgcgccccccacggtcagcctcaaatccaaggctgcttaaggccacgtccagataacgaaagttcaaatacagctcatttctggaatttgtcagtatatcatggcaaatctgcacctcctccagttcgcagagctgctgctgccgcaaaggatcgatcatacggcttcacctgcctttctcagtttctcttaatagtctacaatgaaaatgttctcttttttaccggaaatcgccgatggcgcaaatccatcagaccgctcagggcttccgtctcgcccttcctgccggccagttcgatcatctcatccagcgtttccttccgttccccataacggtctgccagccagaaaaacgtctctgtgtctctctctgacagcgcccattccgcggctcctcccatatgttccttcaaatattcctcgtacgccccgcgatgctgttccatcaattcggcgggatacctaagccgccccatgacaagcgcacagacgacccactccggctcctggacttttatatggggaaacagcgcgtcgtatttggaaaaccggaaatcggtctgctcaaaacagtaacggtacatgtggccgcagccgtgcatttccctcatgatgatgcgggctggtgtattttccacggattcttcaaacatctccggaaataccagctttgcctggagaaccggatcctttgcgggtgcttccgattccacatagtagttgacataaagttcctgtctcagttccgaaatcatttctttaaaacaggaacggcggtgcagaactatgtgaatatccatgtgtctgatactggtgcatcctgtaaacagaccggagcccacatcttcgatcgcactccagcaccggatggtacccagttcaaagcagttatagaatgcgtagttgccgatttttttaatcgtgcgcggaagaatgatttcttttaagtgaccgcagcatgccacaggcggaagctcttctgcttccacagtaccggtttctgtccccgcttccatcccatgctttgcttttccttcagcatcggccagcagaatcgttcctgccgcctttaacatttcccgccgtccccagccctcggaaaaagcgtacgcagccagctctgttaccggttttccgtctatcgtctcaggaatctcgaccagaccatcgtagcttctgcagccgagtatcgcgattgtttcgttcttaatctgatataaaaacatgaaaaagacgtcctgcctttctgttatacgtatctggagttataaatagtacgattgactgtataacagatgaatataacagaaacagccgggaattgcaatggataaattttcacttgacaaaccaaaaagaaaggtataacctaagaatcataaaagcaaaacaaactgcaacgacggaaccagtacccatcttaagtgcgtgacagagagaaacggcatacctgctgaaagccgttttccgtacagtatggcgaacaccactcccgagcaccggcaaaccaatggcggcgtatcttctgcgttaaggaagcagtgtctcacgtttggacacgagtgaaaaatcaaggtggaaccgtgcatccgatattcatgcacccttggacaggattattctgttcaggggtgttttttgttaaattaaataaggaggatcatcatgaaagtaacgttaaaaaatggagaagtgaaagaatttgacagcccgctgtccgtgtacgagatcgcggcatccttaagcgccggtctggcaaaaaaggcgtgcgccgcggagatcgatggaaccccggcggatcttcgcaccgttgtcgccagcgactgcgcgctcacgattttgacttttgatgacgaaggcggcagggcagccttccatcataccacatcccacatactggcgcaggctgttaaacggctgttcccggagacaaagcttgctatcgggccgtcgatcacagacggattttactatgacttcgaccgcccggaaccattttctccggaagacttagaggctctggagacggagatgaagaagatcgtaaaggaagatttgaagctggaatattttacacttccgcgaaaggaagccatcgcccttatgcaggaaaaggatgaaccctataaggtcgaactcatcgaagatcttccggaagaagaaaccatcagcttttaccgtcagggtgagtataccgatctctgtgcgggaccgcatttaatgacaacagggcctgtgaaggcatttaagctgacctccatcgccggcgcctactggcgcggtgacgagcacaataagatgctgaccagaatctatggtacctcgtttccaaaggcttccgatctggaggcctatctgaccagaatcgaagaggcgaaaaaacgtgaccaccggaaacttggaaaagaactgggtctgtttaccatcatggatgaaggcccgggatttccatttttccttccaaagggcatggtactgaaaaatgctctgacaaacttctggcgtgaaatccacgagcgcgagggatatgtggaaatcgctactcccatcatgttaaaccgctctctgtgggagacctccggacactgggatcactataaagaaaacatgtacacgacgaccattgatgatacggaattcgccatcaaacccatgaactgccccggaagtatgctggtttacaaatcccagccccgctcctaccgcgatctgccgctgcgcatgggagaactcggtctggtacaccgccacgaaaaatccggcgcgctccacggcctcatgcgggttcgctgttttacgcaggacgatgcccatatttatatgacgccggaacagataaccgatgaaatcaagggtgtggtccgtctcattgatgaagtctacaacatgttcggcttcaagtaccacgtggaactctccacccgcccggaagacagcatgggcagcgacgaagactgggagatggcgacaaacagcttaagagaagcgctggatgagatgggatatgactatattataaacgaaggagacggcgccttttacggaccgaagatcgacttccacttagaggattccttaggccgtacctggcagtgcggtaccattcagcttgatttccagcttccgctgcggtttgaagcggaatatacgggtgcggatggcgagaaacaccgtccgattatgattcacagagtgctgctgggttccattgagcgtttcatcggtattctgatcgaacattatgcaggaaaattcccggcatggctggctcccgttcaggtaaaggtacttccgatctccgacaagaacgcggcgtatgcaaaagatgtatacaataccttaaagaagaaccacattcgctgtgagatcgatgagcgcccggaaaagatcggctacaaaattcgtgaggcccagcttgaaaaagttccgtatatgctggttacaggcgcgaaagaggaggaaaatcatacggtagcagtccgctaccgtgactccggtgagaatgtcaccatgtcagtggaagactttgcagaaatgctgaagaaagaaatagaagagcggaaataaccgggaaacagggaggctgggcatataacgccctcctccctgttcttttattcactcaatgcaggatcataatacgcgcctgtgtcgtccagttcatacccatccggcgtgactgtattggtcagcattgctccatccggcccggcatagtaccagcagaaccagcctttcagccattggtttgcagccatgataccgtcttctccaaaataataacgctttcccttatccatcagccaggcactgcttaaaaagctgccatcgccctttttatatttccaatggtcgttttcctgtatccagccaccgtctatggtaccgcctcctctgtcgttcataacataaaaggttcccatattcacagctgctccgctgggcaccacgacgatcagctgagcctttccggcatttttcgcatggtaacggatcgtattgaggccttcctcattcagcacaatttctgctgttatgacgttcatatcggtggtccttatggcggcgcggtgcacccagccgctttccgattttgtgaggatcatttctccgtcagttcccgccatcacagtcgttccatcatacaggaaggctcccgcctcctctgagctgatctcaaagtattctcccgatgtctcaaaaccgtacgcatttaccggcgccatagccagggctgccgtaatcagcagtgccgcaaggcattttccttttctcatcataacatccctcctgaacagataaaaatggttacatggattacatttctttaattataccactattcaggagttattgaagatgaatacagaaaataattacttttttaccttatttatttcaaacatatctgccagcagcagccagtttgcccggaagaagttcataatctgccagtaaccggctccggaaaggccgtattcttttattaaatcaaattttgccttcaggcttcgaacatcttcaaaccacacttcgtgctggattccatactgccagtaacggaaatacggcgtcattgccgtctcatcaaactggataggcacaccgtgatcaatggcagtttctatggcctgaaggttattgattgtctccgcctttgttacgccctgctcgtagggaagagaccagtcataaccgtaattggggattcccaggctgatcttttccgccggtatttccgtcagggcgtactctgccacgcgtctgaccatattgatcggagctacggccatgggtgggccataggtgtacccccattcatacgtcatcagcaagacccggttggccgcctctcccagcagtcggtaatcgatcccttcatagagcagccccctctgatctctggccgtcttaggagccagcgcaacgcttacctgatatccgaacagattcatcacctgtctcaccagcttgacaaattccgcatactccacccggtcctcggccagtacgtattcaaaatcaatatccactccgccgtagcctttctgtgtcatggttcgccccagttcccatatgagagtcttctgcacatcgggactgcgcaccagcgtcgtcaccagattattgttgaatctcccatcctctcccaaaggcgtcagtgtcaggacaggccgcactccggctgccgcagccgcagttaccatccagctgtcatcagccaacgggggaactaagtccccctccgtcgtaaatccataggaaaagacagatagatccgtcagataagggagcgtccagtccaaagtctccgggttaataaacggatatgcgtacccatttacgtgcagagggctcttttcttttccgtttctttcattatccagtaaaagcgcctgacccacggccaggcgatatggatatacaatctgattgtcccacagaagcgtactcacgggaatcccggcttccgcggctatggaatctacattatctccgctttttacaacatatatctgcatgtctgcatccttctatctgtattactacaatatatgcctcctccctcaaaaactgcccgtaacttttacagttctcttccgcgccaactcatgaaattatcagtaacaatctgaaattcccatcgttgtgccgagtccccggatttcttaaaataatattgtaagtttcacatcaatttatggacccagcaatggggagggggccatccttctgtgccatatccatatattcagccggatctgcaacagtttttctgttaccgacgggaaaagtccctcttttgccgttatgatctgcagttcttcagccggatacgacacaagaacacggaaaaggagcgattatatgaataatccaatcttactgagcaacagctggtactttaaaccgcagttctgccaggaagacctctcgcattttgatgcagacgcagactgcgggggctggcaaaaggtcaatcttccgcacaccgtaaaggaattaccgttcaactgtttcagccatgacgaaaccgccatgatttcttcctaccggaaagactttacgataccggcggaggcagctggcaaacgcattattctgcgttttgacggtgtcatggcttattacgatctgtactgcaacggaatacggatcggagaccatcgcggcggatactccatctcatttatggacatcacagaagcggttcgttatggagcagtcaatcatctctttctcaaagtagattctacagagaggaacgatataccgccatttggctatatcgtagactttctgacctatggcggaatctatcgtgatgtctacctttacatgacggagcaaacctatatctccaacgttatggcacgttaccgcctggaggatgactggtccctgactctttatcccgaggtattttttcacagtcatgaaaccgcaggccgtgaagcctccatctgctgccgcctgatccgccaggatggaaccactgttttttcccatacggaatcatgttccgttgcagagggggaatccagttttcaaatgtccccggtttctgccggcatggtggatctgtgggatatcgatgctcccgtcctctacacagtggagaccgaacttctgatcgacggccatattgtcgacagtcattccacaaaaaccggtttccgtaaaacagagtgcaccagccacggattttacttaaacggacagaaaatcaagcttcgcggggtcaatcgccatcagtgttacccctacgtcggctatgccatggggcggggtgtccagagaaaggacgcggaactcatccgttatgatatggcctgcaacacagtccgcacctcccactatatgcagtctcagtattttctggagcgctgtgacgagatcggcctgctggtatttgaggagatccccggctggcattacatcggcggcgaggtctatcaaaacgtggtgatgaacgatgtaaaaatgatgatcaccatggactataaccatccctctatcttcatctggggggtacgcttaaatgaatccaacgactgcccggagctttacaccagaacgaacgaactggccaagcgcctggatccggaccgggccaccacgggcgtccgctatttcaagggcagtgagcttaaggaagatgtttacgctatcaatgatttctgccataaaggcccaaaacgtgaggatgtacttcaaagccagcgccaggtaaccggcctggaccatgatgtaccctatctggtctccgagttctgcggacacgtctacccctgtaaaccatgggacaacgaaaacgtcagggaggaacatgctcgaatgcacgcaagagttcagagccgggccgcctgtacagacaatattatgggggcactggcctggtgcgcttttgactatcagacacatggagattacggctccggggacaaaatctgttaccatggcgtcatggacatgtttcgtatgcccaaatttgcctcctatttatatcgcagtcagaaagacccttccgaggaagttgttctggagacaacctccgtattttcccggggcgaaaaaggcgataataaagtggcgccggtcatgattatgacgaactgtgattttatagaagtagaactgtatggaaattccatcggccgtttctatcccagcaacaactacgtgggacttccccatccgccgatcgagatcagcacccacgacagcttttggattgaagtctggcagggcgctgtgatcactggctttatcggcaatcagaaagtggccgagcgccgtttcgtccgcgatgccagactcaccacactggaggctgctgcagatcagtctgaattgagcagcgaatacgccgatgatacccgggttacgctccgcttcctggatcaggaaggcaatctgcttccctattatccgggtattataaaggtagcctgtcacggcgatattgaactgcggggcccggagattttcccagccatgggcggcatgtctgccttctggatccgtactacagcggccggcagaccgggaactgcttccgtgacaatccacacgctgaattctgaccttccggatcagatcgttaaatttagcattgtataacggtatatagtactatagttgccgtgtcatggttacaacagataagtgaaaaattgtttaaaaggggctgtcgcactgcgagctaaataactcgggtgtgacagccccctttttcatatttcacaaggcttttcctgatagctgcatgttactaagagagaacgctgccggaactgttttttctgcaaacctcattaatcctgtcgattaccgcctgcatctcctcttttgtcacattgccccccaggagcgaagttaccacattgtaaattcccatatagtttccctttaacagcggtaccatagcgtcgatcctgtctgcctcgatcaccccggcttccaccaggaaatccaggtacatcttcctggccaccggatgttcaaacactgccgtatgctggctgtccagataaagtctgcggaacttcttttttgcctctgtgacttctacccggatactctgacgaatatcaccggcattcgctgcagcatggatatagaagcccccctcttccactacccagtctgaggcttccggatcgtaataggcaaaatcacgatatcccagagtaaaggtcagtgtcttcgtctcctgtggctccagttctacttttccaaatgcctttaattccttttccggccgttttaaccgggattcttcatcacttatataaatttgaacagtctcttttccctttacactgcctgtatttgtcacatccacagagacagttaccgtatccgtatccttaaaccgtttccggtcaactcttaaatttgagtattcaaaggtcgtataactgattccatatccaaacggaaacagcggttcaatttttttcttttcatagtatcggtatccaacaaaaataccttctccgtacacatggtggctgcattcacctggaaaatatggataggcgctcgtatcttccaggcgctttggaaatgtcacaggcagtttaccggaaggggtcacctttccgaacaaaacgcgcgccagggcctcgcctaccgtctcaccaacgaggaactgctccacaacagcgcccacatgatccagccagggattcatgacaacagcatcgccattactcaataccactactacacgcttctgtacccgtgataccgcctcaatcaaacggatatgggaggaatcgatttccagatgcttccggtcgaagccttcccgatcgtatgccacccataatccggcaaagatcacagcaacatccgccgccctggctgtctcctcagcctcacggatcagctcatccgatgtctcattcttgagttcatatcctttcgcataggtaagcgttatatcatctccgaccagcttctccatttcctcatagggtctgctgatccgaatcggatttaccagcgtacagccgccgccctggtagcgcggctctttggcaaacgctccgatcacagctacttttttatatttttcctttgtaatgggcagaagttctttctcattctttaaaagcacaacagattcttccgccacttttctcgatagattcctgtggttctcaaaatcaactttatccgtaaaacgttcctgttcctttgccttgaatacaagctccagaatccgctccacactttgatccagaaccgattcggacaggatcccatttctcaccgcatctataatagactgattgttacgccggttttcaggcatatctaagtcattccctgcctccaatgccttgattctgtcctttacgccgccccagtccgatactacgacaccgtcaaacccccattcctctctcaggatatcagtcagcagttccctgttttccgccatctggactccatttaccttattgtagctggacatcacggtccatggctttgcattctttaccccgatttcaaatggcgccagatagatttctctaagggcacgttcatccacatcagaactcatattgattctcagtgtctcggcgttattggcggcaaaatgcttgatgcttgttcccgttccggtcttttgaactcctttgataaagctctcagcaacttttcctgtcaggtaagggtcttcggagtagtactcgtatccgcggcctcccagcgggctccttttaatgttaatccccggagcaagaaggagattcaccttaaaataccggcattcatcgcccaatgcctcccccatctcttcaatcagttccgtatcccaggtggaggccagcgacgcacctgacggatagcagaccgcttcatactggtttgtaatggtgggagaattctgcgttaagtccgtaacctttaagaaatctgaagtgtcctgttttctctcctggttcaccggcttcataattcgcactccgttggaaccgtctgccatccagatttccggaattcctttttcctccagcggtctcgtctgccagagtcctacccctgagcagagggaggctttctcttccaaagttaagctttttagtagttcttttattttttcgttcatgatttattcctttctatccctttacaccactggatgcaaagctttcaataaagtatttctgggtaaataaaaacaatacgatgagtggagccaatgccagagtacagcctgccataatcagggcataatgtgtgctctgagcctgctggaaccgctgaaggccaaccgttaatgtcaacagttcttccttattgcagtagatcaggggattgatataatcattccaggtccatgtgaaggagaacagcagaagggttacaaaccctgatttcgtaagcggcagcataatctgccagaaaattcgaaaatggcccgctccgtcaatctgtgccgcctctgtaagctcataggggattccctcataatactggcgcatgagaaacgtattgaaagccgaaaaaatacccggcagtatcagtgcgtaaaacgtattgtttaagtgcagctggccaaaatagatatacttaggaagcagtgtaacctgcacaggtaccataagtgttgccagatagatcccaaagatcaaccccttgccgcggaatttcagcctcgcaaacccatatgccgccgtagtagacaggcagatcgttccaaccagcgtaattcctgttacaatcaaactgttccggtaataattcgggaaatcactcttcagccacacggtagaataattggtccagttcaccacctttggtatgatacgaatcggaaattccatgacgtcgatctcatttttaaaggaggcagacaccatccagataaaggggaacacacagatcacagcaagcagcgcgacgatcagagtagctccgattcgaagtatcagagttcttgtatttgctttcatatcatctttccccctaaatcgtatacttttctttcagctttacctgcactgcggagattattacaataattaaaaacagcagtaccgcgaccgcagaggcgtagccgatgttatgttccctgaatgcatagtgataaatacaataaaccagtacattggtggaataccccggaccaccctccgttaaaacattaatctggtcgaataccttaaaggaattcatggtagccaggatcgatacaaacagaatattggaagccatcatgggaaccgtaatcctgaaaaaggtctggagcccattagcgccatccaccctggccgactcatatacctcttttgaaagaccctgaagcgctgacagaaagataatcatataataacccgcgtcatgccagatggacatgacgatgataccggccagcgccgaattgctcttcgtaaaccagccaggcagattcttcactcccaatgccgccagaatggaattgaccggacctccctccggatttaagagaatcagccagacgtatgccaccgacaccatggcggatatgtacggcataaaacacatcagccgcagcggaaccttgcagaacacaaacttgttcagcaaaacggcaataaccagagccagacatacggatacaggcacatacgtaaaggtgtagacaaagttattcataagagccgcttttaagcggtcatccgacaccatctttgcgaagttttccattcccgtgaactcaatggcagaaagcccctgcatggggttccattttgtaaatcccaacagcagtgaaaatacaatgggaagtgccacaaaaatcaggattccgataaaattgggtatgacgaataaatatccggcccgttcctcccgaagctggcgtttcgacagtctttgttttgtttttttcatctttctaaccctttccctctatcaggcagctttcattcgcccctgcgaatagaaaaagccgcaaaatacgacctgcctcgaccggctgctatattctacggcttttccttactgcttttatttcccacttacctctttttcaattgcttcgttggtaatcttctcaatttgccccaaaacgtcttctgccgttttctctccattgaaatacaactgggtctgctcctgcatggactgctggtactcggctgctcccagaccggttggcttctggctaactgctgtcatgtcttcaaacagcactctcacatcatctacctccagaccggatccctcaataaaagtctgaataaggctgtcattataggcgggcttataggaaggataatttcctgttcctgccacgcgctccgctccttcttccaccatgtagcggataaatctccatgcctcttccttatgccctgacgttgccggaattgccagaatcgtggctgcaacgctgaagttatcatccgcctgaaccgtatcgtcaaatctcggcagcggagcaacaccgatgcggaaatcgtggggataattctcctgatccttgatattttgaactatccaggaacctgcctgaaccatggcacatttaccgcccagaaatgcggagctctgatttgcttttgtcgcgatgatctggctgaaggaaagctgtaagcccaagtcatccagttcttttctgcgctccagggaagacttaaagccctctgccatgatattacattttccgtcttccgtataccatggggagacctcgtttccaacaggagcccactggccattaaaggtgtgggtgtacgttccgtataccttggaatccccctcgccgctggtgagtttttctgcaatcgccttgtattcgtcccatgtccaggaaccatccggatattcgattcccgcagcgtcaaacatgtccttgttataccagattccttcaatggtggaacggatcggatacccgtatgtcacaccgtcatagcttgcatagcttaagatcccgccaaaattcttctccatatcaattccgtctttttcaataaactcatcgattggagcatacattccatttttcatccgaagcatctgctctccgtcagaccccggcataacatcgatttcaccgccacccatggcaagaatatcgagctgagtcagcttgtcggagccattatcgggaattgcatgatactgtacctcaatgtctggattcgcagcattaaattcatcgataatggagctgtccatcgttacccagtcgtaataatggattacggtcttttctccggaagccgcgctctgggccttctcttcctttccagcttctgtcgatgcagcttcactgtttcccccggttacgccttctgtcatgttttctccgcccttgccggaacagcccccaagtactcccgcggctaagacacaggccagtgttatagttaatgcttttttcatttttctcctcctttgttaactgatgattctatgataactgcctcacagttatttcacaaggaggcctgttttatataagttctgattttttcatgacactccggaataattttagaattgtcctgattatttcatttcacatcatatgactccgttacgccggcctgactgtgttcactgcccactgaataatcaccggaaaccgggaaagtaatgacaatctcggttccccttccagcttcactgaatatctctaaattgcatgcttcccgatagcagagccatagacgcctcatgacgttataaaggccgatcgattccgtcttcttataatcttcatctctggaagcccatagtccccgcagatattccagggtatccggcgccatccccctgccgtcgtcctttacagaaatcaccagatcactgtcatccatgccgcaccagatccagatattttcatcgatatcttccacctccagcccatgcttgatcgagttttccaccagcggctgaagaagcagcttcattatacggcagtcatacagcatttcatctatatcgataaaacagtgaagacgggttccaaaccgcagctttgataaagttatgtataactcaatgttatcaatctcagcctttaagctggtaaactcgccttttatctccatattggaacggaaaaatttccccaggatccgaatcatctcggccacttctttatttccgtcgatctgagctctccagttgatacaatccagagtattgtataaaaaatgaggattaatctgcatctgaagcgcctgaatacggctttccttaatgctgagcaccagttcctgatgaaccagcttattctcatagatctggtttgccagatcgtgtattttctccattgtatggttaaaggaatcatatagatttgtaaactccgtaattccgcttgtctcctgtatcgtcacattaccattttccgcccgtttaaagtgatccgccagcacctttaccggaatggcaatgcttcgggacagcatcagcccaatggccgcaaataccaaaatcagaattacaccgagaatcgcacagacgctcaatacaatagtaccatcacgggtaacctccttctgttctgtcaggcagatgtaattccagcccctgttttcgatctttttctctgccatcacgtaatcggccccgtccacagtaatatatccgttctttttaacctggtactcaaatgtctccccgatcttttccttattccggcagctgatgatccggttgttttcatccagcagaaaaaaacgttttgtgtacacggcagcatcttccgctacgatatcagaaaacatggcggcatcgatgtacaccgtaatatagccaagcgccttgcctacggtcatcacctcattcagcgtattttcctttccactctgggtggaaaatatctttctgacaacaggtatggtgagtacctttgaggttgatttactgtttaaatcatatccgaggggcagccagatactcttgccatgagagttctccacctgatcaaaccattcgtaatcagagatacgggtgctttgattaaatgcttccttacttccaattacctctccgtcattggaaaacagcacaatattaacacaattgtaaagagcggtattaaatctacttttataaagcaaattattattaatgcggatacggacctgatccagatccatgagtccggctccgccgtattcataggcgatcagcgcagactggatgtcactgtcaaatgccagtgttgcagagatattttccgcctgcccgcttaaataatctgccgtctcacagagctgggaaacgagccacgcatccccctccagaattctttctctggcattttccgttatgctcctgcgcatggcaagaccggataaacaaatggtagccacgattgatacaataaaaatcaacagcaggtaggttttgatactggttttctttcccctcatttctcctcgtttccccgaaacctggctatgtaatctgccggtgagtaattatagtattttttaaatgcatctgtaaaatacctgggattcttataaccgaccatctctgcgatctcatagatacggtaatttctcgacagcagcagcaccctggctttttccatgcgaacctccaccaggtatgtcttaaaactgcggccctctgccttcgtaaagatggtagacagataaccgtagctgatgtttaactggttcgccaccaatgcgaggctaagattttcattcccgtattccttttctatcatggttttcgctttggccacgataagatttctcatactgtcggagttttcccacagtgatttccgtattgtgtcgatatcctggctgaaattctttttcagctgttctgtcgtgggatactgctgctccacatcggcataatagcggtgcgcaaaaagatagactgcgccgttgttctccagttcaaaatatttgagcatcttcatgacaatattgcagtaaaaataatacatgtccttgctttcatagtgctccagtacggaattgatctcccgaatctgctgatcaatctcctgaaatcggccgttttcaaaattatccaccatgcggtttttcagttcctgtatgatatcccactcttttttatagatatttctctcccgctcataatggatcacaccgctcttctcctcatcccggcccaggtcgacggcggaccagtaggaagacactacctccgcctcggagtacacctctctcccgatcagtatctgatataaaattcccgtatatttagggaattcccgctttaaatgcatcagcatcccgtttagctgttcgggaggtaccagaatcgcaaaaaacccctgaacatcgttagagagacaatcggaaaagacctgcctgatcatggcttcacaggcctccatctgctcaccggtccggtctcctccctcctttgccctgatgcgtatgagtatcatttcataatattttttaccccggttattcttttcaaacagagaatccatacggacatgcttttccaaaagcttcatcagttcgtattcccgaccgattttctgcctgctgtcaccatctgtcacagacctttcactgtccagattctttttcagtttaaaaaaagcagcctcaatctcctcttctcccaggggctttaagagataatcctccacctttaaaagcagagccttctttgccagctcaaattccccataaccactgataatcacggacttgatatcctttctgattttctttgcctcatcaatcagctccagccctgtcatctgaggcatccggatatccgttagaatcacatccgccgtatggttctttaaatactccagcgcatccattgctcccttaaatgttcccgacaccgaaaatcccatcttctcccactgaataaccttttcaagtcccttccgtattaactcatcatcatcaactatgatcagtgtatacatacacgttcccccttttccggacagactgtcacacataccattatactggacagccatgatacccacaatgcgggatttttgctttttcttctgtttttttcatgaaatcaaaacctgcccggggggatttttgtgtaattgaagcgctttttaatcgcacaaaaaagctgccggaacacagacgattttccgtctgtgttccggcagctttcccgctgtcttacttatgccgcgtctttaaaaagcacctgaataagacgccgactgaatttatcaatgacatccgcatcgccaatgcaaaacttgctcttgaatataccaaccggtccattttacagatctgtgaagaggtggggtttgacaacaccagccacttctaccatctgtttaaaaaggacaccggattatcgcccaaagcattcagggagttgtccagcggaagccagtactaaatttattggcatctgcacaatacagtactggtataccggcacatggcccatactccctgaccgccgtcaggcattatttcccgctttttttcttatgctttgccataaactcgtttcccgccagccggatccccatttccagccacattttcttatcggccggtgtcaggcattccccgatttccctcgggtccatatcggcaaaattaaaatcacaggactgttccgaacgctccattaaataatcagcggtaacgccaaagtaatcggcaatccggcagagcagctccgatgagatatctggaatcggctgtgattctatcttactgacggtctgctggctgacgccaagtaaatcttccagtaatgcctggggaatttttttctgtctcctcaaactataaattctgttttttcccattgtatcaatcctttttctttttattgtagcggaaagactcctgctatattacttatataatttgtacttttaactatatctatgtgttttgttgctgattcttcagaaaaaagtaatgtgaattttattctgcccgttgtataataatggaaaaggaggttttgacatgcagagtatattagtttgtgatgatgataaacagattgtggaagcgattgatatctatctgaccggagaaggttttaccgtaataaaagcatacgacggctacgaggcgctggatctgctggagaataatcaggtagatttaatgatcgtggatgtgatgatgccgggtctggatggtatcaggaccacgttaaaggttcgggagaccagcagcattcccattatcatcctgtccgcaaagtcagaagataccgacaagatcctggggctcaatatcggcgcggatgactacattacaaagccgtttaatcctctggagctggtagcaagagtaaaatcccagctgcgccgttatacccagctcggtaatatgaaccagcagacagccggtcaggtatataaatgcggaggtctggcaattaatgatgataataaagaagtcacggttgatggagaactcatcaagctgactcccattgaatataacattcttctccttctcgtcaagaatgccggaaaggtgttctccattgacgagatctatgaacagatctggaatgaagaagcaatcggcgcggataataccgtagccgtccatatccgccatatccgcgagaagattgagattaacccgcgggagccgcggtatttaaaagtggtctggggagtcggctacaagattgagaagcaataggagagcgtatgaaaagaaaaaaggaacatgcagtcctgctgcacattctttttgtcatcctcgtggtaacgggaatcagcatcatgtacaacaatccccactacggagaaggcatcagctggcttaccaatgagacgtacgaggatacaccggagttcatccgtcagttcaagacggacatcgacgatatctttaactatatcaaatacaaagaggtatttgaatcgaacgggaagctggcctatgacaagcctgtcgtccgtgtgaccaccggtcccggggaagtacaggaatataccgtcgacgagatggtacggatggccaagtccatgggctattacctgaatgaaaagtttaaggtggacggccgttacacaccggaagacggagaacaggacatccgggtggactggcgctcttacgacccggaccatcaggactccgagcccggggaatcttataccaccatggcggacctggcaaaagaagtgcttgcccatgtagggaattactatgcatttcactataagtttatccagaaccccagcaatttaaaattcagggtatcttttaagggtgattctgaggcccccaggctgtacagcaatacggtcattgataatcccgatgaactgaaagcactgggccgttatgtctatgtaaccggcgaatccctatatatcgataccaatttaaatacgacgctgaaaaccatatcggcccagctggaaaagtctaatccatacaacaacagcaattactacatgattgtggctgtaaacacggcgtatcccgttcaggattcctattccgaggcggccagatcttatgaccatatgcgtctgctgtttatcatcggccttgtatctctggccattggtatcctgggttgtgccgcaagcctgtacttccttattagtatgacaggccatatggcttcctgtcaggatgcggttacactgggaagaatcgacaggatcgccacggaaacctgtctgatcctgtttgtagccgccgccatgtgtgccctgtttctgggagaacacgtcgtctacaaggtcatccacctgtttttgtcggaagaacgctggtattacggggaactggccgcacgcctgctgattctctataccatcggcatgatcgcagcattcagcatgatccgccgttataaggcgggaaccatctggacaggcagtctgacaaagcggatctgcgtgaacgtcagtctttatattaaaaatcatcgttttacaacgcggcttgcattgggttatatctgctattttgtatttaactgtgtgatgcttgtggcgggtgcattcgtatattttacctatgacagcatggaatcccggattttaacaggccttcttgctctcgcactgctctgcatggacttatgggttttccatcagctgtacaagaacgcctgggagactgatcagattaatgaagcgcttttaaagatttcccacggtgacaccaaatataaaatcaacgcggaggcgtttgacggaaaagaacgggaactggccgaaaacatcaaccatatcagccgcggcttagagaccgcactgcaggaaaaggtaagcagcgaacgcctgaaggctgacctcattaccaacgtatctcatgatatcaaaacaccgcttacctccattattaactatgtagatttaattaaacgggaacatcttcaggacccaaagattcaggggtacttagacgttctggagcagaagtcccagcggcttaagacactgacggaagacctggtcgaggcttccaaagccagctccggcaatttaaagattgagctgaccaatatcgactttgtcgagcttatctatcaaaccaacggcgaattcgaagagaaattcctgatccgccatctggaactggtctccagttttccggaagaaacagtcatcatccaggccgacggacgccatctgtggcgcgtcctggaaaatctttataacaatgcgtttaaatatgcgatggaacacagccgcgtttacgttgatgtcaccgcggaagacagtcaggtactcttcaccataaagaatgtatcagagaatccgctgaatatcaaaggagatgaactgacggagcgtttcgtccgcggcgacgtggcacgaaccacggaaggaagcggactgggcctgtccatcgctaagagccttacggaacttctcggcggaacgttcaccatctatattgatggagatttatttaaagtgcagttatcctttccgcgtcagaacggaaaaggaacttcctgacacggaaactctcatttcacagaaataaaaaaacagggatattttctggcatccgcctttcaaaaagctgccagtcatattcctgttttttattttccagatcttctcagaatgcttctttatttaggagtgatcagatggacccggctccattttcccgtcagataccgcataaacgaaatggcataattcgccgcccagcccatgggaaccgcgtaccataccgcctgtacgccaatcaccggcgcaaatactgccgctacaatcacgcggattgcaagatttacaagattggcaatggtaaagaccaccacgtctcccgccccacgcagcagaccgtctgtggtcgcttttaagccgataaacacgaagaagaaggagataaaccgcacatatgccataccggtctggaaagcggtctcagcgcttccctcgtttaggaatccgcgtatgaaaagatccccccacagctgcatgattatgcagataaccactgcaaaaaatccgaccatggcatagcagtagcgatacccctgcttcacccggtccggacggccggctccgatgttctgtgcggtaaaggtcgacatggcattaccgatggccagcatgggtacaatacagatcgactcgatcctggtgcccgcggcaaatccggccatgaccgcagaaccgaagacatttaccactgactgtaccaaaagcatcccgatatggacgatagactgctgaagcgtggaagggatcgccacccgcatcatattgaccatcattgtcatgtcgtaaaaatgaaatgcctccgtcacctcatacgttttcaggcgcttcagcaatatggtgaaggaaatcaccgccgacagcccctgagccatcagcgtcgccaccgcaacgcctgcgactccctgatggaaccggattacgaagagcaaatccagcacaatattcagaagcgacgagaagatcagaagatacagaggcgttctggaatcccccagtgactgaaaaatggccgcctgcacattatacatgaacagaaacggcagccccacgaaatagatgcttaaatatacagaggcatccgcaaatacattttccggagtattcatccacgtcaggatcggctcattaaacagaaatcccagtgtgccgagaagaatgctcagtgtcaggaaattgatcagtgtcgtggaaatcgccgtcttcatattccccagctgcttcgctcccagaaactgagatacgaccaccgagcttccgatcccacctccgatggcaatggcaatgaagacattggtaatggaataggaagcgccgacagatgccagcgcctcctcacttacgaaccggcctaccactaccgaatccataatattataaaactgctgaaataaattccccagaatcatcggcagtgcgaacagaagcaacgccctgcccggtgaatcggttatcatgtttactgcttttctgtcttttttcatacccttattttaaaccattcctatccgaatatacgccatccgcagataaagttatttctccaccagctgcttaatgcacgttccacaacacgtccgttactggaggacgcatccactacctttccaccgccggccacgattcccacatgaccgcttacgacgatgatatcacctgcctgaaggctgttgaaattcgtgatcttcgtgtattttcccacgcttcgccagccggccgaggtcaggtaactctgccgtacgcctgcctgattcagacagtagtagacgaaaccggaacagtcaaacgcattcggcccttttgcaccgtagacatacggacaccccagtttggatctggcaatggacagcagtccgctgacaccggagccgccctttaccgttccgcctttggagctgctgctgcctccggaggaaccgcctgaacccgccttctttacgttgcttcccgtcagcttattcatggtctgacggcccacagagccatctgcggtaagaccgttgctgctctggaaagacttcaccgctttttccgtcacctcaccgtaatatccggtaacattggcggaagataaataaccatatttatttagcagctgctgaatccgggtaaccgtctccccctgttcccccagcatcagaccgttggcctgtgcctctgcactgttcagcgccacacgggtcgatggcccgagatagccgtccaccacaaggtcattccttgcctggaactgcttgaccgcagccgccgtatcatccccatacgccccatccggcgtggttgttaagtaccccagctccttcagacgcgtctggcatgccagaaccacatcgctcttctctccataggaaagaaaattcggtttgatctcatcgctgtacaggagattgatcgtctgccgtcccaccttgccgtcgacattcaagccattgacctcctgaagcttgattaccgcggcctccgtatcatctccgaaatgtccggtcaccagatccccggttgccaggtatcccagttcataaaggcggttctgaattcgtttgatgtcatcgccgtcgacatcctttgaaaccgcatagtatttggcggaaggagtcataattgcattcagcgtctccgggcccacaattccgtcctgcgccagatgattctgtctttgaaatgtcttgaccgcagactctgtcatcgttccaaaatactgggtcggctcatcattatccataaatcccagatccatcagccgctgctgcaggcttgccacaatgggatgttccacgccatttcgaagatattccggaacgggattctcgtccagaaccggaaggtccggcagtaccggcaccggctcttctccaattgtcaggatctttaccggctgggggcttttctcagtctccagttcgatcgagagggcagagggctccggcgccgttgtctcctgctccgcaccattcttttttccgcagcctcccagaaccgctgcgaccgccgcagccaggagtactttatgtatgaaagatgtgtaccatcgtgcttttttattcataaacgggattcctttccttttgtcgaatcaggtctattttagcacatttacaggggaaaagggaaggaaatttatctcatacgggaattttccaccgcctgagcgttacatttaatttaccactccattgcacagtcaaaaccaatatgatatactaaatagagttagattttgctaactcagaaaccgaaaggaggttttattatgggtacatctttattatgggcaaccggtggaaccggatttacatttttaatgaccacgctgggcgcgtccgtagtttttttctttcgcaaagaagtcaatgcctccgttcagagaatctttctgggattcgctgccggagtcatgatagcggcttccgtatggtccctgctgattccagcaattgaggaggcgtctctgaatggaggcatcggctggattcctgctgcgggaggctttttactgggtgtgttcttcctgatcgccctcgatacatatctcccccaccttcatccggactgcagcaatccgggctgtaacgaggcggagggcgtctcctccagctggaagcggactaccctgttagtcatggcggttacgctgcacaacataccggaaggcatggcggttggcctgtcctttgcactggctgcacagcacggcaatgatccggcgctctataccgcagccatggctctcgccatcggtattggtattcagaatttcccggaaggtgcggcaatctcccttccgctgcgtcaggaaggtctctctaccggaaaagcattcttccgcggcagtatgtcgggtattgtagaaccagtctttggtatcctcaccgtactggtggcgggcgccatagaacctctgatgccctggctgctctccttcgcggcaggcgccatgctgtatgtcgtggtggaggaactgattcccgaagctcatttaggtgaacactctaacgccgggacactgggtgttatggggggattcgtgattatgatgattttggatgtggcacttggatgatgatattctatgagatgatatcttaagaaaagaagcgaagcggtttttgctatagaccgtttcgcttcttttctaactttctgctcttcttttgcttttactttgctcttcccccgttttttatcaactaaagctttggccagaacaggctgtcatttactgtcgtaaaccactcacagccactctctgtgatcaggactgtatcctcaatattaaacgcgccataggctgcactgtaaaacggcacctcaatagacataaccattccaggcataaatactgtaaattcctgctcttctccaggagccacaaatggccgttcttctacaaatatattgcatcctacggaatgaccacagtgacctctcgtgtacttttcaaagccggatttccgcacggtatcctgcatggcatgaaatacgggttcaaacggaactccaggaccgatcatggaacgccctgcatcgaatgcacggtataatgcctcaaaaatccggactgccttgtcctctggtttgcccaccacaaaggttcttgcaatatctgcctgatagccacagatattcgcgcccccatcaagcctgataatatcattttcttttaccgaaatatttctgggtatctgcacgattgaatactcggtacctattccagagactgtataagcacctattacatcaagatcttgtgaaaacgctgcatttctgtatatagaaagaatttccttctcactcatcccgggaacaatacggtatgcagtttccagcatagcattttctgtaattttcgctgtccggcgaagcaggccgatctcccaatctgtcttaattgccctcgctctgttaagtactttttcgcagttacacaggcttcccactcccgtacaatccgaaagaaagtcccatatatcatgtggtatggaaggactctgcactccgatttttgccttattcgtccgctctgtaatgaaatctaaagccatcttaacagggatcatcatatccggttgagacggcttttccagtccatcatcttccagtccatcaatataaatccagacaggatatgtttccattttaatatccttacactgattttcagcggtctgtttctctatttcattcaggatcagtatgacaggtccttcttttcgtacgaccgccagagtcgtacctattcgcctggaatcatataggaaatggctggcgaatccactggcatacagaattgtctccggctctgtcagaattaacgcatcaagcccttctctttccatctccctctttagtttttgctctatttccaactgatttctgttctctaacatgatttccctccaatttatcagcctttgaccgcgccgctcataaccccttccacaatgtacctctgaagcagaaagtataatatcaggatagggatcattgacagcgtaaacgccgcaaatgccagatttagttccacattatactcgccgaagaatcggtataacataagcggaattgtcttcatctcctctttcatcaatatgtttaatgtaatagtaaaatcgttccaggaaaacagtgcgttaataataactgcagtacaaagcacggattttagcagaggaaatacaatccgaaaaaaagttttcatcctccccgccccatcaatcatagccgcttcctctaattctatgggaaccgtttttacaaaacttgtaaacagcagaatattgaaggaaatattaaatgcggcccggaccatgacagcccccaggtatgtgtttaaaaggcccgcctgttttagattcatatattgcggcagcataactgactggtacggtatcaaaagtgctgtaagaaacagcgaataaataatgttataagcctttcccgtattgcgcgccagaacataggcggccatcgggcaaataataatgagcagaagcactgtcggaacggttgtaataacactgttctttaaaaccacatggaaatttgatgcctcaactgcctggctgaagttttccagatggaattctgatggaaatctcaaaccggtaaatgtaatctgttcccttgtcttcattgaatagacaaaagatatgtaaaacggagacaacataattgccgctgcaaacagcagtatcacattttttccaatggaatatttcctgattatactcatacctccacctccctgctccggaaaaagctggcaaccagaaagctgattacagcaagaaataatgtaaaaagaatagccgccgcctgaccataccccgctttataatacacaaagatatttttatagatatacattgccagactttcggaggatgttcccggtccccctccggttgtcaccatcggatattcaaagaccttcagcccccacgacagaaccagtgttgcattggttgtaaaagccggtacaatcagtggaagtgtaattttaacaaaggtatgaagcgatttgctcccttctacgcgtgcaacctcataatattcatccggaacactcttaatcgcagcaaggaagacaatcatacagtatccagtatctttccaaaccgagattatagccagaccgcgtattaccgtcttaggggaggccagtagatttttcatccccagaatcgagtaacagacatcactgaagatataggaccagatataagaggccagcacgatactgattacgtacggcataaaataaatcgtacgcaggatacggtgaaacctggtgtttctgctaattccgagagccagcagcagaccaaataaattactgaataccacctccattgccgcaaatttaattgtgtttactgccggagctgcaatgctcccatccgttaacacatttttataattttccaatccaacgattgtataatccacgctaaacccatcccacctgcggaaggaatatgggattccctgcaaaaacggcataataacaaaaacaaagaacacaactgcgcatggagcaagaaataaaatgttttgtattgtctttttaaccatcttcttatttctcattcccatcttccttccattattggtattgattttattttgaaattcccgaaaaatctttatcaagcattgatatcagtccttctgccccgatttccggtgttgccgcaaacagctgtaagtcactttcaaacttggatttatattctccgctaaaataaggataactgtctttacttactaccttacccgattctataattgcattcatgtccacaaagattggatccagatccgttgtttccactggtataatcgtaggcacttttgcattttcgtaccattgccggactccttccgctgatgtcagatgttccatgaacttcattacctcatccggatgctttgtctgagcactaaccataaatgccgtatctactccaattggcagcgtattttcctctgcctggtccgaccagggggttgtaaagaagccaaattttccatctggattattctttctaatgtctccgatcgcccaggaaccggtaatgcacataggatactttccgctggcgaataactggttggctctcgaagcatctgttccaagatcgtcatctctttttgcggataatcgtgcggcataaatgtcagcctgtagtttaaacatcggataatcgctgaattttttctccccattttgtatcttttcataaaacttctcatcctcttttgcaaccatacttccaaaagaactatcaaaatccacacgaggatatatattatctttataggctcttacaaaaggaactatgccctgttcttcaaatgtcctgataatctcattaaactcgcttaaagttgtcggcggcttcagctgatattcatcaaacatatctttattgtaaaatacgcctgcaatagatctgtctaccggaacaccatagactttttcgcctacacttaccatcgccttatctacttccgacaggttatcaaggcacttctgtcctgttaagtcaagaacctgtccggcttctgccagttgaataaattgagaaggtttccccataaaaatatccggtgcgtcacctgctgcaattttcgtttgcagcgaagatgcaaactgtgcccatggtgtgactgcctgcacttcgatttcaatatcagggtactgttctgttacggactgtacccatgcatcaattccactcctctttgtctcttccgctgcataatgcatgagcacaagcttaactttctcaccggtctttgactcttctgcggaagaatttttttcttcttcggttgactgtttttgagtactttcgctttgaaccatttcctgtttgggctcttctgatgacccgcatgcagtaagtgctaaagccgccatgaccatgagcatcatttttttctgttttctcataacataaccctcctattcaaataataccgcacataatttgttgtatttatagtatatttgttttttattttcattactatatatgtaattctatattttattagttatttttagattttagttgatatataaacgactttcacttctattattgactttctatctctatccgggtattctaaaaacataaaagcaggaggagacgcatatgtccaagttcataacatggtatttaaatctaaagttcaaacaaaaactgctgctttccttccttgttattatttttctcacaacgctctgtatcagcggtaccaattatgctgtaagcaatttgttaattactcgctatgtatctgattactccattgcgatctccagtcagattgcttctaattttgcttcccgagtcgataatattgaggagacaaactttataaaatatcagaatgacggggcctttaatgagattctccctgtctctgactatacaccaattcaaaaccgcttatcataccagtccgccgttgacaatctcctctattctaccgattactataaaagtattgcttttctggatctaaataactacttgtataccgccggatctgatcttctgtctgatcaaagtatagactattttacagacgaggctcccgaaataaaaaaatcatggggacaatgcgtgtgggacagctgcccaaacggaaacctgttattaaaacgggcactctatcaccttcctaccggtacgtatatcggctgcctctttgtggaaatagacagggattacctgattaaagtgtatgaacagtcgattgaccgctacggcggaagtgttgtaatatttaacccggctcataagcctatgatctctgaccatgacacgtttgaaaaaatcgctctggaggcaatatcaagcgccacccaagccgaaaatcatacagtgaaaatgaatggagaaacgtatactgccgccgtatacaatactcctgacgggcagtggactcttactcatatcgtttccctttctcagctgaccggtaaacttcatgtaatcggatattggatactttttataggatttgctgtatttgcgttggctattgtccttgccttcctgatttccggcaatatctctcaaaatttaaagctgctcacagacagcatgaatcaattctccaacggaaattttgatgagcacattgtgccggccagtcacgatgaatttgccatcattgcggataatttcaatacaatgggacaaaaaataaaagcgctgatgagggaggttgctttggaacaaaagcaaaaacagcagattgagtaccagatgctggagttccaatataatgctcttcaagcacgtttgaacccccattttctttataatattctggattctatcagcagtctggccaaactgaaggatgaatatgatatcagtgactggatctgtctgctcagtgacatgctgagggaaagcattgggcaaaaaaagcgcctgattccactggatgaagaaatatcctatgtcagaaaatatacgactctgtatcaaatgatgtatcgggatcgtgtaacctttatttacaaatcggatccctcactttctttcataccagttccggcatttatccttcagcccatagtagaaaatgccattgttcatggaattgagggaatctcaagacacgggatcattcatatttgcagttttagccaggataatactctgatcctggaagtgtgtgataacgggcatgggatgtctcaggatatgattgaaatgattttaaattccagatactcatcggaagactcaggttctccatcacatgccaaagtaggtctcataaccgttctggagcgcatccgtcttctgtacggccctgaatttggcattcgtattcaatccgtaccggaagagggaacccggattcggattatcctgcctgttgctgtttctctatatcatgatcacaattcagaagaccaggagtgattgaatatgtacaaaatagttattattgatgataatgaactgactcgcaaatcaatcgccaaaacaataaagcggcagctgcccgactgcgcaatagttggcgacgcctccaacggacgggagggcttaagctgcatacagtctgtatgtcccgatattattatcagcgatatcaaaatgccggacctggatggcctgtccatggtgcgcatggtccagtcatccctgccggcttctcagattatttttatcaccggttatcaggatttcgaaaatgcccatgctgccatcaggctgcatgcctgtgccttcctgctgaaaccaatacatgacagccagcttctagaggcaattgcacttgcaaaggatgagattcaaaaaaatgcgccctccatgatacagggttttcaggaactcaatctctttttacagcaaaatgccccggaagcatttgaagaaaaattgtcttctatatacagaaaagccatttatctagtgcaaaaggctcccgatgattcctctgatatactgcttaactgtatgcgccaggtctgttccattatcctgcactacttctggaatctggcaccgcaaaaaattaaccttgatcaggaaaccacgaatctgtatcactttactcaggttccagacagtgaggcggagtggtccgcttttcttatgggctactataaccggctccatctgtctgttgcgagagaacatcagaactacagcctcataattacccatgctttacagtatctcgaaagccactatcagcaggaactcagtctttcagaagttgcaaaggttgtttcagtaaacccctcctatttaagttctctaatcaaaaaagagactggaaaaaattttatagatataattattgaagcccggttggaacacgcaaaaaaacttctacagaatcctagccataggatcaatgaagtcgctgatttatccggatttaaagattatgcttatttctatcaaacatttaaaaaacatgtgggactctctcctaaagaatatcgaaaccagtttctataaatttattataatagatggataacgccggacacttggaaaaattttccttctctgctatactgataccatcacattctgtatacatctgacattcagtctgaggaggaagaatttatgaaaaaactaactgcttcacattacaacgacgccatggcctatgcccttctggaaccggaattcaacctcttcctcatcggagatttagaaaactacggcctggagtcggaaaacgtctccgtatacacggccgacacctggacaggggggacactcccctactttattctggattacaggagcaatttcctgttctacagccataccacagattacaataaggctgaagtagccgaatttctctccgaattccagatgcggaatctgagtggaaaacgggaactgcttgaacccctcatgccgtttttaaaaggtcttgagctggtccctacgtatctggcaagacttaaccagacagccattcccgacgaccctgcctttcctgcaaggcgccttctcccggatgatattgacgcgatctactcactgctaaagcagatagacgagtttttcaccatgcggagtaagacggaagaggaaaatcgggaagatattctgaattccatgacaaatgaaggccggatgtacggtgtctttgaaaatggaacgcttgccgccgtagccgggacctccgccgaaaattccatgtcagccatggtcgtcagcgtcgcgactctgcccgaatacagaggccgcggatacgccacccggctggtaacccgtttgtgtcaggactgccttgccgacggcatgaaatttctctgtctcttctatgataatccggaagccggcgtcatttaccgcaagattgggtttaaggagctggggcagtatgctatggtgagaagtattgataaataatccgaatgcataaaatcaggaatccggcttattgaacttttctgcaaaaaagaaagcttctgcaaaagcactccccgtcaaacatctcgtttgcgctggtgcctttgcaaaagctttcttttcatccgctctattactgtgtgtttcaattcttaaatctcatacttatgtttcagcctcagcctcgccagcgacctcgccagcgacgcctcaaaatgcgaatgttcctggatgctcttactctgtctgagctgctcctcggccctctctctggcctcctcggcacgcctttcatcaatatcctcaggacgttccgcagtatccaccagaagtgtgacacggttattgataatctgcacaaagccgttgcccaccacaccgttaatccattcgccgctttcattcatcagtctcatctcgccgatcgcaactgcaattaccatgtcctcatggtgcggcagaacctctttttctccgtctaacagggggatgatgagcttctggcacggtcccttaaagaacaccttgtcagttgcaatgatctgcagaaaaaatgtatttgcgctcacaggccctcacctctatctgccttcctcggctcctaatgtcttcgccttctcgattacctcgtcgatcgttcccacgttaaagaacgccgcctccggatactggtccatctcgccttctacgatagccttaaagccacgcaccgtctccttcaaaggaacgtactttccggctacgccggtgaaattctccgccacggagaatggctgggataagaatttctggatctttctggcgcggtttaccgtggtcttatcctcatcgcccagctcctccattccgaggatcgcgatgatgtcctgaagctctctgtatttctgaagggtctcctgaaccattctggcaacctcatagtgttcctcacctaccacatccggttccagaatacgggaattggattccagcggatcaaccgccggataaataccctgttccacgatctttctcgacagaaccgtcgtcgcatccagatgggcaaaggtggtcgccggagccggatccgtcaagtcatcggccggcacgtaaaccgcctgaaccgaagtaacagaaccgttcttggtggaagtaatcctctcctgtaactcgcccatctccgtcgccagtgtcggctgatagccaacagcggacggcatacgtccgagcagcgcggacacctcggaaccggcctgaacgaaacggaagatattgtcgataaacagcagcacgtttttatgctcctggtcacggaagtattccgccatggtaagccccgtctccgctacacgcatacgggctcccggcggctcgttcatctgaccgaataccagggccgttttctcaataacaccggactctcccatctcggtccataagtcatttccttcacgggaacgctctccaacaccggtaaagatggaatatccgccatgctctgtcgcaatgttatgaatcagctcctgaatgaggaccgtcttgcctacaccggcgcctccaaacagaccgatctttccgcccttcgcatagggggccagaaggtcgataaccttgattcccgtctccaggatctccgctaccgggctctgttcctcaaatgacggcggatccctgtggatgacccatttctcgccttcctttaacggttcgccgttgtcaattgtctcacccaggacgttaaaaaggcgtcccagtgtctgctcgccgacaggaaccctgattcccgaaccggtggccgttacttccatatctctgcagagtccttcgctggaagcaagcataatgcagcgcacggtattatttcccagatgctgggaaacttccattacgcagcgttttccgtcattatctacctcaagggcgtcctttatgcacggcagctccacgccttcctcaaactccacgtctacaacaggccctaaaacctgcacaatttttcctttattcataatctgtttctcacagctcgtgaggactcctcctctctgttattttttcttcttctttttttgggccttggctccgctgattacctcagtgatctcctgggtaatggcagcctggcggacccggttataggtaattgccagttcatccagcatatcctgcgcactctttgtggcagcctgcatggccatcattctggaattctgctcgctggagtaggattccaccagaccgccatagataaatccggctatatagtttggtacgatggcatcgatcaccgccttgggcgatggcttcatcgtgatttcctctaaatggatgtcgatcggtatgccctggggcacgctgaaattagacttcggaagcggtaaaagctgcgtaatctcggcctccatcttcattgcattgaccattctggtataaatcatgtatacctcatccagtttcccggacaggaaataatccacgattttctcctcaatgatcctcgcccggctcatattcgggttttgcaccgtataccggaaatcctgctctaccggaatcccctttctcacaaaatactgctggcccagctcaccgaccacgaacagcatgggattgccgcccttgtcgatctgttcctgcaccagcttgaatacgttgtgattgtatgcgcccgcaaggcctttgtccgcggttaccacgatatatccgatcttcctgtcttccggcctaatctgcggcctcgtatcgaaatacgggtcctctatctccggtgtatgcctgacaattcgggaaatggtcctctggagcgcatagaaatagggttctgtatcggttaagttttttctggcctttttaagctttgacgaggaaatcgtatacatcgcattcgtaatcttcatcgtactcttgatactgttcatcctgctttgtatctctctcgcatttgccatatcttacacctgcttctgtttatttgtttcaattcacatttcgagtttgcagatcaactcaaaatgatgccattgtgttctgtttaaattctttcacaccgtctacaatgctctgcttcagctcgtcggaaagaactttcttctcttcgatctccttcacgatttccggatacttctgctcaaagaatgtcagcatttccttctggaagcccttgatctttgacacttccacatcgagaagaagccggttattagcggctaccaggctgatgacctgatcatgtaagctcatcggatggcagagcggctgttttaacatctccgtcagtcccttgccgtactggatcatctcctttgtcgccggatcgaggtccgaactgaactgggtaaatacttccatctcacggcactgcgccaggtcgatacgaaggcttcctgccgcttttttcatagcctttgtctgagccgcgccgccgacacgggatacggaaagtcccacattgactgcaggtctcataccggagaagaataaatcgctctccaggaatatctgtccgtccgtgatggagataacgtttgtcgggatatatgccgaaacgtccccggcctgtgtctcaataatcggcagcgccgtaatagaaccgccgcccttttcctcactcagcctgctggatctctccagaagcctggaatgcagatagaacacgtcgccgggatacgcctcacgtcccggagaacgctccagaagcagtgacagcgcacggtaagcaaccgcatgtttcgacaaatcgtcataaacaatcagcacatcttttccctgatacataaaatattctgccagagccgttccggaatagggggcgatatactgaagcggcgccagttcactggccgttgaggacagaacgatggtataatccatagcgccatactggcttaatgtgttcaccatcttcgcaacggtagaagccttctggcccactgccacgtagatgcagattgtgtctttgcccttctgatttaaaatggcatcgatggcaatcgaggttttaccggtctgacggtcaccgatgatcagctcacgctggccgcggccaatggggaacatggagtcaatggctaagattccagtctccatggggaccgaaacgctctttctgtcaataatacccggcgcctcattctcgatcgggcggtaatcatcggacttaatctcgccttttccgtcaatgggggcgcccaatgcgttgataacccttcctatataagcgtcgccaaccgggataccggcacgtttcttcgttctcgtaaccttacatccctctttaatctctttatctgaaccaaacaggatgcagccgatgtcatcccgtctgatatcctgtaccataccttttacaccgttatcaaagataacgatctcgccgtacatggcgtggtcaattccataaatcgtcgcgattccgtcaccgattccgatgactgtgccgacctcctggtctcttgcatgtacgtcataatcttcaatctcgcttcttaagatggaaataatctcatctgaattgattgaacccacgcttctcacctccgcatcaatatttgctctaactgtttcatacgtccttttatactccagtctgtctccacatcgccggtgcggatcacaaatccgccgcccagactggaatccttaacaaggcggagttccacatcctgtttctggtatttcttcatcagcatctgcttaattttcttaagctgctctgcgtccggctccgtcacgtaatacaacgtcgctcgcagactgccttcctgttcgcatgcataggcatggtacgcctcgaagacgtcttcgattaagtccatgtcctgatgtccacagagcaccttaagaaaattcctcagctctgccggaaatacccggtcaatgacgcggtttttttcgctttttttcaccacagggctcacgagggcttccttcagctggggtacctcgaggaacagcgcttccgcatctgccaccatttccttcggaaccttccgctcgtaaagcacctgtccgtaattatttgctgcctgcgtcatgagaatcacctgcttctgctatatactggtcgtagagtgcctggttcttcctgtcattcatctcgccctgcacaacctttgcagcggccgcaagtaccagacctgcaatctgcgcttctgcttccctcattgccttttcctggtccgcattcgctgtcttgtgggcattttcaatgattctgtcagcctgttctccggcttcttttatcatgcgttcctgtacggtcttcgcctctgcctttgcctcttccacaagcctctttccttcttccgccgatgccgccagtttctcttcatactgacttttaagctcagaagcctgagactcggattccctggcatttgtgatgctttgatccaccaaagcctggcgcttattcataatatccatcaccggtttaatcaggaaatgcttgagcagaagatacaggacgatgacattgacgatgttccacacaaggttaaaatccaaacgtaacatcgaaatcgcctgcctttctatctatattcttaacgttttgtctgtcaggcattattttaagaataagatgattaacagagcaataacgaaaccgtaaatagcagttgcctcggcaagagcacaaccaagtaataaggacttgctgatctttccttctgcctcaggctgtcttgcgattgcgtctactgcctttgaagttgccagaccaatacctacacctgcacctacacctgttaaaactgcgatacctgcaccaatagctgttaacataataattatctccttttctctttttaattgttttgattactccaacactttggttactccactacttctttgataaagagggcagttaagaatacgaatacatacgcctgaatgagtccgtcaaagatgtcaaaatacatgctgaacggaatcggtatgattggcgctacgagctgcttaatcagctccatgactacaaatgaaccaagcacgttgccaaaaagccgcatacataaagacagcggtttgataaaaatttccagaatattgatcggagcgataatcgctaccggttctgcaaagctttttacccatcccttaagtcccttcttatggaagcccgcgtattcaatcaatacgatgctcataagggcaagtgccgcagtcgcattcaaatccttggttggcggtttaaagccgattaagccgatcagattcgcaacgccgatatagatggcaacggatatcagatacggaatatatcttcgcccttcttctccaaccagatcatcaaagaatttgtaaatgccgccgattgccacttccagcgccagctgcttctttccgggattctccacctttaaatttctcaccaggcagatggaaagtatggtcagcgccgccatgataatccacgataccactacggattcagcgataggaattccaccaaataccggaatggtaaataccgtttcgcagttaagttcttccattaacctctctgccaaatcctccgtaatgctcacttcctttcattaagactttctaataccattataatacttgtactcatatttgtacattaagtataccgtgtatcatacttgcatctgcaacaattgtcaacttttccgccgcttcttaacaaatcgttaatgagactaattgtttgaacatttggaacaattttcccggagttatttctgaaattcttattaaatttttaaggaaattatgaaggaattatgaacattattaatttgaaccccatttttcttaattttataccaaaaatcatttcagtattttgtgaaatttgaccgtgttttttttgtgtttttcatttccatcgtcattactacctaaacgtcaagttaatattctgcaaatgatagataaaaaggctatccccatgggacagccttttattttgaccatcaaaacttacaaatggctcatctatgttttttataatattttcgaaaaactcttcttattaaatagcttattctcccgccttaaagttataaattggttttatcacctgtaaaatttttaccgtggaatcgatgtagttcacaatatcatccatggcctcattgtacgttccttttaccgttttcatctgttacctctatgccctctttcccgttaccaccttgctttttttaccgattttaacgcccgatgctttatactggctgcatccggcgcagcatccctttttatctgcataaagccctctggcgcatatgccaaagcccatatagtaaagacatacttcttctttgacctgtctcattgtcatccctcctgaactaaaaaaagagcctcccggctcttccaacatctttcctattcctgtcattgtctctttctctgatcctgtcgctaaaatccgcttattacaagcggtaggatgtcaaatacttcctgtaacccctgtgcattgcctgaattcctgtatcgtccgtcccggacgcttcacattcctccggctacacatcaggcagttcgttcacctctcattggcggacgatcaggatggaccagtttaagactcagccggctggctgttggttgaaaccgtatgatatcatctgtatgcagctgtatgatattttgtgactgtatgatctgtgtttgtataaagaatgaatagccgcgtttcatcgcaggtcctcctctctcttttctttcgattacagtattcctcaccattatggcgtttccattactctatcatggaaggttatggaatgcaagggtatgactggaagtgtaaggattatgtaaggattcataaagataccgctataattggaatgaggactttcacgcgcttgcggtttatggtatgatagagacaacgcaaaaactaataataaggaggtttcccatgggagaaatgatttcttcattcgacggaacaaagctttactttaacagagaaatgccggaacaggcaagagctgctgccgtcattgtgcatggactctgcgaacaccaggggcggtatgattatctcgcagatcttttccatcaggcaggcatcggtacatacagatttgaccacagggggcatggccgttccgagggtgaacgcacgtattatgatgattttaatgaacttctggatgataccaacgtagtcgtggatatggcgattgcagataatccggacctgccagtcttcttaattggtcacagcatggggggattcacagtagcattatacggggctaaatatccggataagaagctgcggggtctcataaccagcggcgctctgacaaaagacaacggcggactgattaccggtgttccaaaagacttggatccccacacccttcttcccaatgagctgggagcaggtgtctgctctgtagccgaggttgtagactggtatggaaaggatccctataataccaaaaccttcacaacgggtctttgctacgcgctctgcgggggactcgactggtttagtggagctatccgggactttacctatccggtgcttatgcttcacggagaaaaagacggacttgtaagcgtaaaagatacttacgatttctttgcggaagcgccgtccaaagataaacagatgaaaatatacggcggtcttttccacgaaatctttaatgaatactgccgcgatgaagtgattggagatgcgatccggtggatcgaacagagaatataaattcgtacagggcggctaaaacagccgccctgtctgttagtgaactccatttccccatttgcgataccattcctgtacacggctgcagtctattcctatcattccggctgcatcttccgctgagaaccccctgtcatacatatttttagctgtaattacagaccgattttcatctccccgaatgatacccatggcctcacccgttttaattccttctgacaatccttctgacagcccctccattctgccatcctcaatcattccacgtatcgcttcacacatattgatcttcccgcctttctccctgtaccgctcttttacttcttccagctccctggattccgtcaatgcactgattacatcatacgcgtcttccgcaagttccttaaaccgttcttcattctgaaaggtaaacctttttgcagcattcttatccgctgccttttggataaatccaaatacctctctcaaatccgtccggaacctctctgtcttttcaaaatgcctgacttctaaaatatgtatccggtaattattaagcattccccttatttcttccggaattccggttaaatccagcatctcatataacgaaccggccccccgccatggttctgtaccataatacagaacgatggtaaaaaccgctttcagccgatcctcttttctgattcctccaagaaattctttagaagaaagcttttttagccttcgattttgtctttgaagcgttcgaagctgttcatcatatcctgccgcatcttccagcataatccgcaccggcattccataatgaatcagattctgatgttccaggccaacgattataaagttcattccaaagatgatcttcctaacggcatcccggtatttttgaatggtcacccactccttaaaccgcccaagcagtccgtttatcacaggattaccactcactatatcttctgctttaacaatctgccggccattaaatatatatgcattaatcaggtctgcataccggtactcatcctcgaaatactgtgccagcgcaacatcacactttcccatgttttacctcctgttcctgctacagttcaccggatcagagaaaaaccttttattacgctgtcgaagacgctacaaatacagccccacggccttcgggagcatttcttctctgtcattaaagcatataagggatctactggctgaactgcccgaactggcctggttatggccttgaatactagatttttgacttttatttttaacgcaagctctttttatactttaactaaaagtatattttatccatttatagagtaccacaattcagtttctttttcaagcatatttttacatatcagtcaattaaaaaagagtcccttctgttctgactccgttcaaaagagtaagcccaccaggcgccggctgtctgaattcttacaaaaaggccacagaaaacagcgccgccctctggcggccgctgtatcctgcggcccttctattcatgtattcaatggcgttttacaaaacgcccttccttcatgatcaccttcatattctccacgcagatgttcctgatattttccagtggattcccgtcaagaaccagtaaatcagcactcttgccttcctccagtgtaccggttacgtcatcaaccttcagcatctcagcgcctactttggtagcggcaacgatggtatccatttcgctgatgcctgcacactccacgaaggagtacatctcacccattgcggtataaccgtatggcgtcagactggagcagaaggaatcagaaccaatggtaagaccaatgcctttctcttttgctcttcttaagttagcgtaaacacggtttaattctttttccacgacatcgccgccctcgaattgatcatggatttccggtacgtatgtcggcggatatgtcttaaaccattcgtgtaagaactggatcgtcgggcagaagtagatacctttttccgccatgatatcaagacactcgtcatttaaagcctggccgtggataatcagatgaacaccggcctttgcgcagtctaatgcaccgccaaagccttcacagtgagcccacaccgggattcccaccatattgcattcgtctacgaccgcctggatctcttccatgcagtaatgctgatccagcttctggtcccagcgccagattccgccgccggttgcccagattttaattgcatcagggttatcacgcagtcttcttctcactgcttttcttaaatcccacggcccgtcgattctctctgcccacggatggcccaaatcattatgctcttttaacagtttatgggaatctccatggcctgctgtacggcagaatccaagaccggtaccgacaacacggggaccttccatgattccggcttctaccatatcgcggattgcaaggccgttgcgtccgatctcgccaaccgtggtaaggcctgtttccagacattcgtgcgcctgctgaacagctacaacagccttctgctcaacactttccagtacccagtcactgtcgtcatccgttaagtttccggagaaatgcagatgagtatcgattaagccgggcattattgtctttcctgaaacatcgacgatttcatactccggtccaacttcttttcccgctcccgcataggcaacttttccgtccctgaccagaaccagggaatccttaactggctccgcaccggtaccgtcgatcagcagtccgccgacaaatgcggtatcttttaattctttcttcatggtaaaacctcctttaaatgtttgatatattattttttctgagaaaacatttttaaaatgagaccaacgatcagccagcccgccacgatcagccactctaccggctttaaggccgccgggcttatcggaataaccatcaatgcgataataatggaaccagccagacaggcggctccgattcccagcctgccgccaggtactttatacggtctcggaaggtccggttccgtcgtcctcatgcgaaggcaggcaaagcttaccatagtacaggagaaaataaatgccagtgcggatacattggtcagaggaaccagcattttctttcccagaaacggtccgacgatggtcagacaggccagaagcgtatttgccattttgggagcaccgcttttgggatcgatttcagcaaatttctcaggaagctggccttttctccccattgccagcatgattcggctggtggctccaaaaaaggagttcatcggtcccatcggccctaaggttgcgataaccagcataatgacatacaggatcatattgatgtctcttaagcaggccagagccggaacggaattctttacaaaatcggaccacggaatgatggttccgaaggaatagatacagatcatgtagaaaccgccggcagccaataacgccatactgatcaccttgccgaatttattccagtcaaggccctccgccgcttcctctgcctgctgcggaatcgtatcaaatccggcatagaagaacggtgtcataacaagaacggatacgattccggcaaacatattggtcgcactcgtcgaagatcccgctccttccacctgtccgaacgcaggtaatatgttgtgcgggccgccctttacaaaggaaatagccatagccagaagcatgcctcccagcagcgccttcgtcaaaaacgcctgcagcttggcagcggaacttgcccctttaaaattcagaaaaatcacgtagcatgcaaagcccagcgctatgatggtcgggaacagatagacatcagcacccataatggtatagagctttactgaccgaagaaacggcagcatgtcgccaaacatgtcggaaacaagcgtcgagattgcgattgcctcccacggacacaggataccgtttccaagtgccagaaaccagcccgttatgtaagaaacatttttgccgaaggttctgtcgacatactcgacgattcctcccgatatcggtatcgctgccgtcagctccccgaataccgcgccaatcggcagcagaaataaagcgccgataaaaaatgcaatcattgcagcgacaggaccgccgccgataatcatccagtcaccaaccaaaagcacccagcccgtcccgatgatcgcgccgaaaccgattgtgaagtagttccagatggataaggttttctgcatacccggcccttccggagctgtctgtttggaaccagccatagaattaattcccccttttatttggtatatgtgtcacttgacaaaagccattttaactcttatgattttatagtcaattgtctgtgcacaaaagacatttttcatgtcagaaacggcacctgtttcgttaattttgatctgttcgcccggcgaattggttcagagaggagaagctttatgtataaagttgcaatatgtgatgacaatccggcagacttacaattaataactgattatctgacagaaccagaatttcattatccgctggaactgttctccttccatgacggcgtagagctggctcatgcgtatcaaaaggaaggtcagtttgatttaatcatcctcgatatgatgatggaccggttaaacgggatcgaaacagcactaaaaatacgaaaagtggatcaaaacgttgccattctcatcgtaacggcaactgtagaatacgccattgaaggctataagatcaacgcggcccgctacattgtaaaaccggtatcaaaacgggaatttcaaaagatcaccaggaatatttttgccttcattgataaaaagagaggggcttattaccgttttcccagcaaaagcggaactaccgtcatctccatggaagacatcttctattttgagtcggacatccgttccatccacatctcttccagacagggtgactatacctttaccggacggatcagcgctgtggaagagcagacggaaggccatggatttctcagggtccataagagtttcattgtaaatctaaagcacgttcacaatatttttaaggattccgtaacattagataatggagaagtgattcccttaagccgtcaccgccacagggaagtaaatcagaaatttttagattatatggaggagcagatcatatgacggtctattaccagctggtgctggacacgattctttcctgtgccgaaacactgattctgtttcagatgtaccgcgcttttttaaggcgtaactcccgccccaacaaatactattatctggggcttttttcatatttcgtttttcagcttgtcacgtacgccggccgctggcccctgttttcggcctggatctactatctgctgtttacgcttttgctggcatgcctctttttcgcggatacacttcagattaaaattctcgtgacatacctctttgtcaccctgcattattcgtgtaaactggcctgctccacattttttatggcattaaagcacgcggatctgccgtcggtcccctcccacctcattcaaagcccgctgtcacagatcgctgcctgcatcgtttttattctgtttacctggctgttcatctatttccgcagcatgcgccgccacaataaatacaacctgtattccgccatcacctacttagcgccggccggaattctctttatcgtcattcatcagttctatctgcggaccgccggtcagaccgctccgttttatctgtcggagtccggaatattgatgtgtacctcctttgcgctgttctatctgattgacaagaccgagatgatcgacgaagccagtgagcggagtctgatggcctccaagctgctggaacatcagaaagattattataagagtgtggagaagtctcagcatgaagtggcagccatgcggcacgatctgaaaaaccatctgcactgcatcgcttcctttatcgaactggaacagtatcatgatgcgcttcattatatcgaagagatttacgcgaattccaggcacctgtcttctaccgttaacatcggcaacaatctgatcagcattctgctgaatgacgcgaaagagagggcctctcagaataacatacgcatgacggtaaacgttatggtacccccggatttaccgattgacaatgtagatttatgcgtgattctgggtaatttactggacaacgcgcgggaagcatgctgccgtatggaaggcaatgaggaagaccgttttattgaggtggaaattgtattcaggaagtcttttcttattattaaagtaaccaattcctttaacggccagtacattctgaaagaaaaccggtacgaaagcgtcaaaaaggaccagcatttctgcggtatcggcctctccaacgtgcgcaccacggtagaaaagtacgatggagaaatgaaggtcacccccaatgaaaaggaatttgtggttacagtgatgttaatgctgctgggaaactgaaaggccggaccgccgcaatcccttcttcacctgaaatacagaataaaaaaccaggaaagagaaaacaatcttgctgaaactcggattgttttctttttcctggttttttatttttccgtcatcccacagtctgtccttcttccatttcttctattaaagaaagaacattttccagagagcagaacctgtcataatcaaagcaaaggcatagctgatcaccatacagatctgaagcacccgcggagtctttaagccggcatttacatccctgcggaaaatcaggcggcagacgaagaatccgccgaatggtgtggcgactgccgtcgcaatattggcaataaagatcagctgggtgggggaaccgccgtagctgtagcagatgactgccgcaaaagcgatgcagagaagacagccccagcggataaactttgtctccagtcccactggtttatcaatacccgctgccagcagtaccatcccacgctgtgtattgccaagcagtgatgaaaatcccgccgccagcagtgcaatacccataacgaccggcgccgcttttcctaaaaacggaatgagaaggtcgcccagctgagccggtgcctttatagccgttcccgttggatgcagcacaatcgcgccaaccagtacaatggctcctgatatcaggataacggcagcaacatgggcaatggcatccgcaagcatgattccgttaaataaatcttcttttttccacttcttttcaacgccgagatacgttccgtaaataccggcggtgatagctgcattggtacttatgtacgccagtgctgtcgtgaggctgccttccgcaaccgtccagtgagtcagcccttttccaagttctccccacgccggcccgcctgtggcagccagtgtggcataaaaacagacaatcattccaaggatacacagagtaatcagcttttccaccttggaataaacccctttcgtgaaatagcataccaggataatcgcaatcataataagggatcccagcttccagttcattccgaagatcagattcataccggctcccgatcctgttatatttcccattgtaaagaacaggcacgcgaaaaatgtagccatgccgacaatgaccgccgccccttttccatagtaatggcggatggcatgaatcaccggcattcccgtaagcatggagatcctgtatgtcgtcagcatgaatgtaatgcccataaatgcaatgggaacgacaagccatatcattgagtatccatagttggatcccaacatcgcagatgtggtgatatttccgggcccgattacaacccccgccagaatgatacccggaccaatacgttttaacagttccagaaatgatgcttttttgacttttgtctggtcaaatgcttcccccatatcttcacctctcctgcaaaaggcggcaccggctgcttccggcgccgcctttcacaatcctttcacttctctgaaattctctgttttttgttactgattactgaaactggctcatgtccaccttttccatgccgctgttcttaagccccagtgcgatccagtctttttcctcctggttcagcggaagcaccggtttgcgcattaaaccgctggagaatatacctcgctgtacaagagcttccttcagccgcgcatgggcctcgccggatggctgaccgccgccgtaaatagcctgtgaaatatgatagatccggtcggaccagtcctgagcctcctttaatgtgtgcttatccggattagcaaatacctcgcgggccgggcagatgatctccggcacgcagcctgcaaatccgattaaagcaccatccatgcccgggaaccaactgacacacagcgtctcatcgtggcatgtaattaaagaaatatccgggcattcctgacgaagaaggcggacgtcgtgttcatagatggaggtaacgcgtgttcccatcttgatgcattttacatgatcgatttccctgcacatcttaatcagtgtctctaccggataaaatgccttgctggtagccggatagaggtggatgatgatatcgatatccgcgccttccgccacatccttcacatactcaaacggtgcatccgcatgcatgccaaagcgcagccacatgtgaggaggcattaacaggattccgtcagctcctgcttcctttgcttcttttgccatctcaatggattctatagtattttcacagttgacaccggagatgatggtcataatatcaccgcattcctcactgcagatctcaaccacacgcttccgctccgcacgggacagacctgtaatctcgcctgtgtggccgttgcataccagcccctggattccctgattatagaaagtcttcatccagcgaaggtaagcacggaactccggttcattgattgtatagtcgtcatttaaaggtacggataccgccgggaagattgttttaaaattttttacttttgccataattttattctcctttttattcaataagctttctctgttttcttcattctgattttcatctgacacaactgccagccctgaacctgcttcaccatcgcgcgctggtgtttcggctccgtttatgcaatcgtttgtatgtctgtagctcctttataccatactgcagggcgacggtcaatagatacgggctcacctgcaatttattgcatatgacctacaaaaatttgcataaagtatagtttaatatgtttcaatccaatatttttgtatatatttacccgcttcttcaataaaacaggctgatatgtatcagcacatctgttcccaaatgtttctcctgtaattctttagcattttgcttgtatttcgctttcatctgtattatattggtattataggcaaacgattgtatataatttaaaaaaacaaggaaaaggattgatattatggctacattaaaagatgttgcaagactggcctgtgttgacgtaagcaccgtttcccgggcgcttaacaatacttcctatgttcatccggacacgaaagcccggatctttgcggccgtaaaggaattaagctatcagcccaacgttctggcccaggggctgcggcagggcaagcgccatacgatcggggtcgtagtaccccgccttcatctgacgctgtttgccgatattacccagagcattgaatcagaatcccgaaaacttggatatgcaacgcttatctgtcacacagaggatgatccgctgattgaaaaagagtgtctgaaccgtctgcgcaatggtttcgtggatggcattatcatagccggtacaggacgcaatggccacctgctgcgggatatccacgccggaggcatcgcagtgacccagattgtccgaaaacaggaaaacagtatcagcagcgtcatcgccgattacgatgcctgcggctacgatactgtcaaatatctctattccaagggctgtcgggaaattggcctgattaacggcaccacaagcctcgccccgtaccgggaacgttataacggctatcaccgggccatggaagagcttgaacttacagaaacctgcgccacctctcccatgccgggcaacaactttgaatacgggtatcagtgtaccgaagatcttttaaaccagaatccgcatctggacgccatcatggcggccgtggatattcaggggatggccgcgatccgcgccctaaaagacagaaaaatccgcgttccggagcagatccggctggtaagcttaaccggtcactccattggcggactcttagagacaaccatgacatcactggaaattcccgcccacgaaatgggagaaaaagcgacacatatggtcatcgatgaaatcgaagcgccttccgacagcaaaccgagcgtacagcacctggtgttttctgcatcgctggtggagagggaaagcagctgatcctatatcgtaaaaattatcccgtgacacaaacgagaatcctgctgaaagaattctccgcctgcggcgggccgcttcattgaggtaattccctgccgcttccggcagtgatctgtaaaacgaaataaaagccccaaccccgcaactctctgtctgcaaaatcggaactttttcgtgcgccttcagggactcgaaccctggacaaatagattaagagtctactgctctaccaactgagctaaaggcgcttctcttcagttttgtgtgcctgtctcggtgacacgtgtgttattatataactgcgtttgacaaaagtcaaccccttttttacaaaaaatttacagctctttcataattatttatttttcttctttttcggggaggaagtaccgagaattttgttcacttccacgaaggatttcttccattgcagtgccttcttgttgagctctgtcttatcgcttgtcgcctggagaagttttacggttaccttgtctttcattcccatatggaccgctcctgtcatatcctgttaacgttattctatgacaggagggtcccggcgtgccagtccttttctttaattctttttctttatttgtttctttttcgctctgccaccagcttgaatatggcatttcccatggaagaaaacttctcctcatattccgtcatgatatttccccccgccatatcggaatggtgcagatcatacgtatactctcgtatctcccagcccgctgccggtatggactccagggaataatcaaacagtccccggttgtccgtcttaaattctacgacgccgtccgatgccagaatcttatcatacacttccataaacggttccgacgtcaggcgccttttcgcatggcggtccttgggccacggatctgagaagttcagataaattttctttacctcacccggggcgaaaatctcggaaagctctctcgcatccacacacataaagtagatattggaaagctccatctcccggcgtttctggatgcctctcaggaggacgctgcagtaccgctcaatgccgacataattgatttccggatttttggcggccagctccataataaaccggccctttcccatgcctacttctatctctattggattatcattcccaaagacgccgttccagcgccccttcttctcttccggattggataccacgtaagggctgtttgcgatctcttcctccgagcctggaatatggcgtaatctcatatctatctcctccagtacctgttaatttttcgttctgattgtaccatacaatacgatccgagcgcaagtacaggcccatttgacagaaggatcattcttgttttgggttattttttacttttctcttacaaataaaaaacttcaaaataataggtgcacaattagagataatctagtataatatctgtatattggtatacgatcgttttttgcaaaggaggaagcatatgggaactacagacaacaacacctggaccaggatccagcaaagtgtccgggagacggaacgtctcatcggccagaagcagtataatctggccatgatcaaatcccgccagacactggaatttatggtaaactgccttggagaaaaggctttgattgtagatggggatctggcagacagtattgaccagctgttcgaagggcactggatatcacaggccacgaaagaccactatcacagaattcgggtactcggcaacaaagctgttcacgacggaaatgacagccctttcgatgcgaacgaagcgttccagcttctttcccaggaagctacagcctttgcagatatctatagcggcagacgccgcagtaccacgcccaccagaccgcagcagcgcccggcctcgagatcttcacagccggctcagagaagcaccggccagagaagctcgtctccccagagaagcggccagcgaacagcgcagagaccatcttcggcgaaccggagcagacgacgctcaaagaaaaaaggatttgatccctacgatctgttaagaccggcagtgatcttcctgattatcctcgttgtcgttctggctgccatgggactctttaagctgtttggcggtaaggatgataagaaggagacaagcgctccgtccacctcaccggaagttaccacagaagcgactgcagctccggaaccggctacagaaccagaacccgctacggaagcgcctatgatttataagaccacggcaacacctaatctgaatgtcagagccgaaccgtcaactaccggcgctgtgttaggaaggcttgcccctggtacagtggttgatttcgtccagacttatgatcagcagtggtcggttattatgttcgagggcaagcaggcctatgtatccagccagtatctggccgcagaagaagcacctcagccatcagatgccggtacagaagcgacaactgcagcccagtaagctctaaaatacagaatcacggtacgatccatgactccgcggaaaacgaattatttacgcggtgcagacagacgtcatatggcggctatgtctgcaccgcgttttttaatagtgaaacgtatactctcttcctttcttttgctttcactgattgaaccttccatcattacccagaaaagctaatttttgataatttttcatcaaaaaaatgaaataatattgaatttccataatttttaatgacctatttctaaaattactatggaaaatttttaaatttgtagtatgattataagttgaaacttgtgtatttgcaggttttatcataatcagtcattccactaagctcatgagagacctcattatgcccgatcataagggatacgctgaatggatgtgacaggaattgcacgtaagcggccgcaaacgcccgccaggtgcttataggaaagaggagggcaatatatggatactgtgattgaaaagatatccgagatcgaatctgctgccaccgggattatggaagatgccaacgaacgaaaaaaggcatttgccaaagaaatggatgaacggacggcagcttttgatgctcagttggaagctgagacgaataaacggattgaagaactacgggccagaatggagatcgagatgaacgaacgtctcgagaaacagcggaacgattcccagaacgtccttcgcgcaatggaacaacgttaccaggaacatcacacagaatatgtggaggaactatttaaaaaaatgataaaggagtgatcatatgggaggcctgctatcctacagcggcatcaccaccaaggtccgggccatggagagccatctgatcaccgaccgccagtttggcgagatgtccacgcttgaatctgtatctgacgcagtggaatacttacggcggctgcccgcttacggcatgattttttccaatctggagggagtcgacttacaccggggtgccatcgaacagcgcctgatactgtctcaataccaggattttgcaaagctctatcgttttgcgaatctctcgcagcgcaaattcctggatttatatttcatgcactacgagatcgatatcctgaaaaaatgcttccgcaatgctctgggccaccagaagcctgaaatagacttatccgtatttcaggaattttttgagaagcactcaaagcttgatcttataaagctgtcttcagctggaagcgtacaggaatttatctctaatttggacgggtcgatctattacgatttactgacccatttagatgatgtggaacatccctccctgtttgattacgagatccatctggatcttctgtatttcaaaaccatctggaaggtcaagggaaagtatctttcccgaacagaacagaagctcctcaccgactgcttcggcagcaaactggaccttttaaatattcagtggatataccgttcaaaaaaatactataacctgcagccggcagacatctatgcactgctcattcccatcgagttccatatcaggaaggagcagattacaaaacttgtggaagccggaacgctggatgagttcttccatgcgctgcagacaacctactacggcagactggaagaaatggatgcctcggatcagactgaactggaaatgctggccgaggaagcgcttaacaaaatttacagtgccaccagccgcaagaatccgtattccattgccacactgaattcatacctctattttaaagaggaggagattcagaagattattaccgtcatagagagtatccgttacggcgtcagcccggatgaaattctctcctatgtggtaaagaaccagtaaagggggttactatccgtgatagaaaagatgaagttcttaagtatcaccgggcccaaagaagacatcgaccgggtcattgacacgtatttgtccaaatacgagatccatttggaaaatgcactgtcagaattaaagacggtaaaagacttaagaccatatattgagattaacccgtacagggacacataccagcgtgccgctgagctggtggaactgcttccggccacagcgccgaagaccacaaccaccgcagtttccattgaagaggccatcggcactattgaaaaactggacgcgacggtgaaggagcttacggaaaaagaagccgtgctcaccggtgaacgcgattccttacaggaatccttagacaaggtagttccctttacggggcttaactacgatttgagttcgatcctgcattttaaatatattaagttcagattcggacgcatttcccacgaatactataagaagtttgagagctacgtctatgattccatcgatactgtgctctacaaatgccgtgaggacgaggaatacgtctgggtcgtctatttcgtgcccgagaccatttccaaccagattgacgcaatctactcctccatgcacttcgaacgtttcttccttccggatgagtacgagggcacgccgttagatgccattcacaccctggaggacaaaatctccgcgctgcaggcggatatcgacagcatccacagacaaatggccgaggtactgggcagtcagcgcgataagcttctggcctcccatgacaagctttccactttctccaccaactttaacgtcaggaagctggcggcgtgcacaaagcagaacgtcaacaccttctatatcttgtgcggctggatgagtgaaaaggaagccaaggcgttccagaaggagatctcaaacgatgaaaagaccttctgcatcgtggaggatgaccacaacaatatcataagcagaccgccgacaaagcttcataatccaaagctgtttaagccgtttgaaatgtttatccagatgtacggccttccggcctataacgagatcgacccgaccatactgatcggcatcacctattccttcctcttcggcttcatgttcggagacgtgggacagggactctgtctccttctcggaggctttctgctttaccggttcaagaagatgaatctggcggctatcatctcctgctgcggcttcttctccaccatattcggcttcatgttcggcagcgtgttcggcttcgaggatatcatcggcgccgtatggctgcgccctatggaacacatgacgaatctgccgtttatcggtaaactgaacacggtatttatcgtggccgtctccatcggcatggggatcatcctgctgaccatggtgcttaatatcatcaacagtctccgggatcatgatccggaaaaaacatggtttgacaccaacggtgtggcgggtctcgtgttctatgcgagcctggttcttacaattgtattatatatgacgggcaatccggtaccggcgaccattctgttagtcatcatgtttgggattccgctgctcatcatgttcttcaaggaaccgcttacccatattctggaaaagaaagcacagatcatgccggcaggcaaaggcatgtttgtggttcagggattttttgaactgtttgaggtactgctcagctacttctccaacacgctttctttcgtcagagtaggcgctttcgcagtgagccatgcagccatgatggaggttgttctcatgctgtccggcgcggaagccggcagccccaactgggcgatcgtcgtactcggcaacttattcgtgtgcggcatggagggcttaatcgtgggcatccaggtgctccgtcttgaatattacgagctgttcagccgtttctaccgcggaaccggccgtgcatttaaaccatacggaaagacaaattaaataaaatcgatcaggaggtatcttattatgtcaactttagtcaaaataaccttagcagcagctttaatcttaagtatcgcagttcctttcggcgcatttgccatgggtgagaaatccaaaggccgttacaaaaaggcgctgggtgctaacgccctcttattcttcggcactctgatggtatccgcagtcttcatgttctccggcagcgcagtggctgctgaaccggctgccgcagcttccggcgtggcaggcatgggatatttagctgccgcactttccaccggtctggcctgtatcggcggtggtatcgccgtatcagccgctgcatccgcagctcttggcgccatcagcgaagatggttccatccttggtaaatcactgatcttcgtaggtcttgccgaaggtgtttgtctgtacggtctgatcatttctttcatgatcttaggtaagttataatcgatgaaaatgtatttaatcagcgacaacatcgacacctggaccggcatgaggctggccggggtggaaggtgccgtcgtccatgaaaaggctgagttaaaacaggaactggataaagtcctggccgacaaggagatcggaattgttctactgacagaaaaattcggacgggagtttccggacatcatcgacgatgtaaagctgaaccggaagctgcccctcatcatagaaattcccgaccgccatggtaccggccgcaagccgaactttatcacagattatgtaaacgaagccatcggattaaaactataggaaagaggtggtcatcttgacaactgaggaaaaattacagcatttcctggatttctgtatggaagatgcgagaaaccgcagtgcaaagatgctcgatgaatataccgccgccctggaacagacctttgaagagcatcaggcagatgcgagacggagagccgaacagcaggtggaactggaaagcgaacggatcgaacatgagacgaacaaaaagctttccctggagcagattggcatcaaacgggagctcggacataaacaggaagaactgaaagacaaaatttttgtggagcttaaggatgtgctggaacagtacatggaaactcccgaatatacacagcttttggagaagcagatccgccacgccagagaatttgccggaaacgaattctttacgatctacattgacccggcggacgagacgagactgaaccgtctggcgctccacaacagcgccgacatccgcgtgagtgagtactccttcggcggcggcacacgggccgtcattccctcccgccatatcctgattgacaactctttccagacaaaactggaggaggcaagacgggatttccgctttaacttaaaggatctggagggaggtatcaccaatgaataatactggcacaatttccggtatcaacggccctgttatctatttaaagggcgaccccggattcaaaatgaatgaaatggtttacgtcggcagggacaacttagtcggcgaggtcatcggtctcacctccgggcgcaccatcgtccaggtatacgaggaaaccagcggattaaaaccgggagagacggttacggcctcgggttcaccggtttccgtcacactggctcccggcattttaaacaacatattcgacggtatcgagcgtcctttaaccgagatcgcaaagaccggcggcgcctatatcgaccgcggcgtccatgtggactccctggacggcgaaaagaaatggaacacccacatcaccgttaaaaagggcgaccgtttattcccgggctccatcatcgcagaggttcccgagaccccggccattgtccacaaggtcatgattcctccggacatggaaggctacgtcctcgatgttgtttccgatggttcctacacgattcacgatgaaattctgacgcttcagcttccggatggttcagagaagaagcttaccatgacacagaaatggccgattcgagtaccgagacctacccttaagagatatccggcttcccggcccctgatcaccggccagcgtatcatcgataccttattcccgctggcaaagggcggcaccgcctgtatccccggcggtttcggtaccggcaagaccatgacccagcaccagattgccaagtggtccgacgctgatatcatcatctatatcggatgcggcgagcgaggcaatgagatgacccaggttctggaggaattctccgagctgatcgacccgcgctccggcaatccgttaatggaccgcaccacgctgatcgccaacacctccaatatgccggtggccgcccgtgaggccagtctttactccggcttaaccctggcggaatactaccgcgacatgggctacaacgtggctatcatggccgactccacctcgagatgggcggaggccttaagagagctgtccggacgtctggaggagatgcctgccgaggaaggattcccggcttatcttgcatcccgcttatccgcgttttacgagcgcgccggcatgatgcagaacatgaacggaacggaaggctccgtcaccattatcggtgcggtatccccgcagggcggcgacttttccgaaccggttacccagaacaccaagcgtttcgtccgctgcttctggggccttgacagaaacctggcaaatgaacgtcatttcccggcgatccactggctgagcagctattccgagtatctgaccgacttagccccatggtatgtggaacatgtggacaagaaatttgtcgattacagaaaccgcctcgtcttcctgctgacacaggagagcagcctgatggagatcgtcaagctgatcggcggcgatatgcttcccgacgaccagaagctgatcctggagatcgcaaaggtaatccgaatcggtttcctgcagcagaacgcgttccataaggacgatacgtgtgttccaatggaaaagcagtttaaaatgatggatttaatcctctatctctataaaaagtcacgttccctcgtctccatgggcatgccgatgtccgtgctcaaggaggacccgattttcgataagatcatctccatcaagtacgatgtacctaatgacagactcgacatgtttgatgactacaggaagcagattgatgccttctatgaatccgtcatcgagcgcaacgcataaggaggcggcataaaatggcaattgaatatttaggcttaagtgctattaacggccccatggtcgttttagaaggcgtccaggatgcggctttcgatgagattgtggaaatgactgtagagggacgggaaaagaaaatcggccgtatcatcgaggtttacgaagacaaggcgattattcaggttttcgaagggacggaaggcctggctttaagaaacgttcataccagactgaccggccgccccatggagctggcggtgtctgaggatatgctgggccgtaccttcaacggtgtcggcgagcccatcgacggacttggcgacatcagctccgatatccgtctggacgtcaacggcaaaccgttaaatccggttacgagggagtatccccgtgactatatccgtaccggtatctcggccatcgacggccttatgacgctgatccgcggccagaagctgccgatcttctccggcaacggacttccccacgacgatctggcggcccagatcgtaaagcaggcatcgctgggcgacgacgcgcagtccagtgagaagttcgctgtcgtgttcgccgccatgggtgtcaaatacgacgtggctgacttcttccgccgcaccttcgaggaaagcggtgtttccgaccacgtggccatgttcatcaacctggccaatgacccggtcgttgagcgtctgatcactccaaaggtggcgcttacgctggctgagtatcttgcatttgaaaaaggcatgcatattctggttatcttaacggatatgaccgcttacgcggaggcgctccgtgaggtatcctcatccaagggtgagattccctcccgaaaaggttatcccggctacctctacagcgagctggccgccatctatgagcgcgccggcatcgtaaagggacgccacggctccgtgacccagataccgattctcaccatgcccaacgacgatatcacccacccgatccccgaccttacgggatatatcacggaagggcagatcgttctggaccggaacttatacggccagtccatctatccgccgatcaacgtactgccgtccttaagccgtctgatgaaggatggaatcggcgagggctttacgagagcagatcatcagggtgtggcaaaccagctgttctcctgttatgccaaggtaggcgacgcaagagcgcttgcctccgtaattggtgaagacgagctgtctccgatagacaaaaaatatctggtattcggcaaggaattcgagcgccgcttcgtcggccagggaaaccatgccaaccgtaatatcatagagactctgaccatcggctgggagctcttagggcttctcccgagagcagaactcgaccgtatcgacaccaaggtactggatcagtactataagccgacaaccgcagaagcttccgaagaataggagggacgcgtatggacccgaatacatttcccacaaagggtaatttaattctcgccaagagttccctcacgctggcccgccagggatatgagctgatggataaaaagcggaatatcttaatcaaggagctgatggggctgatcgaggaggccaaggggatccagtctgagatcgacaccacctttacagcggcctacaaggcccttcagaaggccaatattgagttaggcatcaattacgtgcaggacatcgccgcagccgtccctgtggacgatacggtgcgtatcaagacccgcagcatcatgggcacggagattcccctcgtccagcacgaggaacggcccttgaatctgacgtatgcctactacagcaccaaggaatccttagacgaggccagataccactttgaaaaggtgaaggagcttacggtaaagctgtccatggtggaaaattccgcataccgcctggcaaacagcatcaagcggacacagaagcgcgccaacgcgcttaagaatatcacgatcccgcgctacgaggcgctgaccagaaacataacaaatgcgctggaagaaaaggaccgcgaggaattcaccaggctgaaggtgattaagcgaaacaaaaacagcgcctgatacacgaaaaagcatcagatcccgtcacagggctctgatgctttttcagttaaaaatcagcggttcgccgcttcctccttctccatccgcttatacggtgagatatcgtggcaggccagaaggaacgcttctctgtccccccatcggatccgcgaagaatcagccagtgtccagacattcagcaccgggttatagacttccagtatgctgctttcctttccggcgcattctctcacaggacagtgctcacacggctcattccgtttaaagaacgcctcgtagcagcacatgcccagcctggtttcaggcgcaatctggtacgttttctcattgatatacctaagctgatacgtctccccgtcgatgacatagatccaggaattctgattattcaatatgccctccagattctgcatggattcccgtaacttgtcctcggccctctttttcagcagaaatgtagacagcattttagacagaaacacgagacagtcaatctgctcctgtgtccagattctcccagcctcacactcatcaaaacccacaaatcccttaaaaacgccttccgctgtaatcgaacactgaagcattgaactgattccctgttctgcgagcatgtactgcagttccggtctcagctctgcaatatcaagacagtagaacactccctcttcattaaaattatcccggtaatctcccccctggtctgtataggcaacgttccgcagttttgcacgctgcggcgttatcccctccctgcaccattcaaacgtatttgtgcagaaatcatcgctgtcggtgcagttttcaaatatataaacacggctgacatgaaacattcttcccgttatctcgagaatagaattcatcgcccggtcgaaatctgccgcatcatacagttcctgaaaggtcatactgattaccctggctacagttccctgccctctgtgctccgtattctcccgcatctcctccggtctgtccgcctcttcttttaattccaaggcagcattcaccgctggcctgcggtactgcatccagcggttcttcccctcaagctttgcctggtacagcgccgcatcactgttctgaaagaggctctggaaatcgctgccgtcctcagggctgtacgcgataccaatactgcaggaaaaaggaacgtccttcatattatttttgaacatggtctgaagggacgccatcagccgcccggcccgttctgtaaccatctcatggtttactgttccgggcatgaaaaccataaattcatcgcctccgatccgcgagataatatcactgtcacggaaatgggaggttattctggcggccagttccgtcagcaccgcatcgccaaacatatgcccgtaccggtcgtttaccatcttgaaattatctacgtcgataatgagcatggccgagccttccctgccctggctaagctccagaaaccggttgatcttatgtctggccgcccgtttattgtacagctttgtcagtacatcccgttccgccctgtcgattaatttttccgtttcccgcttctcatcatcaatatcctcgatgatgccgatgaccttatccgtatttcccgccggatcaaactgtgcagtcgcccgtactctgcaccagcagtatcgtccctctgcgtttgcaagccggaactccacctcgccaagctgtctgcccgtcatcatatcgtttgtaaatttcatcacatcgggaatatcgtccggattgatgtgggaggcatagggcagccggcgcctgatcccttcgataatcggctgatacccgtatttacattcccagttgctggaatacgagatctcatccgtcgtaacattccactcgaagatcacgtctttcgtctgattcagaataatcttatggcgttccaccgactcctgcagcccttccatggctttccgggactgcgtaatatccaccaggagtgtgtagatgtactccattccgtcctcttccgtcaccagaatactccggtccatgacccaaatcagccttccatcctccgtaaccagccggtattccagctctgcaatacgcccctctcccatctgtgataccagcccctggcttaccagatcccggtctgccggataaatgacctctttatagcggttatggtatttatcgcggatcacctgctccgtacagccggttaagccgtgcagcccttttccgttgtccgcaaacgtgtaccatttgtcatttctgcactttatgactccgccggccagccggccgatcaccgtctcacgaaacaggtcctcctctgcgcaccccgaatgcgggacctcaagcggttcatccgatgcccggtgccagatcagcatcacctttttctggttcggattaccggggtccacccgcagcagggtggcataacaccagtaatatacgcctgccgcctggtccagcacccggtattttctcgtcctcctcatcaggccatccgaaaaaaattcctccatataatcgcccagaaggcccagcacgatatcccggtcctcgggatagacagcgccctgaacgaaggcttttaccgaatcttcaaatctgctccccgagcgaaggagttcaaaatcgcggtcaggcatataaacgacatggtagacccctgtatttaaatccacctccataactgtggaatccacataccgaagcagtgtcaaatacttcatctgtccctgttccagcgtaccggcggtgtcaatggtactggatggccgcacttcttttctttccggtttcttcgttggagcaagtccgtccgcatatgccctggacagcgctgcaaaatcctcacggacattcttaaagcactccagaagccgtggggaaaactcgccgcattcgccgttcagtatcatgttaaacgcctgctccggcggaagcgcctttttgtagacacgatccgtggtcaatgcgtcgtaacagtctgcaatagccacgacctgcgcacagatcggtatattatccccctttaagccatccggataaccctttccattccaccgctcgtgatggtaacggcagatattataagcgtagccgatatactctttatcgttcatgcgttccagaccggaaagcatctcacacccttttgtggtgtgagtcttcatcacctcaaactcctcccttgtcagggggcccggcttgtttaaaatggagtccggtatcgcgatcttgcctatatcatgcatggacgaggcatctgcaatgatttctatggttctgccgtctaaattatactcctggtaggtcttcgccacatcctccagaaggatcctggtaaacatgcggatcctgcgtatatgctggcccgactccacactccggtattcaataatggaggagagggcatcaatcatgatggcgttggactctctcaggctggccgactgctcttccaccagttcctccagatgaagtttgtggcggcacagctccactgcattctgtacccttctttttaccacatggggttcaaatggcttcatgataatatccgctgcccccagatcaaaggcgcggacttcgctttccgccgtatcatctgaggttataacaataaccggaatgcgcgacacaagtccgctttttcccatctcctccatgacctcatagccgtctttcaccggcatgaccagatccagcagcatggctgccacatgttcctcatactcacgaagcaggagaagcgcctgctcaccgttttctgcttccagaagattatactgatgctcaaaaaggcttcttaagattgcgcggtttacctccatgtcgtccacaatcagaagggtatcacgcgttttcatccacccatatcctccatgctgttaattgcggcgcacactgtttcgtaggtctccttcacacccggataggcctccagcgccccctccatattattgcttctcagctgcttcaccatctctgcacaggcatccatcaaagcgacaaatcccagattcccggctactccctttaatgtgtgggaagcagtcagcatctcctgactgtccctcgcttccactgcgtcctcaatctttttaaagctgtcatcctgaaggaattttataagaaatttttcatacagcatgctgtttccgctgaaacgggccagtgcctcctccacctccaccgatgcctgctttaagatatccaatgtacgatccgtcatctcatgtacctctctttccctgtgcggtccgccgcccgggaacctggttcctcggggcaatattagttttattatagcgcttccaggtacaaaactcaatggaatcctgtcggacagggatataaaaacggctgtaaaccagccggatttcatccactgtttacaaccgctttcacccgcatctttattcagttcctatctgtcatccagacgtgtatactcttcttccatcataacgctcgtataggccggacggatgatcttatccatgttgatcagctcctcaattcggtgagcgctccatccgacgattctggcaatcgcaaaaatcggagtgaacagttccttcggaatatccagcatgctgtatacaaaaccgctgtagaagtccacattggcgctgacgcccttgtaaatctttctctcatccgcaatcacctgcggtgccagacgctcgatcatggaatataagttaaagtcatccatacgccccttttcttcggacagctggtgaacaaaccccttgaagatctccgcacgcggatcggacttggagtaaacggcgtgacccatgccgtagattaagcccttcttatcaaatgcctctttatgtaacagtcttcttaaatagaattctacttcttcctcgtcctttaagtcgtggacttccttccgtaagtcttccatcatctcgacgaccttgatgttggcgccgccgtgttttggtccctttagggaagcgagtgccgccgctaccaccgaatacgtgtccgtgccggaggaggtgacgacgtgcgtcgtgaatgtggagttgttgccgccgccgtgctccatatgaagaatcagagccagatccagcacgtgtgcctccaccttggagtaattcttatccggccggagcagacgcagcagattctcagccgtggacagattctcgtccggacgatggatatacatactctcgtcacgctcataatggttgaaagcgtggtaactgtatacggctaacatcggcatgacgctgattaacatcaggctctgacgcagcacgtttggaacggaaatatcgctggccatatcatcgtaggaggaaagcgttaagatgcttctcgccaggcaggacatcatatccttgctgggagccttcatgaccacgtccctgacaaagtttgtaggcagggtgcggctataggcgagtgtctgggagaagcgctccagctgttccgtattcggcagttcgccaaacagaagcagataggcgatctcttcataaccaaaacggctgtccttcactacaccgcccaccaggtcataaatattataaccacggtagaataactggccctcacacggcatcttcactccatccaccgtcttgctggacaaaatcttcgacacctttgtaagacctgccacaacaccattgccgttcttatctctgagccctcgttttacgtcatatttttcatataaccccaagtcgatcctctcatcgtttaaacagatactggaccactcatcaacattttttacaaactctttctgatcaatcatgcaaacacctctttcttaaaattaatgattaagttccgctgctttcccggaagtcctccggcatggtcacatgccttcggcccccttgggccttcgatagatatggtcacctcccgattgttcacttttgaactgtttcactttcaataataaataattttccgaaaaattgcaagtaaaatattttaaatttatcaattttttacattcagtccaatagtactataccacttcagcgtgttaaaaacaagaaaatacttctttctgtttctgcatatttattgacaaacttcgcacagaaacgtatacttttgttgattcaacgtgaaaatgcttaatatggaacattcgggggtttttgaatatggaactgcagttgtcattactatttttcgtggaagcggttgggacgatcgcctttgcctcatccggggccatggtggccatcaaaaagcagctggatcttctgggagtcatcgtccttggcgtcaccacagccgtaggcggcggtatgctgcgggacatcatcatcggaaatgtgccgccaaatctctttaaggatccggtctatgtattacttgccttcataacggttatgatcctgtttgtaatcgtacggtgcaaccagaagatacttgccagccggtccatcgaaatgtatgagaaagtcatgaatatcttcgatgcggtaggacttggcgcctttaccgtggtaggcatcgacaccgcagtgctggccggctacggacgctaccattttctgattatctttctcggtgtgatcaccggagtgggcggcggtctcttgagagacattatggccggagaaacgccttatatactgaagaaacacgtctacgcctgcgcctccatcacgggtgcagtcctttacgcctatcttcaggactatatgaacaacgatgccgccatgctgatcggagccggttccgtcatcctgatccggattctggcgacccgctactgctgggatctgccgacggccacgaaaaaataaccgttacaccattacaggaggacttactatgaaaacactgattcattacaccgcaggcatcgtcttttccctctgcctgatggctgcgctcttaatcacctcagtggaggccgttgtctactggaccccaggctattttgaaaaagaatatgcaaaatacaacgtcaccgaagcagtggacatgacaatggaagatttactcgatgtgacggaccagatgatggcctatctgcggggaaaacgggccgatcttcatgtcgccaccaccatgggaggcgtatcccgggagtttttcaatgagcgtgaaattgcccacatggaggatgtccgcggactcttcctggacgcactctccatccgccggggctgtctgcttgtcatggctctctgcgtaataattctgttcctgttaaaagccgacttcaaacgggtattcccgaaatcggtctgcctgggaaccggcctgttcttcggaatcaccgcggtactcgccgccatcatatccacggatttcacgaaatacttcatcatgttccatcatattttctttcacaacgacttatggattctggatcctgccacagacatgctgatcaatatcgtcccggaaggatttttcagtgatacggtgcttcatataggaatcaccttctttctctatgtcgctgttgtcttcggtctggccctctttttccttagaaaatcaaagaaaaatagcgtttgaacctttacttgttacaggaaataacctatactgtaaagtggacctttttatgaaaccgaatgaaaatacggagagattacacgatatgacgcaattgataaaacgaatgtcggcgttcctcttatgcctgatgctccttatgggggcattttcatcaacagcactggcggcccctgactggccctccggcgtttctgttcaggcggaaagcggtatcgtcatagacgcggacaccggaaccgtactttggggacagaatattcacaatcagtattttccggccagtattacgaagattatgacggcactgatcgtcattgaaacatgcagcctcgatgaaaccgtcaccttttcccacaacgcggtctttaacgtggaggcgggaagcagcaacgcgggtattaatgaaggcgacaaactgtccgtgaaggactgcctctatgccctgcttttaaaatcggccaacgaagcggccaacgccctcgcagaacatgtggccggaagtacggaagcgtttgctgatatgatgaatgcaaaggcaaaggagctgggctgcaccgacacccatttcgccaaccccagcggtttaaacgacccggaacactatacttccacttacgacatggccttaatcgccagagctgcctttttaaatcccaccttcgaggaaatcgattccaccacctattacaagcttccgccgaattccattaacccggaaggtctgaccatctacccgggccataagatgcttaaaaagagtacgccgtactattatcccggcatcgtgggcggtaaaaccggctataccacactggccggcaacacgctggtcacctgcgccagaaagaacggcttaaagcttattgccgtcatcctgaaaggctcgacgccccagtactggacggacacgaaaaatctgctggactttggattcgagaattttgtatccgtccgggctgcggatcacgagacgaaattcagccctgtcagcagtgatctaacctttggaggccttgctcttgacaaaccggccgcgctgattttagatcccgacggacggattatacttccgaagacggcagaattttcagatgccgaggcagcgctcagttacgatatatcagacagcgatcccgatcatgcagttgcaaaaatctgctaccgttacaatgaacgccagatcggctgtacgtatttagagacgaatccggcgctgtttgaaagcgcagcctcctcccagcctctggcggcagacgcaggcacggaagaatccgcagcagagaccgatccggccggcatcgatgcggaaaccgccggcacggagaccagcgccgcagaaacggcgggcagccaggacgaaacagaacttccaaaagagacggaggattacagagaaaaggcattaagacccttcgagatcccttccattgcctggattattctcggaagtgtcgccggtatcattctcctcggcgcgctgatcacatttctggtcctcagaaaaagcagagaagaacaggaataccatttccgccatgaacagaggttaaaacgtctgcaggattccggcgtatccgccgatgagttcaacagcctgatggaacagcgccgaagcgcctacacctccaagcgaaagaaaggccgcggaaaccggcatttaaaatttaaataattcgcggaaaggcatggaaagacaatgaagataaaaagacaaggcaagatgcccaaagaagatctgatgcgcaatattgtcgtcacatcggtttttctgcttttagccaccatctgctccaccctgtttctctttatcggcgggaacagaaccaacgtggggatcgtattcatgctggcggtcatgctgacggcgcgttacacagatgggtatgtaccgggaatcatcgcttctgtcatcggcgtcatctgtgtaaactatgtgtttacgtatccgtttatggagctggattttacgctggatggctatccggtaaccttcattgccatgcttttgatctccggtattacaagcacgaccaccactcatttaaaagagcagaaccacatcctgatggaggctgaaaaagagacgatgcgggccaatttgctgagagccgtctcccacgatttgcggactccgctgacaggcatcatcggcgccagcagcgcctatctggaaaacagggatcatatgtcagagaccgaaaagactgccatggtatccaacatcaacgaggatgccaactggctcctcaacatggttgagaatctgctcagcgtcaccaggatccgcgattccgagactcaggtgacgaaatcctcagagcccctggaagaagtggcctctgaggcggtacagcgcttccacaagcggcttcccgataccgttgttcacgttacggtaccggatgaatttatcatggtgcccatggatgccaccctgatcgaacaggtcattataaacctgctggaaaatgcagtctaccactcgcatacggatgagcccatcgatttgaccgtcaccgtccacgacggtctggcctggttcgatatcacggatcacggcatcggtattccgccggaacggctggacaccctgtttgacggctataccccctccccgaacagcagcggagattcccacaaaggaatgggaatcggactgtcaatctgtaaaactattattaccgctcatggcggcaccatcacggctgccaatggaaaacatggagcccggttcacatttacgttaccgttaggagaagatacatatgagtaagttaacgatcgttatcatcgaagatgagaaaaacattctgagttttatcgaagcggcgctggagactcatgattacaaggtactcaccgcagtcagcggaaaagagggcctttcactgatcaacgcctgctgcccggatatgattctcctggatctgggactgcctgatttagacgggattgacatcatcaaaaatgtgcgcagctggtccagcatcccgatcattgtcatctctgccaggactcaggagcaggaaaaggtggctgcactggatttcggcgccgacgactatattacaaagcccttcggtaccagcgagctcatggcccgcatccgcaccgcactccgccacggcaagccgaccgtcagcaccggagacgggaaactcattcagccgccgtaccgcagcggagatctggtcatcgattttgacaaacgtctcgtcatgctcaaagataaggagatccacttaacccagatcgaatacaagctggtatcccttctggccgaacagtccggaaaagtccttacctacgattatatcatcagcagaatctggggcccctacgcggacagcaacaaccagatcctgcgggtcaatatggcacatatccggagaaagctggaactcaatccggcagaacctcagtatatttatacggaaatcggagtcggatacagaatgcgggaaagcgaaacttaatcgcttccccgcattttcatatttgttttctgttttctgtgcttcgtcttttccacgcgcttcttctttgcttcttccttcttttcgctgatctgccgcgcgccttcctcgtcaaccagcttcatggtcttaacggcgtagattcgtccgtcgtcactgcgcttcatgcgtattttaccctttaaatatccatgctccgggcagattcccagagcaaagtaaaacttctgattcacagaaaaccaccgtaccttctttctgagcatgcggttgcagcggtaacagattaagtcggtgaccgtcttgtccgcgatagcctcctccttcgtctcaaaggctctggaaatgtatttggagtatccgggaaagaccagatagacctcctcctccttgctctccggcagccggtaataatcggttgaccagtattccatcacccgctcaaagtccatggccgccatgacccggccggtatagtgggcatcgtcaagggcccggtgaaatggacggtcctccctgatccccagttcttctaccgtgatatccagcgactgtttctgttttccgtctccctgaagaaggctgtagagcttctgaacatcgtaatagagaagaggcttgtcaaagggaatctccaccccgtaatacaccatatttctctgcagctccgttaagtccatactcccccaggtacaaaatatgcagtcgtctccacaccattccagaaagtccctgattacagtctcaaatgtctctccatttcgctccagctcagccatatccatatgggtgacctcagagatccggtaatgcatctgcggatatacccgcggcctgatcagacggcggaactccccgatctccttccgttcttcatccagacgaaccgctccgatttctattatttcaaaaggaaaatggtcaatcgtcccctcttttccgtcggggctctgattccattccaaatccagtactatataattcttcataaaagtctcctttgtgctattatatgatagtttctctgttcatacaagttcatgcctcctattttggacaattatttttctaaaaatctcaatcaaaatccattagtttttaacaattgtatttacaatatgaattttctgtgaaaaaagcataaaattagcactctcttattgacagtgctaataaatcgtgttataacatagttgtaacaaaaaagaagcaccacaaggaaaaggtggccgactttaaaccatatatgtgctgccgacaaggtgtcaacacatataagaaattcaagttaggaggaatgacttatgatgatgcctagtatttttggagaaaacttatttgacgactttatggaagatgctttcaagagcccgattttcgggaaacgggaaaagaatctgatgaagaccgatatcagagagaatgacaatggttatgaactcgatatggatctgcccggatttaagaaagatgagatcaccgttaatcttcgtgacggctatgtaaccatctccgccgaacgcggtatggaacgaaacgaaaaagacgagaagaccggcaagttcgttcgccaggagcgttacagcggttcgtgccagagaagcttttacgtgggcgagggtgtgaaacaggaagatatgaaggcccgcttcgaggacggtatcctgcatctggagtttccgaaagcttcaccaaagcaggttgaggaatctcatcgcatcttaattgaataaccgataaatcccggaacgaaacagtcctctgttccggaacagggcgggccgcatcactacggtccgccctgttttatccaattacctctatccccatattcagcttaaaggagaattattatgatctggaaagaaatgaaacgctcataccttgttatatccatctgcgccgcgttcctgggccttctgctgcttttactgcccggccccaccctggcgacggccggcatctgcaccggcgtctgctttatcgtctacggcgtcacaaagctggttgaaatcacccggtttaaaagtttcttcggcatgtactggatgcactgcctgctggctcttttccccatcgtattcggggttattttcctttttaaaccgctggccgcgacttccattcttccgttcatcctgggcgtctttctggctgcctatggaattatgggactgaaaacctcgatgaagcttaaaaggtttggtctggattcctggtggtttcatttgattactgctgtcatcacgatccttttaggcgctctcgccatcttcaatccctttgccacggctgccgccatggtcatgatgatgggcgccatcttattcacactgggtgtcttccatgtggtgcagtacttcgtagcttcacaccgctttaaaaaggccggaagacagatatccgagctggaaaaggaatgggattcctttgactggttctggttttaagcttataccaaaaactgctctgcatccacgggcttgctgtaataaaagccctggatggtggtgcagccgtactcttttaaaagatccagctgttcctttgtctctaccccttccgccacacagtctacatgaagtctgcggcacatctcaatgatgcatctcacaatgatctgatttttctcgttctccaccagattttcaaccagcgacttatccagctttacctcgtcaaaatgcatgattgaaagaatggacatattggcataatctgcaccgaaatcatccagagaaatacggaatcccgccttccggagcttcgatccgatggattccatcaccttatgctccatatccccgattctctccgtgatctcgatcatcaccatgtcacagggaacgtcatatttgctctgaatctccgtgagcatctggaataaatcgctctccagcagagtgatccgtgagaaattaacggatacggggatcaatggtttcccttctgctttccatctggaaaggagccggaacacctcctccagcatataaaaatcaagataccgtatcagcttcatcttttccaggagcgatacaaatttcaccggagactgaagatcacggccgggtgcctggtagcgcgacagcgcttccacggaatgcacggttcccgtctccggatcaaacttgggctggagataaagcctgtagtagccctgttccacatcatggactaaaagcttcaaaccttccggggaataatgcttgcgtacttcatcgctgtttttatagtaaatctgtttgttcaccagcatcagttcttccgcatgatgcagaagtacatcgaaatcggtcaggtgctccacccatgtggttcctaaggataccccgctgggggtcctcgaatccagctctatccccatatttttcacaagcttcataaagttctcatacgccatgttcatggcaacaatgacaaattcatccccgctcagccggaaaatatcaccttccggaaagctggaccgcataatccgggttacctctatgattgtctcgtctcccctggaatgcccgaaatcctgattgagctgttttaagccattgatatctgcggtaataatcccacagggcgctccacattttttctctatctcactctgataacgtacaaaactgcttctgttcaacaggccgcttaaggtatcatggccggcctcaaactccagccgttcataaagacgtctcttcttaatctcatttgcaatattataggcaatggtatccagcagccggatggtgtcctggttaatgttcggattatccaccccgatatatcccgaaaaagccgtttcatcttcaaacggtactgcaaacaggctgtgagccctgcgcctcttcaggaactgatattcactgggatatgtgtactttaattcttccacccttgagataatcaggtgctgctttctgttaaaggtttcaaaaatgtaaggaatggcgtcaagcgcaatattctgcagagaatctttctgagaaggaattccttccctgcaccattcataggtgttatgggcatatccgcgttcacggtcaatctcaataatataagaccggcatccatcgtagaagcgtgtgatcagttccagtatacgggtaattcccgactccaggtcctccgcactgttcagcgtccgcagactctcaagcattactgtctccatgtggtatttgtcggttgtggtataatcaccgatcagatgatttcccacatccacggcaatctccatacgtaccggccgaccattccattccaccagcttatccttcacaatgaagtacttcttcagatatgggttctcatattcccacgtgataaagctctctttcacaagctttgcattattgcagaatggacacggggtatttcttccctgcagcatctggtagcacttctttttttcaaagtcctccagcttcattccaatctgttcacgccccacccgattgacataaagcagcgtgtagtcctgaatatcactgatataaacaatctcctccaattcatcgagaagccactcccggtttacatactgcatgggtacgacccgggatatcttatcaccgaatacgctgtagcaggattttccggactgtttggcatagcgcagggcagtatctgccttcacatacagctcctgaaatctgctgccatggcgcgggctgaaggcgataccgatggaattggtgaccacaacctggttttccccttcctgctgaatagtctggagctctctggctacgatctgagccttatggcagactgcgtcctcacccggaatatgaaacatgaaaatcagaaactcatctccgccgagacgccctactatggcatcctcatcaaaaatatctctcagtttatacgcaatacctgccagaaccttgtctccgtacatatgtccgaaggtatcattgaccattttaaaattatcaacatcgatgatgagaagcgcactttcttccgggccgttctcctttaacaggtagttgatctcctgaaggcaggccgcacggttgagaagaccggtcagggggtcgattcgggactggcggagcagttccagttctttccgcttcttctcctcgatgttcttcacattaacgaagcccatcagatgtcccccggactcaattagatagatggtggtattgcaccagatcatctcgttgttggcatttaagctgcggtattcacactctgcctcctgatggccattttcaaaccgcctgcgcagaacatcgggattcatctcctgcaaaaagataaaacgatcctctgtgtggatattcttttctgcccaacgctttaaaaactgggtatatctgcagttgacagacagacctaccgaggccagcatgtccttattgttctcgataattttttcaatgatcctgtcattgtcaatgtcgatttcataggaagccagtgcatctaccaccagtgcctggcggtacttctcttcctgctggtatctctcctgctccttctgctctctgctgatatcctcggcaactcctatggcgatgtgatccgccccgtctccgctgcgcagcaccgtatgggtaacccggaaccagcgttgtcctccgtcattacgcctgatgtgcaggagagcgcaggccatggaattccccgccttcaaatcgaggaacatctgccgaagagcgggcaggctctccggatccacgcacttatcctttaccatctttttgctgaagtccgtaatcttcccggatggtgcaaaaggtaaccttctgtcgccctgcagataagcgcagtcttcatccagatggtattcccatataatattgctgcaccgggaaagcgcgatcttatatctctgcagatttaaggaaagctcctgttccaaattccgtctttccgtgtccccgttcttttggagtataacagtgatttccggcgcagcctgttcccggccggaatcaagcagctgaactgtcagacggtattcttctgttcctctggaaaaaagcagctcgccataccctttgtccggcgtaccattcagccgttgtcccgcaatatcccagataacttctgaaagatctctgccagaacacccggacacagggtaatccagaaatttctgcatctcttcatgtacatatctcaccttttgcgctgaatctgccactatgacgatcagtggcagatcaggctgcaagctgttttgcggcatattgaattacctcccaagaacaggcatcgttcttcctttcctgtatctgtactactgcatcagagccccatcggctcctacggtatgcccgtcaggcgtaactgcatttgccagcatctttccgctggccggatcacagtaataccgggtgccgttccagtctatccatccggttaccatatatccctgttcattaaagaaataccatgctccgtcaatctgctgccagttggagaccgtataggttccgtctccgtttctgtaccaccagccggcctcatcctgcttccattcacctgcggaactgcccttctgatagatcgctgcggccgtgtcactgtcgatgtatctggagggagattccacccattcacctttattctccggcttcagcctgttgaccggacggacacggtaaaaatacgttcccgcctttgtcatggctgctgaaaaatcataggaagtgctctctgttgtcttcgtcgttcccaccgtctttccatcacggtaaagctttacttcatagctgcccgctcctgcggactggctccaggatactccggtcgttgaggtccagccagcctgttcaatggcagaggtctgctctgccagaggcggcagctgcatggtaaggaccagtgtgtgtgactcatcctcacgcccgtaatcaacaagcgttgcgccttttaacgttattttatcctttgagactgcaaacttatatccgtcttctgcatagatgctcaccttaacagttggaatatcttcctccgaccaggtaaatcccgtattcagaaattcatattctcccgccgtgtatttatcgctcttcggagtaaattctatttcctgatcctgaatattctgtccaacctccaaatccgcttccactacaagagtgaccgaactgattttgctttctaccactgccagtgccgtcatacctgtcatccctgataccagtgccgcgcagatcagtgcggctgctatcttttttactctcattttttgtctcctttgatttttttatcgtaacgccctgtacttcccattttattcgtatttctaataaaaatctggatttccgtattatattattatatataatataaggcgataattcaagcctgaaagaaaccgccgggtttacgggtccccggcggttgtctttgtatggttatgattctgtttcttatgattcgggcaaaatccctgcttctgatcttccggtttcaaaggtattataaagtacacgacgaccgcagacactgtgccgtcaatgtttccgaagactgtatcatctccatcggcacaccctcaaaaaccacttccccgccgttcttcccgccgtcagggccaatatcgataatccagtccgcctgcttcatcacgtcaaggttgtgttcaatcacaaccagactgttgcctcgggatacaatcagatcaaacagatttaacaggttccggatatccgacgcatgcagtcccgttgttggttcgtccataacgataatacttccctttttacccagattctttgcgagtttaaccctctgccgctcgccgccggacagcgtgctgagcggctgaccaagcgtcagataagacagccccacctgcttcatcacgtttaaatgctttcggattttcgcatcctcaaacacctccattgcctgtgaggcggtcatttccagcagttctacgatattttttcctttgtacgtacacgccagtgcttcttcgttataccgctttccgaagcaggcctcacactctgtaacgatcggatccataaacgccagttctgtgactataattccttttcccccgcacacagggcaggcaccggcagaattaaagctgaataaactgtccgcctttccgctctccctggccatcactttccgtatctcatcgaagaatcccagataggatgccggtgtagagcggtttgtagccgtgatcgggccctgatcgaccatcacaatatctttctcatactgtctggcaaacacctgtgatataagcgtgctctttccagatccggcgactcccgtcactacggtcataattcccagcgggatatctacattcacattttttaaattatgcaggctggccccacggaccggaagacttccagccgcttttctcgtttttatcttaaccggaagagatgcaagcatggcattccccgtcagactgccggactccagaagctcctgataactgcctgcaaaaacaatctctccgccctcctgccctgcaccgggccctacgtcgatgacatagtcagcaatagaaattacatccttatcatgctccaccaccagtactgtattgcccttatcacggagttgtttcagcagactgttcatgcggcagacgtcccgtgggtgcattcccgcgctgggttcgtcgaagatatacgtcattccggtcaggctgctccccatgtaccggactaatttaagtctctgtgcttcaccccctgacagggatggtgtttcacggttcagatgaagatacggcagaccaatctcaatcatacggtccagtccctcgatcagagtctgcaccagcacatccacagtctggtcggatatccgggacagcacctcccgcagctgtgtaagctccatctcacataaatccgcgatggaatacccattgatcttacagcgtaaagcctccttattcagacgccttccatgacactccgtgcataccgtctctgcaatcagattctgtgatttttcctgtgtatgcctgcttttactgctgatatcccggttcagaagagtttttgtatatttatgaaaaattccagtcaccttcggattttccggtttgcccgtaccgcttcgggagccgtataacagcagattatattcttcagccgtatattctttcaccggcttatccaggtcaaacagacctgacctggcatactgcttccagtaccaggtccccggattgtacagggagtctttcacgcatccttcattccaggatttgtcccggtctatgaccgcttcgatatcaacctgtgtaatctttcccaggcccgagcatgtcctgcacatcccgttgggatcgttgaatgaaaagtaagaggctgttcccacatacggactgccaattctcgaatacagcaggcgcagactggcgtacaaaccgctgattgtccctacggttgaacgggcattccctcccagtggtgactggtccactacaacggaggcagtcaaattatcgatgcgttctactgccggctttggatacttcggaagccttgaccgtacatacgatggataggtggcattcatctgtctctgtgattcggcagcaatggtatcaaacacaatactggacttccctgatccggatactccggtaaataccgtaatcttctcctttggaattcgaaaagacacatgttttaagttattttgagtcaatccctgaacaatcatatcttccatcgcgttatccctctttcccatgtcattcggattgtatgatatctgaattttcacaatctgttttattatagcagaccgtagatcggaattcctgatattttctgcttattgattgcaggaaactggtgcatggttttgttcctcgttccctccccaaaccagaaatggcaggcaattacaccaattgcctgccatttctgtcatatctcattccttatgttcaaataagttccagctatcactgcacccatgctcctgatgcatccaccagatacccatccggcgttttccgatttacataaagcatccccttctcttttccctgctttgtctcgaaatagtaccagttcccgtcgataaagttccatccggtatacatatacccctggcttccgtcgtggtatggatggagataatagatcttcccgtctgtgtctgtaaaccatcctgtatcgatataaccggttttattaaaatgataccagtagtactccttcctccacggcagatagtaccagccgtttgacggccataaccgatttccgtaatcataccaccagcccacctcgtcgagaatccatgttccctcaatccacttggaatctgacgttctctccttttctccatctgatacctttatttcttcatcgtaagccacggcgtagatggaaaattgatttacatacagaatcagattattctcatcaacctcgaaatactcatctcccaatggcagttcctgagtctctccgccatggacacgcagaacacggattctctctttatcggataggttatcaataggaactacaatttttatcagctccggaagacgcttaagcctcgttgtacttcctgtctgcgctccggcctccctgactgtcttttccacagccagatccagcaccaggagtcccgttccaggccctgcgctttcctcaatcttgcccacatcttcctgtactgcggcatctttcctttcctttttctcagccagcagcttgatctccaggcttcctccggccgccaccgtttccacatcttccggtgtcacgccctcttccggcacttcgaccagattctcgtgcagaaacagttcgtccagatagtctacagccaccggcggagtatcggctttaacctccacaatcgtgttcttgtctccagccggcatgaaaatatcacatttctccatctcatcggtaattttaatgatacgcgtaatcacctgaagcttcccttcagccgaagtcctcttagcaaccagactgtagatgccccggggcaggttgttaaaaatatagcggccgtccgctccggttactgccggctcacctgccagagttccgtctgttccgccttcccgggcttccaccgtggctccttctacaggcccataatcatcctttacaataccatttactccgcctggcgctttgacggtaatccggcaggaatcgctccagccgccgtcaacggcctttaccgtaattaccgctgttccgatatgcagagccgacacactgccgtcctctgtcacagcagccaccgacggattgctgctgctccagaccaccgtccggtctgtcgcgtcagccggttctaaggtaaaggtaagcccaaaggatgccccctgtgccaagatcaggctggatacatccattttgatgcctgtgaccgctttcgtctcatatttttggatcacatatggccccgcttcttcgcttgccagttcagttccctttcccttcatccggacataatatacccccggatttacggtgatctccgtgccttcacagctcctccagacattctccccgtctttcctgtactccatatccggtgtcacatgttttaatttcccgtctcccaaacccattcctgtctctcccacagagataattccttcaggaaccggggattttgtgatggttatcatctggggaagagaatctaaaagcgtcgttccatttcctttctgcctgacataaatgccgttctcttcagtgataccttcttcaagcttcacttctgtcccgtgggtaatgtcaatccaggttattccgccatctaaagaatactgcatcccctcgctggttccggccagtgtcatcaagaacgcgtcgaataccgtctggggaaccggcgcatgaaccggaggagtcgtcccaattgtgaccgctgtcatctcccctgccaggctgttcgtcgattccttaatccgaacctgataagcacccgcccgcagattgtggatttcagttcccgtcaggacagcgtcctcccaggtaactccattgtccgatgagatttcataaaccagccccgcagtcaggccggtgatcttcccatcactggcgcccggatacgtttcatccacagaggaaacctccggagcggcagaaccggccatcttcccgatgtcagccttcggattatccggctgtgacttcagctcgtagtacgatttgtccgccccttccagggcaatatccgataagacaaccgttttttcgggccccgcatccacatctgaaaatgcgcccgcgccaacagcagtcacgtcgtcgccgtctatcttcccttctgtaatttccagggaaataaccgcatccgccgttccatcgtaaatcttatcctccgcttccgccgtcactgtcagctgccgtttcccaaccggatccataggggcggaacacagaacatccttgtaattttctgccgataccttcaccgacaaaaattcccctacatcgtccttcgttaccgtatacgaatgttttacagctccgtcaatcgcctcatcccctctgtaccactgaaaagccagatcgcccggattgctgccggtaagatgggcttccacggttatcacatcgccgtagcggggcgctgtatcatccaggaccactgttccttctatatcttccttctccgttgcaaatgagatggattggaccgtgcccttatttccagccttatcgaccgtaaccagatagaggacatactctgtattcggaagcaggccgtctgcggtaaagcttactttcgcgccagcctctgcgatatccgcagaattggaggcgatgaccgtttccgcatccggttttgcatccctggccatcctgaccagataatgatacgtcccggtatcgtccgatgtaaatgttattccaatactcttttcccctgccttatccgcggtaagctccgtgactaccggcggcgtcgtatcctgcttcactgtcacatggaccgttacagaatttcccgcgttatccgcggcagttatgtgatatgtatggtccccctctttggcggaaaagcttcgttcggcataataagccagctccccttccgtccgggtaaataaaggcgtattcgtcaaattgtcatctaccgtgtaaactaccgtatgtagcccggattccgtatcgctgccgtcctctccatctgtaacttcaacgtgaatcatctgcggagcgtcataccagtctccggtaaatggctttgtcccgtccgtcaccgaaatcacaggctggtggtcttccagcgccgcccggattacatcggcggtttcgctgtttcccactttatcatacgctgtaatgagtatttcacctttaaaaccggaatctacggtaaagactgcggttccgttcgttaccgccgccgtcttcggcgatgcagccattttccctgcaggggtcagcacccaggagatatgatccgcgcctgaatatggatcggataccggaacagtaacttccaggctggttctgccaaatatccactgccagaagctctgatggccggaatcgaaggtaatcgttccgatctgcggagcggatttgtcaagcttcaccgtaacaggcgcggtttctttcgcattaccggccgcgtccactgctttaaaggtataggtatgctctccttccacagaaaccgtatattggtaagaaccggctgtaaagtcggtaatctcggcgtagcttccgtcatccagcctgctgtagagggcggttaccccttcattgtcgctgtaggacagagtcagagtcacattctcagccttccagtccttcggcggttgggaaaccgtcaaaacaggtttttgagtgtcattccatttggcataaaatgtcttgtcccccgtatcggtggtactgattgcagcggtgggatttcccgtaaagccggaattatcataccagccggcaaatgtgtatcctgctcttgtaacgtttgtaggaagaacagcgcctatcccgcatgtatactcagcagccgcttctccttcaatggttccttcattggtattcagtgttatcgtataactgttcgcgctccatttggcataaaatcccttatcccctatatcggaggcgctgattttaacgacgggctctcccgtacagtcgaaattatcataccagccggcaaatgtgtatcctgctcttgtaacgttggtaggaagaacagctccctgcccgtatgtatatttagtcacattcccttcttgaatgcttcctccaagggtatacagtgttatccaataactgttcacgttccatttagcataaaatgtcttgtccccagtagcgttgtcgaagattgctttggttggagaatatcccgtacattcgggattatcataccagccgccaaatgtgtatcctgtctttgtaacctttgtaggaaggacagcgccttctccacacgtataaccagttatttccccttcttcaatggttccgccattcggatacagggtcacgttgtacgtaattccgatccatttggcatacaggttaatatcttcattatttaaaatatcattgtcaaaatcccattgattaagcagctccggttccttataccagccggcaaatatgtaccctgttttgaccagatcagccggcttttcaagcttttctcctgcggcagaactaatcgttctgagtgagacgttaccggtcatcaaagtaacatttacaagtttggtgaatgtaacagatacttccatatccttcgtaaccttcatggtatactcttttggatactgctttaaattgatattcatgtcatccacgactactttggtaactgcgtagccgtccaggggcgtataggaaattttaaaatcttccccatcctgagcataaaatttagctgcatcgaattccggagctgttccctcctcataaaatggagcagtcttggtaaaatagtttttatatactttatcgcaggcggctctatttccatattttccactataagtaacagttccgccttctgtcacgttgggagtaatcacgtatggggtacatatcaaatttttgtaccagcttatatcggaatcagtcatattttcaaacctatgtttgttatagattgaaatactgcttccacccatttgagcatgataaaattctgccttgagtcctaaggaacagccttcaaatacattgggaaaataacacttttcattaaaattaaagctgctgatatccagagtttgaaggcccttgcacccagagaacatggagatcatatacatcacctgggatgtgtcaaagcgactgacgtccaactccaacagtccactgcatccagagaacatgaagctcatgaccgtcacactcgatgtattaaagttactgacatccagagtttgaaggctctcgcacccagagaacatggagcccatatccgtcacattcgacgtattaaaattactgacgttcagctccgacagtccactgcacccataaaacatcactgccatactcttcacctgggctgtatcaaatttactgacgtccagctctgacagtccactgcacccatagaacatcccgtccatctttattgtatttcccgtcttgaaattactgatatccaaagatttcagtccgctgcagttgttgaacatataggacatgagcactacgttcgatgtatcaaaatgactgacatccaattcagtaaggctggaacagtctgaaaacatatgagacataccacccgtcacaatcccgatgtacgtacttgataccgttgatgtatcaaaatgactgacatccagctgggtaaggttggagcagccactgaacatactgcccatatcctttacttgtgatgtattaaaattactgacatccagtgtttgaaggctcttgcacccagagaacatggcgctcatgttcgtcacagccgaggtattaaatttaccgttgtcccatttcagttcgacaagtccggaacagcccatgaacatcgaggacatagttgttacattggaagtttcgaaattctcaatatccagtgtttgaagaccagaacagttctggaacatattaaacatcttttttacgtttgaagtatgaaacgcactgacatctaattgatcgagttttttacagccgttaaacatattagacatatccgttacactggcagtatcgaaagtcccgacattcagtgtagtgagttcggagcagtcgatgaacatgctggacatatccgttacattggtcgttttaaagttactgaagttactgaaatccagtacggttataccagagcagccgccgaacatacgctgcatattcgttacgttagtagtattaaaattgctgagatccagttcggtgagcttggagcagttgtagaacatctcagacatattccttacattggcagtagtgaaactactgacatccagtgcggtgagttcggaacagcccttgaacatttcaaacatattcgttaccttggaagtattaaaatcactgagatccaacgttgttagctttttacatccgctaaacatgctgctcagtgacgtagccgctgaagtatcaaagccgctgagattcagcacctgcaaacttttgcagttttcgaacattcctccaaaatccttgtgccccgctgtattaagtccggacagatccatctcggtacaattattgaaatcagcaaaaatccggttatagtcattcgacatcataacttcattgtctacaacaatttttgtcactttcgctttatctactgacgataagccattcagcgtcccgctcacaccatttgtcggcgatatcgtcaaacttccctccccgtcaagcacccaggtacagcccccgcttgtaccactggcgattacatcgagagtcttcatctcccccagccgttccgcaaaattccataaatccagcagtttctcccggtattcttcacctacaagctgcctttcttcttccgtcagcccgtcataagcttctttagcggccctgatatccgcaataatctgctgcattttctccagccatgcatcatattcctcatctccatccccgggcatattttcatagatactgtccacggttgggagcgcttccatctgctcgactatcgcttttactgccatatcatcagatgaggggacggctgacgcagcctctgcttcacataaactgtaatcctccctgcaaacaggacattctgtgtccgtctgatccgcggtacataagacagaacagttacaaacggttgctttttctttataaaatgggcagtccttatttgtatgctctccctcgccctctatggcaggatcgcagaggcattccaattccggctttgtatccgtttccagtatttcaccaaaacagtctgtaagatcagcgttttctctgtctcctccgtttttatcaatcccggcggcctcatctgctccgccattctcatcgatcccaccggtctcatctgtcccgctagtctcatctgtcccgccagtctcttcaaactcgctggtctccttcgtcccattggtctcatcaaacgctccggtctcgtccgtcccatcgttttcatccagctcgtcggtctcgttcgtctcatcgatcttgttcgctccatcgatctcatcaaactcgtcggtctcatccgtcccatcgctctcatcaagctcgctgctctccttcgtctcatctgcaagactgccctgttcatatgtgtacatactgcccgcctctgttttttcccacttttcatcggcaaataccatggctggagacaatgtgaacaccatacagatgctcaaaaacattgccattatgcggcgtccctttgtttttggcataaattgctttcgcatacgtcattcctcctatttccgttgttttctatcatatataaaagcatctgcagataacctcccgcatactgttattttccgcacttcccacagattcaaatataaaaatcccaaatcacaaaatcatgactgcaatttcaaccggataagcaatcatgtccggcatacggaaccataaaataccttccgcttgtctctcaccattcatacaccggactatccgtacaagtgaaatgaaaaagataatcatcattactccctaatgttcacacagtcataaccatcaatggcatgctcttcctgtaatcttttaatgcagcggtccagagatatccagatttctttttctgttattggtttcatcaaaaagttggccgcccttacccggtaagaagcaacaccgaaccgcttatcttctcctacccatacaatctggctttcctcggacgtccgatgaaccagtatggacagttcctgattatcaatgtcgtcgaaggcaaatatcgtgaccgcaaacggctgctttaaatgtgtatcccggtactccgccacggacggaaaccacctggaaaccatgacatactgttcccgtttcggataactcctaatcgcatctgcaatcgtctggtattccacttcttgttttgaacatactgcaattaccataagccgcttcctttccctctccaacaggctcttttgttccggttatcgttccactcccttaaaggcacaaaaaggcgtctgtcctttgatgtattcaagaaggcaaacgcctttttatataaacgatataaattttgtattacaataggacagcttattctctgcctggacttatatgcgttctgtacatataagcccccctttttcttaaaaatgggtacaaaaaatacagcccctgcgaattccttttttttactgaattgccagggatttctacctaaaatcattttgacttttatttccagctaagctatgattagcttaaatattttcccaaatgctattgatttcatcttaccacaaaataattcaaatttgtggtcttacactaaattgacacctttttacactaaattgacacccctaggcatttttttgaattttgtaaccagtttgggaggtataaaatcatgttaaaaatagcagtttgcgacgatgagcctctggatctgaaccggattcaggaccttgtttccgaatatataaaagatcatccgaaccctggtgttaccataacccgttttgactcttccgaaagcttattagagcgcctaaagaacgaaacctatcagatctatcttctcgatattctcatgaatgggaaaaacggaattgaagttggggaggtcatccgggaaaatgacagccacgcggccattatctatttgaccgtctccccggactatgcgctggcttcctattccgtcgatgcacagtattacttattaaagcctgtagaaaaggaaaagttcttccggattctgggccgggagattgagaaccttacaaagaaaaccgatacctatatcacggtacgcacaaaagatgggcttaaatccatccgcaccgatctcatcatgtatgtggaacagaattaccatgtcttttcataccatttgacaaacgacatggtcctcgaaagtgttaccagccgtgccagtttcgatcaggaacttcaggaccttttaagcgattccaggttcgtgaagatctcctcctccatacttgtcagtatgcgctgcattaagactatcaacaaaaaggggttaatcctgcagaacggaaaggagttgttagtcgcgcgcgcgtactcggaagccaaacaccgctacatggagtatatgattcagggagtgaagcaggaagatcgtgtataccacggtatttgaaaattttgtgagctgttatcagtatatggagacctgccggcagaacaatcctttaaccatgcaggtcctggcgctgcggaaatacacggataccctcgtgtttcattcggttctggacggaatgtttcgcttacgtctgcttatgcaggatgaggatcaataacctggagatacactatgaaaaaacgcaaacaattcctttattttttagccatgctttccctgattctgacacttccttctgttgacatcccttccatggcacaggccgggacctctatcggtaccccttctgatgcggaggaggagttgccagaagaaacggcaccagctgaaacacggcaggcagaaacagaagaacagaaagagacagatgcggttccatcggctcccctgggccctcccagcgagaccgaatcttccgcttctgtttcgatgcccttcgataagatacaggcccctgccttggcttcgtccaagattgccaccggttccaatgcggaaccgcgcgaaattgttaaggtcataactccttattctgacatactcattctggcagagcgtcagaatgccagggaactgcttaattccaaactggaaaaccgcgattattctaccgcagttgccctgtttagcgacagaaccagggagttttatccgattcagtatgatgtggaggcactcgatgtgacgcagaccgggcttatctctctaaacggtactgtggaagttcccgatgatgtctccatcgatccggagcttacagctgtcacgattccagttttcctttatgatccggaagcgccctgtgaactgcaggcgcactccagtaatccggtcagagacagtcagctcctgctcgcccaggattcctcgtccgaggatctccagaaagaactgaagtacaatagccacacttatctgtattgtgatgatgacatagttctggaagttccgcttacctgggatgtaagcagcgttaactttggaatgcccggcacttaccggattcatgggattccggatcttcccgatggaattcttctaagcgacgaattttcttcttttccctgcgatgtaatcattcaggaaaccgggacattttcccttacaccgcccatatttgatggaatctcttttttcacccgctggacgaaaccaacgccgcagctggataaattacaccgttactattccatcggggacgacggagaatggcaggaagacaccaccgggaattttatgcagattgctacctataatacacaattgatgtctgtcttatattttgaagatttcctgtatgaagtcccctactatttccagctggagtatgacggcgaatgttctaacattttaaaggtttctataacggaaggcgatctgcattacgaactcatcgaaggggaccgggatggaggggatcggggagaacagcagccgcctaccgtcaccctgccaccagatcaaccggatcagacgccacctttaggaaccaccagaccagaggaaaacactcccccagagacgccaccgggagaaaccttacccgcaccagcagaaacacagccgacagaccaggagaatgccagccatacaggttcctcctccggtacatccggcaaaccgtcccggcacagcgccgtttcggatttcgtcagcggcccaggatatcaggaagccttaacctcgtctgcatccctgtctccgctgccggaatcagggccttccgttgaagcgtctgaaacggctgccgctatatctgcaccggcttcaaccgggcaggaagcggataccgccgattatacaattctgtctggcaggcgaatccacaaggaactggaactgaatccaggcaggccgcttatcattaccaaacaccgaatccgactggaaataccggccgatagcggactgtttactaatatgccagtgcagtccttattccgtgcagaagtaatatccctggacgatcaccatatctctgtgatgctctccatggacggcgtaccactgacagacctgccttccatgacaattacaatgccctggaaggcagctgacgaaaggcccgttctggaagttataaacgaaagcggggaggttttgggaacggccacgtacctggattccttcaccatcaccttccagctatcagaaactggcacctttaccatagagacacaggcttcggctgccgctccggctgctgtgataccatctgtcccggttgatccggcagacgggcaggccggtgattccgtttcttccagttcttcctctatagatgtggttgcgtgcctcctccttgcaggtatcctggtatccggcttcattatcctgcgtttttgcaggcgtggaaggagggatccggcatgaataatagactgacacaacttggaaagcggctcctccttctaaccattacgttttttctcaccatggggctgtttacagccgcataccggtttgacaataagtataccacgcagtctgtccagcccataaatggtatcctgttctatacgccggagaagactgaccctgtctatctaatcaacggttgggaatattatcagggcaggctcttaacaccggaagattttataagcgatctcccgctcccggacaactacgtttatatcggccagtattccggcatggagagtggtaatccggaagcatcccctcacggaagcgccacataccggctgaccttatcccttccggaaacacccgccttttatacgctggagctgccggagatttactcggcctaccggctctatatcggcagccgtctgatggcctcccagggaaacccggacccggagcactatgagccgtctctgtactccggctctgtcacatttgaagcctccggagacttacagctcttacttgccgtctcggactggtcccacttgtacagcggtatggtctatcctccggcttttggtactccgaacgcggttcatgcactcttaaatcaacggtttgccatcagtctgaccgtcaccgcactggctgcagttctgggcttttttcagcttgcgctggctgctattttaaagaaccgccgttcgctgttatctggtctcatctgtatggcctttgccgcctctgcaagtactccggcgctccaccagctgactgccaccgggattgttccctggtatagccttgaaattttctgccgctatgccatttatgggctgtccctgattctcgtcctggatttgtgcggcaggcagtaccgggcattaaaggcggcctcttatgctgccgccctgttcccgttcctggctctggcagtatccctgctggcaccgcgtctgtcctgccgccagatggttctgttttcccacacggccggaacctataaggttctctgtgcgctatggctgctgggtaccgccttcttctccaaaacaaaacaggaaccagagagggaccgcaccatacttctcattggaatctgtatctttgcatcctctctggcggccgaccgattatacccattgtttgaaccgatccgtttcggctggttttcggagattgccggtttcctgtttgtcctgttactcagtttccttctgcttcgtgattcagcccggttttacaagcggcagtttatcctggcccaggaaaaggaacacatggaaacgcagattcagatgcagaaaaaacattactccgaactggcgtcgcagatcgaaaagatccgcactatgcgccacgatatccgtcaccatctcacccagctgtctgttctcctaaaagacaggaatacggaggcggccgtacagtacctggagaaagtcacacacagcacctctacatctgcccccttgacattttgtgaggcgtattacgttgatgtactgcttcgttattactattcctgcgcagaggatcttcacatacctatgacagtccatgcaaatgtccctacggaacctggagttccggaagaggacttatgtgtaatccttgggaatatcctggaaaatgcattcaatgccagtactccggtaccgcagaatcagcgccgcattaccgtggctatgatctgtcaggagggaacagtctgcatagaagtgaaaaacacatttaaaggggaattggttccagacgggaaaagtttttattcttccaaagaaaagggccggcacggcattggactttcctccgtccgttccatggctgagaaatatagtggagacgtatggctgaatacggaaccgggagaaaatggggtcaatgtgttctctatacaggttctgcttttcagtcaatcctaaaaaatgcaggcagagtatcaccaaaaaataatgttggcaacataaaaataccgccctgttacgggcggcaaaagccaaaaaacgttcgatatttaaaatgtctacttaacaggtagtacaccaaaatcaaggctttcggcgttgcatgaaacgttcctgagcggattcgaaccgctggccttccgcttaggaggcggacgctctatcctgctgagctacagaaacatcccctgtgctgcggccataaccgcgcacaggctgtatattattatattaacaattatgcgtttcgtcaagttttacttgaagaatctttcaccaaatccttcaaaatcccgccgtctaatccgccgcctcatcaaataccacattgccctgcatccagatctgccccttaaaccgtcttccaaccgccggctctccggtcaaatcctgcttggcgatccccacatggaatacaatgtcactgcattccagtttcaaatcataaacctcttctccagtgatctggttcttcttttctacaatttctgtaatctcaccgatcactgagtactgatcacattccactccgcaaggcataaaacaggaatcaatgatcgaatacaaatcttccttcatcacccgtctggagatctgggaatacatgtcgatatcttcgatggtcagagtctccatggcatcctcatcgccattcttggccgcttccaaaagcgtgttacgctctttcgccgtaaccttcgcattttcccgctgcttctccgtcttctgaatcggcagaagaatcttgccgctgaccgccagtccggttagattggcacgcttagtctccagggaacgctggtccatgattctctccctgcactcgaatgaattatcgatataaaatatcagggaaataccgaccttatactcatcaagcagtcccgcatacgtctcacgctctgtatggcgctgaatggaacaggacacatccgatgtcatatcctcgcttcttaagtaaggataatagtagttcctgcgaaatactccgtcccggtccatctgaccgaatacggcgatacccattcctggcgcaacctcttttctgatctcacagaggttcgtctcctcatccagctgaatccgcttcattccggatacatcttctgtcatctgatctaacaatttatcgatatcccggtccttctggtagaggctgaatccaatagaccttaagaatttatgcataatgtcgtcacctgcctttacttatctgaattttactgctttcctgttcttctatctctattttctcatatttcaggaaagaaaacaatgaggcgaagaaaactccgcctcaagtcttatcgcttattatatactataatatgagataatgccagtaaaattttataaaattattatgattttatccccatttgctgctgttcatactctgcccggggctcccattataaccgggtatcaaacaggccacagaaactgtctatgggatccgtccccggaaatgcctccggtcctttcatcagcgcgtccacgagtgcatccagtgtatcattgcgggcatcatacgtattgatgtaagtccttgcctgaggaatgtctgccagcatggttggctgaccgcagcctaccactacgaccggcagttcaaacacataccatggaatctccccaccgccttttgacatgccaaacaccggcctgccgcttggaacatcacagagggtgataaccaggtccatatcctttataaagtcctttactgcattctttcccgcaaaatataaatccagactcggtttttctccctgttccatctgctttttcatcttgtccatgggactttcatagataaatgcgtcaaatcctctgtcacacagcttctgtttcagaagttcagccggattttctttcgacccgcccatcagcttcatcagttcccccatagcacctccgctgccctttacatggacaatcataattctctgatagcgttcaggcgtaatcggcagtacctccctgtctttatattttaccaatgtcagacagtcccggctgatggattttgtagtttccttatactcctcttttcccagtactttttcgagaaattccggtgtcggcaccaattcctccggtttccttttattcagtcccagatgcgctttcagaccgagtatccgggtgagtgcttccgtcatccgttcttccctgattgtgccgtttctgtaagcttccagcatcactgaaaaatcttcatccggatcgttaaagaacaggaacatgtcacatccggcattgatggctctgggaagcatctcgctcctcttcatccggttcgtcatggcaaccatgtgggaagcatccgtaactaccactccgttaaatcccatccggtcacgaagaagtcctgtcataatttccggacttaaggtggccggcatcatatcctcatcctttaaatccggattgatcagctttgcatactcaggaagcatgatatggcctcccataactgcttccagaccgttgtcaaacatggttttgtacaccattccataggtggcatcccatgttgcgggatcaaacgtattgacattgttggctatatgggcatctctgaagtccagaccgttgccgggaaaatgcttagccgtacaggcaaatcccggcgtcgaatgggcgccctccatataagcggcgctcatctttgccacaagctcaggatcgctgccgaagctgcgggtgatgatctccgtattctcccagttataaggaatatcgcagatcggcgcaaacgccatattgcagccgatcgcggccgcctcttcgctggacatcttcccgagagcacgggcataatcctcattgcctgtcgccccgattttaatttcagaggcaattggagttccgtcagcacaggccccgtctccgcccccttccgtattgcaggcaatcaataccggaattctggcatatttctgtaaaattctgttctgctcctgtatatcctttcccggcgccgaattataccggcatcctcccaggtgataggtttccattaacccttttaaatacgcctcatcacgggactgagtcagctgaaagaaaagctgtcccaccttctcttcctccgtcatgccggcaatagtatcttgaacccacttacagtcttcatcagaaagatagtatggattcttttttaaatctgtcataagcagtctcctgtcaatatatttgtacgatttttggttactcttctgtaaaatcaactctgcaagttgcggacaaactcctctgttttattcttctggtaggttccttcataggtaccctcgatcagcctcggaactgcctgttctttaaactctttccaggattccgtttcgcggcggaccaggatgggataatataacacgccattttccagcgctgctttctggtctcccggtgcatcgcccgtcatcagcacgttatccctgtcatagccctttaaaagaagctgaccaatgcagtatgccttacttcctgcctcctgtgccagtaccagatcaacatgctccagcaggccatggacctcccactcctccagtaccgcctccatatttgcagaggaaacaattgcgatatccgcaaaccggtgcgcgaaggccaggccctccctgactccctgaaacggctgtttctcctgctcctccagcagcccgatctttaaattcacggcggctgaccagtgaagagcctttttcaaaacagcactatgatttttttctatctccgcttccagggctgcctgggaaagttccggagaatgttccacccattgcgccagttgctcaagcccttctatgggcgtatagcactgatggatttcctgaagtgcttttaaaagtccgcagaaacggttgattcccctggtcatcgaatagagattgatgtcattccatctgtcaagaattgttttttcccagttctggagcccccattcttccacaagacagggaccgaagcacctgatatgcttgatattcatggtatccatggcacagccgtcagaatccacgcagataagataatccctgctctttttaaaaccgtcgaatatagactccatatgtgcctccttttatgcgtttttacttcggcgcagcgccaattccgccgtattttcctctactttctttttgttaagagggtagatgaaaatcaatacgagggcaactgcaatcaaacctataataggtacgatgcaggacatgcggaagattccagccgtaacctccgcatcgaaagccgtagcctgcgtatatccaaccaggctcaaaagaccgcccgtcaagccggaggcaaaagcctggccgagcttacgtgcaaaggaatagagtgagtaaatcgttccatcttcacgaactccttttttgacctctgcatcatcaatgacgtctgtaatcattgcccatatcacggtgttaaagaatcccaaaccaaccattgccagcgtatagaaagctacataaacatacggattctgcggctttacaataagacagacgacgaaggaagccgcgccggcaaggcaggatacgatcgataactcttttttgccgaatttttgtgccagttttacagcaaacggtgcacagataatcagcactcccagactgcctgccatgctggatgctgactgagcgcctgcagaaccgtaataattaggaaatacgtaagatgacatcccctgcatccccagctgtgccagaagcaaaagaatcgccgctgcaatgattcccatcagcgcacggtttgaaaataaactttttaacagttttccgatatccagtttttcactgttggcttccaccggtacgcgctctgtaacaagtttaaaacaaagcagatagcaaataattgcgaagactgcaaagacacctgcaatcattgtcattttggaaccggataatatggtctttccgtctaccacctcatatgcaagcagaggcgttcccactccgattacaagggaggcaagtgtcgctccaattgtacgccatacggacagctgcgccctgtctttcggctctgcagaaatcgcagatgccatggaaccataaggtatgttgatggatgtatagaagatggaaccccataaaagataggtgacaaccatccatacaatcttaaatccatacgacattcctgaaagtccggactgatagattaaaaatgaggcaatagccaccggaccgcacatccgtttaatccagggcttgaatttaccgtctttcgtcggtttggaccggtctacaatctgtcccatcgtcacatcagtaactgcatcaacaaagcgtgccgccatcatcagcgttcccacaacgcctgctgctattcccatgacatcggtataaaactttaacatgaacatggaagacagtataaaggtaaagtcattaccaaaatcaccaaatgcatagccgattttatcgctcattccaaatggtctggctgttttttccttactcataagatacctccttaatattggtcttttctcttcgtttcttatagtaacttaacattagaacagcccgaaccgtgagtacaattttatctttttttcgcatattttttagatacacttgaaataaacgtaaaattgtacgataatatagtaaaatcatctgaataaaaaaggaggacgatatcatgcattatgacagtgtccttatgtatgtcaggaaagttttggagaacaggggcatcccttccttcctgttccgggaaccttttgaagatatagaatctctcgatatgggactgagagaaagcttgatggaggattttgacaaaaataaatcatttaaaaagcttacagaatgctgcaaggaacatactctttattattttacagacaattactactgcacttatgtctgtatgtggcttcccgcttcagatactgcggagttttttattgcagggccattcacatatgttgaaattaacaaaatgaattattataagctactgtcaaatttggaggtaccggctgcgcttctgccgattctgaaaacatattattataatattgcattcgtcagttcagaatctcagtttaataatcttatggaaacactggctgagataatctggcagggtgcggaccaatatacggttgcggaaattaaggggaatatatggaacgcccccgatgataaccactacctcacttcacttcctgaaacgatttatttgtcaccggttaataccatctccctggaaaaacgttatgaagctgaaaatcaattgatgcaggcagtcagccaaggtaatcaggagctgcttaatcaggcgctggcttcctttgaaaaccgaagactgatcccccgtcttgccgattctctcagggattacaagaattatatggttatttacaatactattttacgtaaagcggccgaacagggatatgtacacccggtttatctcgatgagatttcatccaaatacgctaaaaagatagaaaatctgaccacaccgcaggatacgtctctgatgaaggaaatggcgcgtaaatactgccttcttgtccggaattattccgtgcgaggatactctcccgtaatccagaaagtaattaaccagatcaatttaaacttaaccagtgatttaggactgaaaaatctttcagaaatgttccatatcagtgcaaattatttatcttctttatttaaaaaagaaatgggaattaccctgaccgactatgtaaacaaaagaagggtagaacaggctgttttttatttgaacaccacagatatgcagatacagacgatcgcgtcttactgcggcattcaggacattaactattttacgaggatctttaaaaaattcatcgggatgacaccgtcaaaattcagggagcagatttccagacatcactaattctttactgacagatggatatctgtttgtttataccgcctgtaaaaaatgaaaggaacgttaataaaaaatggacagagataagcctttcattatccctgtccataaggaacacttgtcaatgcccctgttattctattattattccttgcaggcaatgataagataatcatgattgtagcgcaattgcctaaataaagtcacatgatttttcagatagaatatgggattcaaagcccagcgcgtctccagatcaactgcatacacttgatatcctgtcaaatcaatattaagattcaccggccaggaaaatggcagatatataaccagtttgctttgatcatcattagccgcgcatcctatctctccgcacgggttatcctgtatcataccggcagccggttttaaatcataaagccctatcgtatcagccatcatctttgcaaatcccatatcatacgcacccggcaaacgcagatcatcccgccagtcatttacaagtccgatatctgctctttcgctgcagaagttctgattctgcctccataaccatactccaccggcaccgtaggtaaaaccggcattagccccgttaagaactccctgccagaaagcttttcgtatctgacgctcatcaaatcgtccctgcgggctgtcaaaatatacattggcctcataactggtttcactgttatatacaggacgtgttatggggtataatcgaagatcctgtgccaatgtgcggttaagttctggatcagaatacgtatgacccggctgatacatataaaaatccagttcctctgcctcctgcagacactgaggcaattcgacttttggtgcaatatgaagagtcgtaaggcaatccggtgctagcctttttgtaatctgcaaagctctgtgatagaatgccactgtctccggatttgcttttctttgatcttccacagtattatattttacatcatcttctgcaagatttacatcaccactcaccaggaataccgggttgtagccccgcagtcttggaactgcatactgtaaaaagcgctccatttccaatatagtcattggctgataatatggtttatcttccacatttgtgcgtcctgcatccctgattccctgccaggtgcccggcacaaaatttccccatagcagaacaatcatgggcagcatacttctatttttcatttcgtcaagatattggcatacatgatcaaagtactcagcttttatattggaatagtcataacttccctcctgtgtaacagtaaatggatgaagccactgccggggcatgcaggagtggcgctgtggaagcagattcatctgtattgcattaaaattctgttcgttacgaaaatcaagatactcctgccattcttcaatatccggatgagtaaatgcactccaacaggtgtctgccataagaaaatatggtttaccttcatttataaaataatggctatccggtgatattgtaagtttcatattcttcctatcctttcgctatcatttattaacgatcccattgtaccgctctaattttctccccagttattttcgtcgctccatccttctttttttacataattctctttggccttgaccagatcctcctgcaaaatcttcgtgtactcgtccaattctaatttatcctgcagatataactgtccatacataaccgaatcgtcaaaaaattgtttatcaaaataggtttcatacaattttaacggcgatacatcatttttaaactgcagcgcctgcagcaatggattctcattgcttatttgtacattctttaccggagtaactccccataattcatttacataaagactggaatcttccaggccagtcttaaattttagaaaatctacagcagccagcagctgatccccctttgtagtcgttggaatacaaatattaccctgaggagctcctcctatttcatatgcaatccctgaagactgtggatggctctcagttgtcagtgttggaaactccgtaataccaatttcaaagcttaaatcaggattgctggacataatctttgcattactgccgaccgaaaaagtcattgcaacttctcccctcataaactgctccaatgcctcattattatccatagctgtaaaaccaggataccagtactgagacaattccttaatcataggataaatatccttccacggttccttcgtaacatcaataacaccattatctactccacgcgcaatctcattgacctctataaggccagtcttgttaatatccagctcttcaataaactgagtagcaagtgggtccatcatcatcctctcaaaccaatgatacccacctccttctgagaccttcatacctacaaccataggcgtaatccctgccccctgtaatgtttcacaggtttttagcagttcagcaaaggttgacggcatcttgtcaacacctgctttctccatcaggtttttattgtaaaataatttgcatagaacaccattcgtaggcacactggcatatctgccattggtgggatccattacctgggccattactgattcctgtaatgtatccatccagttctgattctcattgtaaggattggtctcattcattaggtaatcagtcaaatcaattacagagccatcgcgtaaatactgctgtccccacgcatgacgaaccagaaacagatccggagccgttccgcccattaactgtgtctgcagccacgtctgatactgatcgttatcaatgtattcatattccaccgtaatattaggctgatattttttatacaaatccagtgacttttttaaatactcctgcccctccgtgttattgtactcccacgtagcccatttaagagtaaccggcttatcgggatgccagtttccatcagaagacttttcacttgtagtatccgaagatacctctgtggctgtgttcgctgtctctgaactgcttctgttctcttttccgcagccgcttaaagctgtgagcgtaaaggcagccagtgtaaaagtcaaaagtttctttcccatcttcatcatataaatatcctcctcttattaaaataattttatttaagcttttaccgctcccgctgtaagcccctctacaaatggttttgtcgcaacagtaaaaataagaagcagaggtactgatgcaatcacataagcagcaaagttaacacctggcatttgataagtgctggcaaccaccttggacacctgtaaaattacaggccgtactttctctgcattggctgaaaccaaaggccagatatagttgttccagctggaaattaaagtcgtaatacatacagtagccaatattggcttactaagaggcagcgcaatataataaaaaattttaaagtcactggccccttcaatcgttgccatttcaaacaaactcttaggcagagattccatatgtgtcgtaatcagaaatgtagataaaatcgcaaatgctgaagatggcggcagaatctgtaccgcataggtgttcaacagatgcattttctgtgaaatgataaattgtggtataagtataagaaaatacggcaccatcatcatcatcatcattgtcataaacaatagattcttccctttaaactggaatctcgcaaaagcataaccggccagtgtagaaataatcaatgtaagcagtacattgccagctgttataatcagtgaatttaaaatactcctgtaaatttgtccaaatgcaattttataatgttcaaaatgtaatggcagactgaaaaagtacaaattctggtaaatctgaatatttgttttcagggaagatatgaccatcacaaacagtggataaatcgtaagaaaaagtataaacagtaaagtaccgtgtacagccaaaccaatcatacgttttttttgcatgtcatgcctccccctattggttctcagcgcctttgatatatttcatattaaaggcggtaatacctaatgtaatcaggaacaaaacagtccccatagcacatgcatatcccatgttataatatgagaacgtctcattgtacatatgcaatgcgggtactatggtggaatcacccggtcctccattcgtcataataagtacatgctcaaatgtctggaaagtagaaataatagttgtaataatcagataacgaaactgccctgtcaaaagcggtatatcaatgtaaaagatacggctgacagggccaataccatcaatctttgtcgcctcatagatgctggtatcaatcccctgcagtcctgcaagaaaaatcaggaattgaattcccgctacccatggaaattgataaaaaaccagagcccccagagctgtcgcctgctctcccaaccatgaatgcatgaaattttcaagccccaatgcagaaagaaagccgttaagaagaccattataatcgtaaatccatctccacagtaatatcatcaccacaccaggtactaccattggtataacaaacaaatatttatacaaattactggaaaattctcgttttacactcattaccagttcagccacgagaagaggcaatgtaaccactttaatgacagaggtcaccaatagaatcaaaagattcagcagtgattttccaaacgttgcatctgatagcaaactgatataattttgtattccaataaataccgatatacgtccaccatcccattcaaaaaaagaacggaaaacagcataaacagaagagtacaacttaaaaacaccaagcaggacaaacaatggtaaaagatacaaatatggttgtaccttgcgtagaatacttcctggcattgtctttctctccaatgacttttttgtatccatctacatcaccccataattcctttattctgatttttcctcaatcaattcattcacataagttgtcaactccccaggtactgcatactgcagaaaacatcttcgaaaccattctccttccaatgccgttttaaccagctctgaatccaatgcttttaaaatgtcaaccggttcattgcacaacgtacgttttacattattaaaaaacagttcattttttctttgtatatcacgcatctcaacgggatagccgccccctccttcacatgaaaacagtttatcaaaaatatcttccaattttagttccgcagcccatccaaaatccttggcaaacggcagcgcaaccgcgtttccgttattaatctgtgtaaacaggtatgcgtccgatgcatccgttatgtaaccgcagttcactcccggataactgttaagtgacatacaggctccctgaccggaaccacagccggtaattacaaaatcaactgcacctgtattgagaaggacaaatgcctgaatccccagatgaatataattaagcactggccggtcattatcggttctcatacctgtattaaaccattccacatgatatttagcagcgcttttttccagagcccgtacaatcaatgcattttttccagcctggctgaattcattcatcaatgctgccctcataatttaattcctcctatcattgtctttattattagaaaaaatccattacggccttacgaattgatttacagtctaaaccaaacagttctctgttataactgattggattcccctgcggataacaatccggtataccaatacactgaagttttatgcccagtcccagttctgctgctgcctgtccgacggcacttcccagaccgccataaatattatgttcttctaccgtcagaaagattgaatgattttctgataactggcttaacaatcccttatcaatgggtttaattgtaggcatatctacaacagtaacagcaggccctcctgcttccagcagttctttctgtgccgatacagcctccgccactgcctctccaatagcaattactgcaatatcatgtcccgcagaaaccaccttcccttctccgattacagcctcataattctcatcatataaatccggaactggattccggtccagccggatataagccggattctgaattgatgacaacaactctatatattttgctgcagatacggcatctgccggagcaatcatcacactctccggcatggaccggataacaccgatatcttcaagagaaaaatgtgttgatcctgcctgtcctgcactcataccacaatgtgttcctatgatctttacattcgccctgttgtaaaatacatccgtgcggatttgttcgcatgcccgcagactggaaaacaccgaaaaggtgtgtacgaaaggcttcagtccctcatgtgccaatcctgctgcaatagaaatcatattttgttccgcaataccgacatttataaacctgtccggaaatcgatcttctattttttttaatttactggagcctgccaaatctgctgtcataacaacaatattgtcatctgtttccattaaaaattcaagcatagcggctgatgcctcaagctgtgaatgtacagctctttctgccttttcctgcatacttccgcctcctaaaatgtaaatttattaataagttctttataacttcccgatatgtagtgactggctccagtaccggctatttcatcggtcagaccatatccttttacggtatgtgcaataaccgcatatggtccactgcattcatttcgaagtcttaaaaacagcctgtccatctctgtcacattatgaccatccacttcttctacagaaaatccaaagctgctccactttcttccaaatggttcaatctgaaccatttcttccaacggaccatcacatccgactctgttttggtcaataattactaccagtctttttaatttttgctgacaggcatacattgcagcttcccatacacttccttcacagcattccccatcaccaagaatacaataagtaaaatattccttatttttcatcttcccggctaaagcgattccaactgcaagagataatccatgtcccaatgaaccagtactcatctccactcccggtatctgatgtgcatctggatggttcattaaacggcttccggcagttccaaattctgcaagctcgtcgtatggaataaatctgctggctgccagtgctgcataaagagccagtcccgaatgtccctttgataaaatgaaccggtctctttcgtcccaatctggatttaaaggatcatatttcataactgtaccatataaactagccatgatatctgctacagaaaggctccctcctgcgtgtcctcctccagaagaacatattgccagctttataccatccctgatttgttgtgtcagttccataagcactccccctttttatattcaaatcgagtctattcttcgtcctatctgaattaaaacatatctattactgtaaagtcaaccacttttgttcttttattgttcctagtttgttatttttgtcatattatacaagttttttgttccgtttttgtctgtttttttgttccgtttttaatataaatgtattgacttttttacatacttcttctaagattaataacatgaataagaatgatctgcttacacacgaaaaattaattttacagcaaatttatctggatgagcttgaaacaggcgatacaattccttctgtacgcgaacttcaatcccgtctctgcttgtcgcgcaattccgtactaaatgctattcagtcgcttagtgagaaaggagttataaagaaaggaacttctccacggcaggggtatcgcctttgcgaaaaaccactcagactggatggcaaccataatcctaaaaaggaattatctgttcagtatctacttccttttacaacctggaactacacaattaacaaatacttatcaagctttgaaaatattttctcaagacacggtattaacctgatttttagcaatacccataattccgcggaagaagagggtcgtttattggaaacgatttactccaaaccagcagctctgcggccggattttctttttttaaccacctgcgacagcactatgaatcctaaccttgagttgcttcagaagatcagcagagaaatcccctgcatcctgattgatcgttactttcacggtaaaaattttcactatattggtgtaagtaacaattttatcgggagccggactgccgattatttattggaaaatggccatcgacatattgcttatataaaggcctatggaaagatttctaccatacaggacaggttttcatcttttgagaatgccttagaacgctctgctgtatttttagatcagcagtgcatatttgccttatctaatgcaaatgttggatcaatctcagagatacaggaggaaatagaccgtatcggtgccagaattttatcactgtcaccacgtccgaccgccgttgtatgcagttttgaccgtattgcggtagcgctgatgaatttctttttaaagaacagtgtgcgtgtcccaaaggatatctgtattatcggctgcgacaatgacgtagacgtaggggccatgtctcccctttctctgactacattccgccacccataccgcgaatgtgcacgtgaggcaattgcccgaatagaaaacattaaaaataatcaaaaagcttcgccgcattctgtagaattttttccagaatttattattggagaatcaacataactaaagtacttttcataaacagtcagtcaaaggaaaaaaaggcctccagttaagcatatcaatcgcttaactggaggccttttttgccatataatttaaaattctacatctcaaccttgttgaaatcttaattcctacacaactccctgagccatcatagcttccacaaccttctcaaatcccgcaatattagcgcccgcaacatagttgcccttcacgccgtatctctcagcggcatcggctgcctttgcatagattccaaccatgatatcatgcagcttctcatcgacttcctcaaagctccaggacattcttaagctgttctggctcatctccagtgcggaagtagccacaccgcctgcgttagctgccttgcccggcataaacatcattccgttctcctggaagaaatcagtcgcttcccttgtagaaggcatattggccccctctgccactgcaaagcatccattggccttcaatgccttcgcgtcgtctaaattcagttcattctgtgtcgcacacggaagagcgatatcgcagggaatggtccagattccctttccttccgtataaacggctgtcggaaccgcatccacatactctttgatccgtccgcggcgtacttccttgatgtccttcacgatatccagcttaatgccgtccttatcataaatatatccgttggaatcgcttaatgcaaccaccttagcgcctaactgctgtgccttctctgttgcgtagatcgctacattaccggagccggaaaccactacggtcttaccggccagttccttatcgttgtgctttaacatctcatctacaatatacacaagtccgtaaccggttgcctgggtacgtgccagggatccgccataagtcaggcccttaccggtcagaacgccttcatataaaccggtcagtctcttatactggccatacatatagccgatctctcttgcgcccacgccgatatctccagccggtacatcctggtctgccccaatgtacttaaagagttccgtcataaagctctggcagaatgccataacctctctgtcagatttacccttcggatcaaaattacaaccgcctttgccgccgccgatcggaagtcctgttaaagagtttttgaatacctgctcgaagcccaggaattttaagataccctggtttacagacggatgaagacgcaaaccgcctttgtacggtccgattgcactgttgaactgcacgcggtatgccttgttcacctgtacctggcccttgtcgtcaacccacggtacgcggaatgagataattctctccggctctacaagacgctctaagagtgccatcttacggtacttttcctcgttggcatcaatcaccagctttaaagaatccagtacttccttcactgcctggtggaattccgcctctccaggattctgatttaccactctctcataaacttcatcaacatacgacatagatttttcctccttgtgatttcctcatgttaccatacatccgcaaaaaacgtaaattttgctctcaaaagggcaaaaagaggccagaacatacgtcccggcccctttgccttttgtaactgatagaaattatagcaagtaaagattgtaaagtcaataattaccaaaactttattttattaatttttttctgcttgctgccggtttgttatttttttatcattatatctctctttaccaccaattgttaaccattatatttttatagttgacattcatttctgcacatgatacaattttttacataaagtgtttaatctgacacaaagtaacagaagggagtttctattatgaattcatcacataccactcgcactgccgtaccgtccaggcgcatttccacaagagatttggcatttgcgggaatgattgcggccattcttgccattatatcacagatctcagttcccatgccaaccggagttcccataacgattcaggtatttggaattacacttatcggtgtcgcttttggatggagactgggactttacggctcactcgtttacatcctgcttggtgctgtcggccttccaatctttgcaaacttccgcggaggcttttctgtactggtggatttaacaggcggatatatctggtcctggccagtcatggcggtactatgcggactgcagattaaatctgaaaataagaaactggaaactgcctccatttttctcttttctttcattggtctggccatcaacgaaacagccggcgggctgcagtgggctgctcttgcaggcgacatgtctgtatggggagtatttgtctattccatgacagcatttataccaaaagatattgtacttacgattcttgcagttatctttggcattcagattcgtaaaactctgaatcgcgccggtataaccagataaagcgaatggttccattttacagcgaataacccagtcaaatgggacaggcgatatcatccattgactttccgctccacatctgctatgatttcctgaatacaaccgtgatatggtttaagattatagatagaaagaaggcttttcacgcatgattcaggaaatcgcacctcaccggttccggaacgaattttatattaaaactccgtctccggacagttatgtcctgtttttccaggatggttccatcctgctcaatcataccgactcattgaaaatcccgaaattttccgaactaaacagcgctgatgccgacatgatctccggccactgtgattacctcttttccattgatacgaaagaatactatttgctcgatgaaaccagcgtatctctgactgaagatgagacgctggcattctatcccacttcggttatccgcgatttagaaccgctctggatttcatttgcagctgccaacggtgcagagctttaccgcttctaccgcaataaccatttttgcggccgctgcggcacagcgaacataaaaagtaaaaaggaacgctccatggtctgcccgtcctgcggcaacactgtctacccaaagatcgcaccagccgtcatagtggctgtcaccgatggagataagcttcttcttaccaaatatgcaggccgtgaatacacccgctatgctctggtagccggctacacagaattcggtgagactctggaagagactgtccgccgcgaggttatggaagaagtcggcctgaaagtaaaaaatatccgctattataaaaatcagccatgggccttcagtgactccatgctggtaggtttctttgccgagctggatggttctccacagatccgtctggatgaaacagagttatccacagccgtctggatgaaacgggaagatatccccggagattatacgaatgtgagtctgacgcatgagatgattctgctttttaaacacggtcagctttcataaagtttgtaaacaattgcatgctttacgaaagctgctccaatatttcctgcagtttctccgccaacagctttgcaatagcctcatttccctcatcggaaggatgcagaccgtcaaaggtcattcccaccgcttccacagggtatggatacggatctcttttccagtcgtagggaatatccacgtaacccggataaacatagtcgtgatatccggcttccttctgcagccttttaaatcgaaccacactctcggctgtaaaaccggcatttttgtgaagatcaaccacacaaagcccggctttctctgccgatctggcaatcgcctctgctatatcacacaaccgctgacctgcctgcgggcggtaacttcccatagtctgacagcccggatctccaaggcatacgtaatccccccgttctaccggtgtcattatcacgatacgtcctttcggtgcagtctccctgatacgtgctgtcagacatcccagattacccaatattgttccaggaatcttttccataaaatcggcgtctgtccccattggaactccacggcgccagtcatttgtccctaaaagaactgaatagatatctgcttccggcagtttggccgtaagccagtccttagtctccgaaccattaattccgtgattcatcagcctcagaccgccaaccttttcacacgtccgatccagatatccggacttcacacgatatccggtttcgcttaaatgatcatttaaatatgtaaatgaatccccaattgcacaccatctgatttcattcattccggttcccccactcataccctcattcaccccttctatattcctggaaacagagcgcccatcctgtttacagacgggcgctccaatatcagacatgaatctatacattttcatatgccgcattttcaaaatccagcaccgttttatggactccggatgctatctcgattctgctttcggcaaattcagtgaaacttgcaggattatcatacctcctgtagttatggatcgatatttcctctccattgaccgttagcggcagaagccagccacaacgcatctccccctgtgtgggcgaatgataggtgcagtcaaacgtatcacctgtaacagatgcattctgaaagttatttacaaagttctcaaagcttccgttttgtttttcagatcccatctcagcaatccatacatttgcatgtccctgggccgtatattcaaacggactgtccatatcaagttcctcattccatgtctccggatatactgcctgataaaactctttttttactggctgccacgatgcgggttttaatgacttcaatgcaatataagccttatcttttctccctaaaacccagccatatttctcaatgacctcatcaaattcttttgtcggaaaataagcatgcgtatactgataatcgatgtaatcggcatcaattcgatacatacacattaccacatttttattgattaccgctttgggaaggaacaaattaccggcaaattgattgggtctgtagaaatactcctccgatcccggggaattcgtaaatacaaccgcttttccccccagcgacgcagtccatacatgctgctggaaaccacggcggcctttccggtaatcctgtacacagcccagcatatagtcatcggttctgtacgtatagatatccgcctgtgtcattgctgtctggtccggcgtttccgtaaccggaagccccagtttatccatcagctcatatctttccttatatgcatttaatcgattatacatccaattgtaagttggaaatacttttaacgaattttgaatgacttcccggtccgaatacgtctgcatcccccagaaaaacatgatattttcaaaattcttcggatcaattccatatgtctttgcatccttaaaatcaatactgacacgctgcctgttaatccattcacccggctgccacgccgcttccgcaatcgcctttgggcatgtataaccgtaagctgccatcagaaccccacaggttgagagatcatcaaaggaatattccgtatcccacaataatcccataacaggcaatactgcttctttctgcggattcgtaatagcatttgtgtatgcacgtccatgtgttcctcccaaatgcccgcgaaaagaatttgctgccagatcaaagagcagcatatcaattaacattttgctctttatgcggatgtcctgatcatccgcataataggccagtcccagcagagccagcatatcttctgcataatagccctggctcagccattccgaaaaaccgaaccggatacgccatgacagccattgtctgatttgtccggctgcgtgctcctgatgccattgtcccgtctgtccgttgttaagaaatatacggtccgggaaaattttacctgtcagatactccgcactgtggaaaagaatctgatgattttctgtgaaatagcatcccgtcgtttctcccggttcatccagccagtaccggaatcctaaaagagtggattctattctggcacaatagtccggatccatataactcttgtcccggtgctccattaatattctgatatatgccggaataataaaatccgcacaatcccgcctgcttgcgacatgatccaatcccaaatccatattttgataatctatcgcctcagtcgtttctccacagttttgcagctccattttggcaagttctaaataaactccatgaaaggatcgaaaaccgtaacgtgtatcaccggcctttccctttgaagcttctaccattttttttaaatataaaatccggtccatcacactgccccctctgttaagactggctgtcaccatatattttattaaaatgttccgttctttcttccacaattttttctattcctgcattttcacattctttcatgaatgtatcatacattccatcaaattcttccggtgcacacgtaatacatttcaccagccattcagaacacaccagatctaaatctgtttttctctcagatgctgacggtgcggaataagaatctggtaccagcagttcgcccactaaagagttcttataattattcaatacgtaattttcgtaccctacattattagaagccgtcatctcatggaattcgtccgctgtgctcgcataggcactgttcccaagaataaacagatcattgccaagccagtccttatccttggcattatattcactgtcaatgactttcggcagaccattggaatccagcgtataatgctcatcttcaaatccattgataagcacatatccgccctgcttcgtacacagccagtctaaatatgtcatacatgcctctaccgtttccgcatctgcggtcttcggacaaaaagctatcataccgcccggcgagtaagtggctgagtactgcttgccattatttacgttctttaatgatggaatggatacaaattcagcatccttattattttctttcaaggacttaaggagattactggtaacccgcacattaaagctgatgtcatattcgcagaagcctaacgccccattcacaatatcactggtaagagaatcctttgtctctgtataatactctttatccatcagccctgcattataacatttgttaataaaacggaaataatccctgatgccctcatcgtaataatattcaattccagttgcaatatggcgttccttctcattatcacccagttttgtaaaggccgcggccatggtattgcgatagcagactgagtttgaaggattaaacagtgtccagaatgaagcacctaccacatcctttctctggtccggattatcatttacaaatctggttaaaacctcaaacagctcatccggagtttccggtacctctaaccccagtttatccagccagtcctgtcttataaaaagattgctggccgccagagtcggcctcttcgccacaattccatataaatggttatcagcggtttttcctacatcaattacatcctgtcctaaatacgcttttaagtttttggcctgatcctctccctcaacaaattctgtcaaatcccagataccgccctgattccagtaatcttccgcataagcataggtataagttgtaacaatatcaggagcggttccggatgacatcatggtctgcatcttagtaacctcatctgccctgggcacagctacaaattctacattgatgccaaccttattcatctcttcattcacatatttaacccatctgttatccgtcaatgtactgccttccggagcattgcttcggtcgaaaagttcaacctttatcgtaacattgtcaaacattttttcaccgtatgttgttacatagtttgcatcctttgccgctgctgcttttgtctcactttcctgttttcctccgcatccggccagtgaaccagccgttatcacagctgcaagcatcacggacacccctcttttagttgaaaaacttccctttttcattccctcttctcctttctttccaacaccctttttcgggtgcactcatccctttacagctcccagcataactcccttaacaaagtacttctgaagccatggatatactaccagaatcggaatcgtggatactgccacacatgccattttaagagactgtgacatcacctggacatccgcttcactggccgctcccgaattcagctcatccgcaaacagcagactccgaagcctcagctgaagtgtatacttatccggatcctgaatataaagcagtgcatcaaaatagttattccaatactgcactgcgtaaaataatgcaatcgtggcgataatcggtaccgaaagcgggattacaatcttaaaaaataccgcgatatccgatgcaccatcgattctggccgcctcttccagactctccggcagctgcttaaaaaaggttcgcattacaataaaattaaatacgctcattgcctgtggtatgtaaagagaagtgagcgagtcatacatcccaagctgcttcaccacaaggaaagtcggtataatcccaccattaaaatacatggtaaaaatgatcagccccaacaaaatctttttacccggcagcgtatcccttgacaaagcatatgccgcaaaggttgtcagtaaaagacctgcaaaagtacccataaaagtaacaaaaacagtggtactcatagctttccacatctgctgcttgccaataatctgctgataagcgctgattgtaaaatcaatgggataaaatgtaacctttcccgacagtactgcattatatccactgaatgaatatgccaggacatttaaaaaaggatatacacaggcaaatacaagcagtgtcagtactaaatataaaaagaactttcctactgtaaatttacgcttttgtgccgctttttccttcatgttatataatcccctcctccccaatcagctttgcgaatttatctgcaagaaacagaatcagaatattaacaaccgattggaagagaccaatcgctgtcgaatcactgtattttgcattctggatacccagcctgtatacataggtactgataacctccgatactcccattactttatcatttcccagtaatagaggtgcatccagtcctattgtcatcattttagaaacctgtaaaataagcattgtcacaatcacggattttattgcaggcagcgtcacatagatcattcgctgaaacttggtggcaccatccaaataggctgcttcatacatcgtttcatcgacattggtaagcgccgccagataaataatggttccccagcccacctctttccacagattcagcattacgtatacaaaaatccaccagccattgctgcttaaaaatggtattgcctgacctcctgcattaacaatcagattattaatggttccatttctctgtgaaaataagttagtggcaattcctgcaacgactacccaggaaatgaaatgaggcagatacagcaatgactgagaaatctttttaaaccgtatgcttaaaacctcgttcagcattaacgacacgataatagtaatggggaatgtcacacacagggttgtcagattcaagaggagtgtatttctgaccgcactccagaaattcgcattcttaaatattcttctgaagacttctaaaccagcccactcactcccatttattcctttaaatacgttataatccttaaaggcaatcaccacaccatacatgggccagtatttgaaaattacgtaatacagaatggcaggcgctaataaaacatacagccacttatgagtccaaactctgcgccctaaattcttagtatagagcagcccgtttccctttatcattttcatttggttccctcgcaatctctgtgatacaaccttactgattaaccagacagtactctgcacacataatcagaaacgcgcccataccatgtaaatcgtttaccaccacaggtctgtcgcagtaatgtctgtaatctccaacgccggtcccgatacagacatttccgataagaatatcatccccagcccactccagtgaatgaattaccgcctcataccctttttttgcatactgaaagtattttttatctaatatccctttgcgaattgccttacacagggcggcagtaaacaggcaggaacaggaagtttccaaccagtttccctctgtgtcccctttatccagcacctgataccagcgtccttccgatgactgaactttgcatactgcatccaatagggagcaaagactctggcatattgtcccatatttcgagtgatccctgctgataaaatccagatcatccagaatggcaaccggaacccatccgactgatctcccccaaaactctggcgagcatccggtctccttatctgcccaaacctcacttctgctttcatcccaggcatgatacagaagaccggtcctggaatcccgggtttttgaaatcataagcagaatctgtttgatcaccagttccgtgtactccggtttatgatagcgatacccatattctgcgcagatcggacctcccatgtacagaccatccagccacatctgatgaggcagtgtgcgcatatgccagaatccgccctcctctgtctttggaaaatcatagattttaggaacgatccggtccagcgctgtcttatatcttgggtcgcccgttctgtccatcaaaggataaagcagaattcccgactgcatatcatccagctgtccgtcatcgtaattcttaatattgccctcttcatcaatctgactgtccacccatccctttatataatcaaaataagcttcattctttgtcaggctgtaaatcttatacataccggacagaaacactccctgatggtaatgaaatctgtctacaggcggtaattttgccgcttcgtacttgctcatgatagtattgcaggccttttccccataccacaatgcatttttttcgctttcacccatatatcatttctccttttctttctctccccttacttaatcagaaccctccagtacactgttcgcatcaaacgatcccagccagatgttttccatgatttgatcaagcagatcgctgccctcaccctcaatttttttgatattcacggtacgatctgacgtcagaatgtctgaaaatgtttcacatgcctccaaggcatcgatatccggataagaggaaacccactgcctgaacatcccttcatccgtatataccttttcgtactgcggcaaaaagcccaaactgatctgcttctgttccgaaactttcagtgcattcaaatagtcaaaaaaatatgtggtaaaatccactgcatctcctttgtgctcagactgttcagatacgcacacatactcagaccacttaatgtcagaggccgtcttaaaatacggcaggggtgctacccccacatcaaaccctctgttggcgtaatccgcaaaagctccggaagtaccaataaaaagtgcaagacggccgctcatcagcatggcggcggcatctgtataagtggagtttgcaaccacatggtcaggtgcacaatgatgacttaaggataaatctgcaattgactgaatgacatgaatcttttcatcgctgaagtggagttttccataccccccggataatggttcagaatctcctgccgacacggccagagccgtgattgcctcccacgatgtcggcatacgggtaccataggtttttacgcgtttttcattaaatccatcctgaaatgcgtttttaccgctcatatcaacagtcaggcgttttgcattttcaacgtattcatcccatgtccatacctcgccatttacagaaggaggcgtaatcccttctgcttttaaaagttccttattataataaagacacattgttacataattcaatcttgctccatataccccttccccaaattcgtaaagcactccctttttgccccattgatatacatttgactccggaagcaggaatacatccggcatttttccctctgcattcaatatgctgattttgcttaagtaatctggcttcaatacaaaatttgcttcaatttttatgcctttattttctttctcatattgccggatcattgcctctgtgaaggccttttcacttcctgatgcccagctgtaaaaagtgagaattgtatccggttccattgataacgccggatcggaggtgctctgtattcttttacagccccccagtattgatattaaaagcagtatcaaaaaagtaatgacaggtaaccatttttgtttcaatttttctccttaccggtaaggtaatcaatcttgattacgtttattatattggattatacagatgaatcatagaaagattttgatttagaattagcaagattttgacatcttccgaaactcctttggtgtgatcccctttacctttttaaatatttttgtaaaataattggcatcataatatcctacctgatctgcaatttccgatatactacgctctgatcccttcaacagatctgtggcgacatttattctatagtcttcaagatatgacataatagagactcccgtcgtctgactgaattttctggagagataagcgggagacagaaaaaattcatttgctaatacattcaaattaatatcctctttgtaatgattttttatatatctgatcacattatcaacaatttcactgcggccggtcagttctctgacctttgtcaccaaggcttccgcactggcatttactgactttaaaagatcctcagatctgttaaaatcagcgagggccatgggtgagaagcttctgctgatatcatccggcaaattaagaccgtagctcgtataaatactggctatgacggcattaaaaacatgaaaaaattcagtataataaataaaattttcattgtcagcttccagttcacccacgatcttacgaatcaacacctgatactgattttctctggtatttttaagcgcggcttccagctcatggagatcccagactgttttatgtttttcaggaatggtatcagcctttataagaaatggtgtgccaggataaaaccggcgatccagattttgctccaggcactgaagaatctgatcaagcgactctcttccgctatacaaaactgcatatctggctatgtccatcaaagcgtctgatttatggctggcaaaaacaggcgtgcctggcctgtcactgtaaagcagaagaatctggttcgtagagtgaaagcagatatatttccaatcgctgtccggataaatcttttccagtttccagacattcgcctggctgagcatatctttctgatacaagagcagaaatgttccgctgacttctttatgcttcataactttataaaaatcacgccagaagatcatcctcccttttgtcatcttcttgctctcctctatctcctcttcctccagctgactgcagattttttccagaaccctgataaactgctcactttcaaatggttttctgatataatccaccacaccaacctgtatggccttttgcatatattcaaaatcatcatatccactgatcacgataaattttgtcttaacattccgatattctttctttatcttctcaatcatgcccaatccatcctgcatgggcatttttatatccacgaggaaaatatccggcttttctttgttaaacagctcccatcccttttcaccgttttcagctgtccccaccaccaaaagcggaagctttgatttttcgattctctgagtaatactttttctcacatataattcatcatctgcaatacatactctatacaccggcatcctctcctctgtctgggtctttaataacaatttctattttaacgccaaatccaattctcgatgagattttgaattccagattctccctgtactccagatataatctctggaacacatttttaacgcctatatgttttgactctgcaagcctgttatctggattttctttaattttttcaatatcacggttcaattgacacagctgctcctcactcatcccatttccattatccataacctccagtataagcccgcatccccttcgttttgcctgtatcgcaatacagcactctcccgccttatcccggaaaccgtgacgcgtggaattttccaccagaggctgtaagattgccttaattactttttcctccagaacctcatcctcaatatcataaaaagtctcaagattctccactttatactgcatgatttccaggtaccgctttgtatactcaatttcttccctcagctgtatccatttttcctgtcgtaaattatatctgtacaactgtcctaagtttccgcacagagagatggcttcctcttctttttcatccagaattaatccgctgatcagttccagtgtattaaataaaaagtgaggattgatctgcctctccagcatcttaatctccgtttccttttgaataaggcttatattctgatttgtcttgatcagatcatagatagataccgacatttcattaaatcccgtaatcagctcaccgatttcgtcctgatatggattgtccaatgtgatccctatatgattggcctgaatctctgacatggcctctttgcattttaaaatcggcctcgttaaatatcgtgaaatcataaacgcaattaccgccattaacgccgctactacaatcatgattaaggcagcaaaggaccagataccggtattatccgcgtgaacagaactccatgctctgccagcctgaataaccatatttttatgattgatacgaaggtttttctgctgttcatagctgtaattcgacgactttgcatgatctcgttcttcatttccctctgatcccccaagaaagagattatgctgtggaaaagataatgtaacactctcaccttcaatgtaattttcctgaataagagcctcaatatttttcaatggtattctgaccagaaaatatgcagccagctctaaggtttcataatttttaacctgataaaccatggtaatagaatcccggtacccggaatagtagcacagctgctcgtctcctatcagcatatacttttcattttccatcagttcaccgtaccagaactgatgttccacatggaaattatagtcaaaataagtcatctcattaccggcaatctgggtaccgttcactgtttccagtgcaaactgaatattattatacagaaaggaacttctgcccatattctttttcagtgtgttaatgcactcctgacgccggcggtcatccgactcaaaaaagaagatctgctgcatccagttactatagctgagattataagcaatcccatcgatctgctcaaaatagtttaccagaacatcatttttttcctgaagtgtctgattaacagaatccataaccacctgcctctgcaggttactgtatatcatcagggaaacagcaccgctgattaaaaatgtgacgcaatagattgccaccagtatcgtcaatgtctttttccaaataccaaatttcataaaccatttcatactctacccctatcatctgcaggaccttacaccgcctttctgttattatagcgcctactttattttttgtcatttgattatgaaagagaatctttaaaagcccctgccgggaaaaacttatctcccggcaggggcttttttgtcccgccaaacacaaaggaccgtcccgcgaatcgggtacggccctttgccacctatttaaacttatttaccgtagtaagcttttaaatacatttccttgagctcgctcatcagcgggtatctcgggttagcccctgtacactgatcgtcaaatgcctgctctaccatcgagtcaagtgtatccaggaagtatttctcatctacaccatactctttgatcgtcttcttgattccaactgcagcttttaattcttcaatcttatcgatgaatttctttaatacttccgcatctgtcttgccctggattccgcagaaacgtccgcattccgcatatctggcaagtgtatgaggatattcatactgcgggaaagtacccatcttggtcggtacttctgaagcgttgaattccataaccagcgtaattaacagcgcatttgcaacgccgtgcggcaggtgatggaacgcacccagcttatgcgccatggagtggcatacacccaggaatgcattgttaaatgccataccggccatacaggaagcgtcagccatcttgcatcttgcctcaacattagatccatcattataagctgtcggcagatattccagaacgttcttcattgcctttaaagcgagaccgtctgtataatcagaagccataacagatgcataagcttccagagcatgagtcagaacatcaacaccggaggcactcgttaagcccttcggctggctcatcatgttgtctgcatctacaattgccatcttaggcattaactcgtagtcagccagcggatacttaacgcccgtatcctgatctgtaataactgcgaaggaggtaacctcggaacctgtaccggaagaggtcgggatcgctacgaaatacgctttttcacccatcttcgggaaggtgtatactctcttacggatatccatgaagcgcatggccatatcctggaaatctacttccggatgctcatacattacccacatgatcttacctgcatccattgcagatccgccgcccagtgcgatgatcgtatccggctggaatgctctcatggctttggctccggcctgtgcgttggcaagcgtcgggtccggctgaacatcggagaataccgtgtaaacgatgcccatctcatctaatttatctgtaatcggttttgtatatccgttcatgtaaaggaaggagtctgttacaacaaatgctctcttcttgccatatacatcctttaactcgctcagtgcaacaggcatacagccttttttgaagtaaaccttttcaggatttctgaaccacagcatgttctctctcctctcggcaacggtcttgatatttaacagatgttttacacctacattttcagatacggagtttccgccccaggaaccacagcctaatgttaaggatggtgtcatcttgaagttgtagatatcaccgataccgccatgggaagaaggagtgttgattaagatacggcatgtcttcatagcttcggcatgcttcatgatcttctcatgttcatttacattcacatacagggaagccgtatggccatatccgccgtctgcaaccagctgagcagcctttgcaagcgcctcatcaaaatccttagccttatacatggcaagaaccggagacagcttctcatgtgcaaattcttcttctatattaacagattcaacctcaccgattaaaatcttggtatcttccggtacatcgacacctgcaagctttgcaatggtgtgcgctttctgacctacgatcttggcatttaaagcgccgttgatgatgatggtcttacgaaccttctcaatctcatcgtcttttaagaaatagcagcctcttgctgcaaattcatttctcgcctcatcatatacactttccaggaccgtcactgactgctcggaagcacagatcataccgttatcaaatgtcttggaatggataatggagttaactgcaagcttaatattggctgtatcgtcgatgataaccggtgtattacctgcgcctacgcccagggccggctttcctgaagagtaagctgccttcaccattccagggccgcctgtggccagaataatgtctgcgcttctcataacttcgtttgttaattccagtgaaggaacgtcgatccagctgatgatgccttccggagcaccggccttaacagcagcctctaaaactacctttgctgctgcaatggtacagttcttcgcacgcggatgtggggaaatgatgatcgcgtttcttgtctttaaagagatcagtgtcttgaaaatcgcggttgatgtcgggtttgttgtaggaataacagctgctacgataccgatcggctctgccagcttcttaattccatatgccttatcctcttcaataataccgcaggtctttgtttctttataggcattgtagatgtactcagctgcgtagttgtttttgataaccttatcttccacaacacccatgccggtttcttccactgccatcttggcgagagggagtctcatcttattggctgcacttgctgcttcatagaagatcttgtccacctgttcctgtgtgaaggttgcaaattctctctgagcttctctcattgcatccatctttgcaatcaaagcgtctacattgtcaatgatttccggaacttttacctgttcttctttctttgccatcctgacttacctccagttttttaataagtttaataggttttttatgttcgatatttttttaacgaactttgtagtatcattatatgatttcgttaaataattgtcaataatagatttgacaaaaaaataacaatatcacctccttttttattcaaatctaataaatacttttatactgatataatttccagtttgaaccagctgaattaccagtgatttgccccctttctcaacacagccagctctgcaatggccttggtatactggtccttattaaatgtcagctttcccttcacgatcccgatcatgcctgtatccttcagcttcttcaccgtacggttcaaggtcttaatgttgattcccagctcctcctccagctgattcctggtaaatggaacggtaatgctcgttttattgcctgtcatatgtttgtccgcatactgcaccagatactccaggagaagaaagttcggcggataaaacagtgtcgccccattctttgaggaagaacggtacagcttaaatgccaccttgctggcaattaagtacagaaggtcaatatcttccttaatccacctttcaaagtcttttctcggcatctgaagaaggacacattctgtaatcgtctccagagtaacggaggtcctctcctgccccgccaggatggttacctcaccgacaaaatcaatggcttcgttcttctcgatcatatacacgtttccgttctcgaattcattgatggcccggtgatcaccacagcagacaaatgcaaaataatccagttcataatttttctggtgaatgatctgtcccggtggtattacctttatgacgcagcggtttttaatatccggcggcatattcttgacatagtctgtaagctttggcgctcgtttcagcaattcctcccaattcatgttccggctccttttccgatgtttttctttttctattatacagcgttaaaaaacaaatgtaaaatatggtgttgaatttcaaggttaatgcaactttattaaagtaaatgcaactcatgcagctctattttgcccaaaaagtaaaatagggctgttttttgtgccggtttcgtgtaaaataagagtaatccaccacgaaaagccttaaaaatgggcgtacgataccggaggtgagatttacctgcttttttatcagagtaaatgccacccctgtttcggcgttggatttgatagggctgggtctgggttgattgttaagggggcttggggaagcgtggcccttaacattgggtttgtcggaagaaagggaatggcgatgccagtccccggctttccggcttttttgtttctatctgtttaaaagtgcaggggttaaatccacttcgtttggcgggatcctatggcatcccaatgcatgaagcagatccgcaccgtagaggaattcaaacaattcatatggacatttatttccgagactttctctgctgtaagagttgatgtggtccataagcagagaaatgtctccttgagtcagttggtcaaaagaagtccctttgggaaggacataccgtatgaattcatggtttttctctgcagagcctttctgcccaggggaagaagcgtcgcagtagaacaggcgtgtgcgcagatttccctgacggtcatactcgatggctctggggttagagaattcacttccattatccgtgaggatcagaggcatgagggacgagaaccggtccggcccgagttccagatacaggcggtcaaaaatatcgatcacggactgggaatcgttggcatcccggagaaaagcaagcatcagttctgtcttgacaaagtggagggtcaggagaactttcccaccctttttcccttccacagaatccatctgcgtgacaggcaggtccgggtgtctggaacaatgattgagataagcttcataggtacgcccggaccggcaggccttatcgaccttgaactcttttgcttttctgcgccgactgtagcggactttcctggggaggtcgatattcctggccttaaatacgttgtagtcaacgagacggtaaagggtgctctcactgaccataagcgagtccctgttgttggcacagatatggttgagagactggccgcggaagatgagcggggagacaatggagtccagccgacggatatcctcctcggaataagagatgccggtcctggattcagaaagcagttcccgatactccttatgtgcatagtcagcggaataaagatgtttttccagggtgcaggagcgcctgtccgggcagccgttgcagacataaggaggcattaagagcctgctgcaggactcctgctgaaagtccggacaattggcattgcacttgtcacagaaggaacagcgttttctattcgaggaaagacacgaagggcagagggtgctgtgggaacaatctttacggaggagacaggcgttgtaatgtcgcccatagccgccggtcttccggaagaggatatggtttcggacctccctggaaatcgaggtacagtttttgccgacagcgagagcgatctgtttaaaagagcactgctcagaaagcatgtgaacgattgtgattcggtcatcgagggataaatgtgttttcttcataataaaacctccagtcgtagtacccagacccgacagaaggatgatacaaaatttgtcatactaaatgcaacctttaatatttttaaagtaaatgcaactggcagtgtatataggcatttactttgaaaatttactatgtaaaatatggaataaaataattttcagaattgcttgacaattttccatccatgtgataggataagagagtattttaatgagattttgattcacatatttttgtaagtcattattttctgatgatgatttacaaaaatatgtgatttttagtttcagaacaaatataataattttaattcaggaggtacctcaatgaataagggtacagtaaaatggtttaacagctcaaagggatatggcttcatcacaaacgacgagacaggagaagaagtatttgttcacttttccggaattatgactgatggttataagtctctggaagacggccagaaagttactttcgataccactcagggcaaccgtggaatccaggctgttaacgtatacgcagcttaatcagcttcaacgcttgaactgataaagaaaggtctgatcagatgtcaggaactccctgctgtctgctcagaccttttttactgcctttttctttcattttcctctgctgttttagtattatcttataatattcgaaacatttttccctgtttttgtgcaaaatatctcatttgtccttttttatctgcttctcttccgctagaatggagctaacaaacatatccgaagcgaatgttaccattttacaaaaaggagcgtaagtgtatgaaaaaagaaaccttccagtattcctccctaaaggagcggatcaagacagagtaccgcgtgtacatcttagccttcatctttatcctgattgcagacagcatcgggcagattaagattcctctcggccccggcatgctgatcctgttccccatcttctattccctctttatggggattttatcaggacctcagatcttaaagattatgaaagagaaggaagtaaccgcagcgtcaaagctggtaatagtcgccatatgcccttttatcgcaaagctcggcattaatgcaggcgccagcctctcaacagtgattcaggccggcccggccctcttattacaggaaatcggcaacctgggtacaatcttccttgccctgccatttgcacttctcctcggtttaaagcgcgaggcgatcggtgcaacgcattccatcaaccgtgaaaccaatctggctttgatcacagatatgtacggacctgattcagcggaagcccgcggcagcttatccatttacatagtcggcggcatgattggtaccatctatttcggatttatggctaccatggtagctgctttaaatattttccatccctatgcactgggaatggcatccggcgtcggcgccggcattatgatggcgtcagccacagccagcctgacagagatttacccggctatggccgataagatatcggctcttgccagtaccagcgagacactttcaggaatcaccggcatctacgttgccatctttataggaattccgctctgcaacaaactgtatgcgtttctggaacccaaaattgcacgcctgcgtggagagaaataaggaggactgacgattatgagatataaagaatggggttttttactgattattgcctgccttggcattatgactgcaaactttgttggatttaaggtagcgtttctcgattctctgcctggtgtatgcgtgctccttgtcatctcctgcattggagttgtattgagcaagattattccgttaaagcttccgattgtagcctactgctccatcgtgggactcttagcggcctgtccgatctcacctgtttcttcttttgtcattgagtctgccaacaaaattaattttacggctcctctgactatggtaggcgcatttgccggtatttccatcggaaatgaaattaaagcatttgcaaaacagggctggaaaatgattattatcgcgcttctggttatgacaggcaccttcttcggctcagctctggttgccaatatcatcctgtctctgacccacgcaatctaacttgccctgacacaattgatttatggagattattatatgaaagaacctgtttatgatatattgattaagaacacccgcatccttactgaggacatgaagatccgtaccggtgtggatgtggctgtgaaagacggtatcattgcttctatctgcgattccgactctcacgctcctgcggagacggaccagactgtcgacggaagccgtcttctctggatgcccggcctgacagacggtcatatgcatacctgtcagcagctgctccgggggaagatactggatgcactgcctatgatatggacccggattatgctcccgtttgagagtactctgactccggaggcagtatccttaagcgccgctctctgctccctggaaatgatacgcggcggtactactgcctttcttgatgcaggcggtattcatatggatcaagcggccgaggtctatataaaatccggtctgcgcggcgcgcttaccctgtctaccatggatgatacgaaggttcctgactccatgagggctgatgcggctgaatcgatttcccgtttaaatgagtattacgatacctggaacggatccggcgacggaaggctgagcgtctgctattcactccgctccctgatttcctgttccgaggaactgattcgcggtatatttgaggctgccgacgagcgcagtgccatggtggaagcccatatgaatgaatattcgaatgaaatcaactaccacctggagcgatatcagatgcgccctgtagagtatttagacagccttggagtgctctctgaacgttttgtcagtgcacacagcattctgttgtcggagcatgagattgagcttatggcagcgcatggagtaaaggccgtccattgcccattcagtaactgcggcaaaggagttcccaataccccacggcttttggaaagcggaatatccgtcgcctttggtacagatggaaccgctcatggcggcatgagcctgttccaggaaatgaagattttccgttcgattatgaatatccggtacggtgttacggattcaaatcctgtaattatgcccgctgagacgattctctccatggcactgaaaggcgggagcagcgttttaggtttacataatagagcgggtgtattaaaagaaggctgctgtgcggatttcatcgcaatcgacttagaccagccccatctctaccctaccaataatctggtgcacaccctggtagagagtgtttcttctcaggatgtaattcattctgttgctgctgggaaatttctgatgaagaacagggagattctcacgctggatgaagaaaaaatacgctttgaggcgcattcctggcttacgaaaaaccatcttatggaggacgaattatgttaccggtaatagcagtcatgaacctgattgtcggcactctggtaggagtctccggcattgccggattcctgcttcccattgtatttacgggctatttaggcatggatttaagcctctctttggccttaagctttatttccttcctcacctcgggaatcattggttcctaccgctatcagaagcagggacagatggatataaaattcggggttctggtaggagcaggaagtatagcgggagcggtacttggtgttaagcttaactttatgattccactgactactgccaagatgtttctctatctggtcgtactggcttccggtctttctattttacttaagaaagaaaaaccagagactaagtcagagacaccacaggaagcccagccagcctctccggtttataccgggttacttgccaacaagccattcgtactgttgttcggttttattacaggcgctatctgctctctttccggtgcaggcggcccgattcttgttatgccaatcctggttacgcttggcatgccggtccggacagccgttggtgtcagcctgttcgactccatttttattgcacttccggcctgtgttggatacctctccaattgtcccagagaagggcttttggttctctgtctggtcagctttatatgccaggcgatcggcgtcttctttggcgccggacaggcaggacgcattaatgtaaaaattctaaagaagggtgtggctgtcttttcaattgccatcgccgtttatatgatcattggattgatttaaaaactttgcattctgaataatctatgatatactagggtcactgaaaacagtgacccgtttatttttgcatacaattgccgaatacacacgccagcatctcccttcacaactgccgccggggtaaaaaaccgcagcttgcggcgctgcagatttgatgtatgactgcctgcggcaaagtttttgatctttatacagcatgcgtgtcactgctacaatcaaaggagattcttgcttatgggaattatcataggaattgatattggaggaagtaccactaaaattgttggttttgataataataacctgaaaattccaacattcgtgaaagctaataatcctatcgcatctctcttcggtgcttttggaaaatttatttacgacaatgcaatacaactgggtgatattgaaaagatcatgattacaggagtaggaagcgccaatgtagaacagccgctttatggaattcctacttttaaggtagatgagtttacatccaacggattaggcggccgctactttaccggcctgaatgatctaattgttgtcagcatggggaccggtacctcttttgtccaggtaaacggcgataaaatcgtacataccggtggtatcggtatcggcggcggcacgattattggcctgtccagccttctcttaaaaacccaggagattagtaaaattatggaacttgcaagcggcggcgatttaagccacgtagatttacagatctgtgatatatcaaaggaagcgctgccgggacttcctcttacagccacagcctccaattttggcaaggtaagagggcaggtcaatgaagaggatattgccatcggcctcattaacatggtgcttcaggcaattggaaaatccgctattctctcctctctcaacagtgagatcaacaacttcgtcatgatcgggaatcttgcgaaattccctcagtgtaaagatattttctgttctctggaaaccatgtttgatgttcattttattataccggaacaggcagagtatggaaccgcaatcggtgctgctctgacggaatcgcatcatgcgaatatgactgagattctctaaatacaaaaccccttttcatttgtgaggaatcatctcctcccaaatgaaaaggggtttttatttcactgcacggtttgtccttgtattacagaaatcagccagggtgacaaagtcagtgtatctggattcaactctaatggtatcccagtgcctgctccagagcgtctttttcttcacttcctaacagcacatctgtttctccccgttctacttcctttatatagacgtagcagccttctctgctgtgtacagagttcaaaacaaaacctgtgttggtataatcaagaagagccattgcaaagctcaaatttccgcccatacctttaaaagcattgtatttcacgagaccaaatttctggaaagcgcttctgtaattcttatttgtattgcggatcgagtctttatttgcacggtcttccgctttcagcgcctcgatatcccccatctgctccatgatgatctcctcaagggtttccgcgtccttacctctcataaaataatcgtatctgcggtaaagccgtctcatctgaatcaggcagatgattacgataatcaacaatattagtgtaagtacagccaaccccagaatcatatagcccgggtcgaccggccataaatccatcatactgttttccatttctttcgtcctcacttccgttactactatcttatggattctatcaattctactattctttccaattctgactcagaatagtactcaatttctactcttcctttatttttgtcttttctgttaatgcttactttcgttcccattgcagatttcatccgttcttccagatcacggaaaatcaaagtaagactctcatcttccactttcttttctttgggatttttcttttttgataacgatttaacaagcttttctgtctctcttacactcagattctcagcaataatcttgcctgccagttcatactgaagttgtccatcctctaccgacagcagtgcacgcgcgtgtccgccggtaatctggttttgaatcagaagatcctgtacccgttcatccagcttcagtaatctcatactgttcgtaatggttacacggtttttaccgactctggccgcaatctcctcctgcttcagttcgaattcctgaattaagcgctgataagctttagcctcctcaatcggattcaaatcttcacgctggacattttctatgagggcaatctccatggtttgttgtttcgtatactcacggatcacgaccggaacttccttcagtcccgccagctttgccgctctccaacggcgttcacctgcgattatttcataataatcgccttttttctgtaccagaagcggctgtaatactccatatactttcatggattcagccagctcctccattgcctcctcgttaaagtcctttctgggctgttccctattcggctctatggctgtaacttttaccattaactccttgccaatatcattttcttcctcttttttttccggttcctgagcactcttactcttagcctgatgttttgcttcctgctcttccgccgcagattccatcacttcatctccgaatattgctccaagaccttttcctaatcctgttcgtttcgccataactaaatatcttcccctctgctaatcacttcagctgctaacagcctgtaactttccgcgcctgccgatctggaatcatataagttaatcggcattccatgacttggcgcttctgcaagtctgacgttcctcggtataattgttttgtaaatattttgattcagattattttttacactctccacaacttccaatgacaaatttgtcctggcatcatacatggtaaatacaactccttccatctctaacgatggattcagcttcttttttaccagattaactgtttttaacacctgatttaaaccttccaatgcataatattcgcattgaatgggcaccaatacagtattggcagccgtcagggcattgatcgttaataagtttaatgatggtggacagtctatgatgatgaaatcatagttgttctggattttagaaagatatgtctttagaagagcttctttattttctatttctaacagttctatttcagctccagccaggtctacattggaaggcagtagatccaggttttcctgcatattagaaataagacattcctcaatatcacactctccaaccagcaaatcataaacggttttatcgatttcgcccttttcaattccaaggccgcttgtggcattaccctggggatcaaaatctacagttaatactttttgtcctgattctgccagacatgcggacagattaattgcggtcgtcgtcttaccgacaccgcctttttggtttgcaatagcaataattctacccatttttatatttcctctccctgtagcaaccggaaaatacggttcaaaatagagtatagcacatttcaattctttttcctatgctttataagaaaaaaatagagaaataggataaaaatgtttcacgtgaaacatttttcttaagattaagaattttttaatatgttccccgttgtaactgggattctattatattataataggtatatatcttgtacggactggtgcatggaatggaggaaatcatgaaaacaaaaaataaattacttacactgctaaccctggcagccggcgctgctgctgctactgcagtaatcaataaatgtattaaagtatctgccacctccaaaaatattctggcagaatctaaatcactttgttataaatggcgctttggaaatatccattatacaaaaacaggatcaggaaaacctattttactggttcatgatttaacagcattttccagtggctatgagtggacgcaactggttaattatttaaaagatcaatataccgtatatacaattgatttgttaggctgcggccgatcagagaaacctgatttgacttatacgaatttcctatatgtacaattactgtccgactttattaaatcagaaatcgggcatcgaacaaatgtaatcacttccggtgcctcagctgctctcgtaattatggcctgcaatcagtcatcagagttatttgatcagatcatgctgattaatcctgacagtctcgttacatgcagtcagataccgaataaacatgcaaaagtttataagtttattcttgaccttccaattatcggaactttattatatcacattgcatccagtaaacaggccatcacagaggaattcacacgggattattactttaatccgtattcagtaaaatcttcctatgtagatgcttactatgaagcagcacatttgggtgagtctccgaagtcgctgtatgccagtgtaaagtgtaattatacgaaatgtaatatattcaatgcattgaagaaaatagataacagtatttatattgtcggaggaactgctatggattctatcaagcagctgattggagaatatcatgaatataatcctgcgattgaaagttcgttgatcagtgaatccaagtatctgccacaattggaaaatcctatggagttatacaaaaccatccaaatgttttttgtataattatagaaagaaataagatctattttattcttgttctctggattgttttgccattataaaagcggatgtttcacgtgaaacatccgcttctcatttactcactttaaaggttctttaccaggtacccctgctttgcgtggatacctttttgatatctcacttactttttcaatctttattaatgtacgctctgcttctgctccatccaacgtaaaactttcaatcctgttaacttttccgccaagtaaaaaaatcgcatgtttcgcagacgaaagctcctcttctattttccctgatttataggaaataaagaaaccaccgggtttaacaaaaggcatacagtattccgaaagtgttgataaattggcaactgctctggacaccgaaagatcatatttttccctgtaatctttatctcttcctaaatcctcggccctgctatgcaccgcagtaatttctttcaaccctaattgctcaatcacttcatttaaaaactttattcttttattcagtgaatccattaaggttatttttaattgtggaaatgcaattttcaacggaattccaggaaatccggctccggtacctatatcgatgattttatattccttcgtggatatttcgcccattgcgttcaccagggccagactatcaacaaaatgctttgtaatcacctcattctgatctgtaattgctgtcagattcatgaccttattccattcatctaataattcataatattggtaaaattgatttatttgtgaattttctaaaataatagaaaattgattcaattctcgacctaatctatccttaaattctgccgtcatcttacacttccttccacatcttcttatattccctcagatcatgcttgctggcttctgttccttactatttcttcttacttttcttcactcttttcgtcccgtttttgataacgcagctgctctaaatgaaccagaagaacagatatatcagcaggggatacaccggagattctggatgcctgtcctatcgacatgggtctgtataaatccagcttctgtactgcttccttccgaagactctttacactgctgtaatcaaagtctgcatccagttttttattttccagttttttatattgagccacctgttgtttctggcgccggatataaccgtcatattttatatttatgtcaacctgttctatgacatccactggcaattccggtcttttagaatctaattcagttaacataacatagttcagctccggtcttctaatcagttcagccagcgtcgttcctgtttttaaaagggtacttccatttctttccaaaaactcctgaacttcttttgatgcaccgatattggtgctttccagacgctttatctccgtctcaattgctgactcttttttcaaaagcttctcatactgctcatcactgacaaggccgatttcgtgaccaatccccatcagacgcaggtcggcattatcctgacgcagaagcagacgatactctgcccgggatgtcatcatgcggtaaggctcatggttttccttcgtcaccagatcatcaatcagaacaccaatatatgcctgagaccggtccagaacaaaactctctctccccaaaaccttcatagacgcgtttacaccggccataaagccctgtaccgccgcttcttcatagccggaactgccgttaaactggccgccgctgaacaggccgctgatggtcttaaattccagcgtggctttcagctgacgggaattaatgcagtcatactcaattgcatatgcattccgaacgatttttacatgctccagtcccggaacggtccggtacatcgcgtgctgcacatcctccggaagagaactcgacataccgcccaggtacatttcattggtatacaatccttccggctccacgaagacctggtgacggttcttatccgggaactttaccaccttgtcttcaatcgaaggacaatatctggggcccgttccctcaatcgcaccggaaaacagcggagaccgatcgagattggcccgtataatctcatgggttttctcgctggtgtacgtcagccaacaggaaacctgctccttctggatggtttccgggtccgtagagaaagaaaacggtactatttttttatccccaaactgctcttccatcctggaaaaatcaatgctgcgtttgtccactctggccggtgttcccgtcttaaaccgatacatttcaataccgtgttccttcagtgaatccgtcagatgattcgccgcctgaagaccattaggccctgtggcattgctcacatcgccgtagatgcatcttgcttttaaatacgttccagtagccaaaacagccgctttacagtgatataccgctcctgaaaatgtctttaccccggtaagaacaccattttctacaattatatcggtcacctcagcctggcgaatggtaaggtgatccgtattttccagtgtatttctcatttccctggagtaattctgcttatccgcctgagcccgcagggaatgaaccgcgggtcccttcgattcattcagcattttagactgaataaaagtcttatcaatgttctttcccatctctccgcccagggcatccagctctcttaccagatgtcccttggagctgccgcctatattgggattgcagggcatcagcgcgatactgtccacgctgactgtaaacatgatggtctcaagtcccagtctggctgcagccagagccgcctcacagccggcatggccggctccaaccaccacaacgtcatatgattcttctaaatttggcataacaaccttccttctctctatttgcccatacagaacttactgaatatctcatgaaccagatcgtcttccaccgcttcgcctataatgaggcccagctgctcgtaagcatccatcaagtcgatggaatagaaatcctccggcataccgttttggatgctctgctccaccatttccaggctgctgtacgcctgttccagtgcattcttatgtcttacattcgtaatcgtgacttcatcattaaaatcaatctcaccatgataaaacatggtcttaatctcatcctccaaaagttcaattcctacccgttcttttgcagaaatggcaatcacacggtgtgccgtcctggaagccagcatatcagcagtgatttccattgtcaggtccgatttattcaaaagtacgactgcttttctgtctttgataaacttaagaatctcctcatcgttttcatcaagagggcaggaaccatccaccacatagataattaagtcggcggcatcggcagcatttcttgccttctccactccgattttttctactatatcatccgtatctcgaattcccgcagtatcaatcacattcagtgtaatatcttccagacggatggtttcctccagcgtatcccttgtggtacccgctacatccgtgacgatggctctctcttctcccaccagaacattcagcagagaagattttcccgcattgggctttcccagaattacagtcttaatcccctcagtcatcactctgccgttatcagctgaacggatcagtttccataagccttccttcagcccctgaatcaccgataacagtgactctccatatccatccagagatatatgctccggatcatccagcgccgattcgataaacgcaatctgatagataatctgctcccgcagtttctttaccgcatttgaaaccgctccatccagctggctgacagaggcctttaacgcgtaatcatttttggaattgatcacatcgatgaccgcttccgcctgggccagatcgattcgcccgtttaaaaacgccctcttcgtaaattctccgggctctgcgggccttgctccatattttaaaaccgtttccagtattttcttcgtaatcaaaacaccgccgtgacaatcaatctcaaccgtgtcctcggccgtgaaactcttcggtcccctcattaacatgaccagaacctcatcaatgatttcatcaccatctgcgatatacccgtaatggatggtatgggaaggagcatccgataacttcctgctgtttttcccttttcccctgtaaatcttatctataattgtaaatgcctcatccccgctgatcctgacgattccgattcctgaactgctcatggcagtggcaattgctgcaattgtattcatcttcatatttttcacctgaaaaagaaaaggggtgaggtgccttccgacagccccaacccctcaatcgacgttactctatttttctctgttatcctgatagcggtccttcttcgagtaatccttttttaaggaaatcactacgtggcggaagggctcttcaccctcgcttcgtgtcactacatacttatcattctgaagcgcggaatggataattcttctttcatatggattcataggctccagcgatacggaacgtctcgttctcttcactttatatgcgatattcttagccagtgtttccagtgtctcttttcttctctcacggtaattctctgtatccagcttaacccggatataatcttcactctctctgtttacaacgagacttacgagatactgcagagaatccagggtctgaccgcgttttccaatcagtattcccatatcgtcgcctgctaaattgatggaaagttctttttcctcctgattaaaagcggtttcgatattcacgcccatatccatggcgccgaacacctctccgagaaatgcgatcgccttatcatctatagtctctttctttcttgcacgaatgatggccggtttggaaccgatgaatcccagaattccactgtttcctttatcaacaatctcatactccagcttatcgctggtcgtttccaattcgattaatgccttcgtaattgcttcatctacggttttagctgaaactgtaatcatatccatccggaacccctcctatttactgtgcttttcgttatatttctgaaccatgcgtgcctttgcagaaatactgttgggattggctgctccgctgctgtaataatcattggaggccttcatctgctcctgtgttctctcaatcttcttcagtctgtcggcttcctctttctcgttcgctgcctgaatgctctttaaattggctgttgcattctgtgccaccttctgcggaggaagtccctttttagcgcgcttcttgtttgccttttcaacgttctgttttaccatttcatcgatatcaattctgtccatataacgatttactaatacctgctggataacctggaatacactggatgcaatccagtaaataccaataccggaagcaaaggtaaagcagaagaatacagacatcagaggcatcatggtattcatcatcttcatggactgagccatggaattaccatcatcattaccggttgaaggctgattcactgtcattaaccttgcacttaaccactgggataaacctgcaagaatcggaattaagattgccagactgaaatgaaatcctccggtaaatccattggggaacataacgctaaacggtgtgctcgccagattgattcccaggaaagagttcatatgctcaatctttgcagcattttccacgatcgttccctgaatactcgggaataaatcctgaagcgccgaccactgagtcggattcaactggtaaagaaaatctacaaggccattgtttgtagccatatcctttaccatagccatattgactttattatccgttgcaaactgggtcagcattcccacatgatccacgccaagagatgtaatagatgtcactacattcataaatacatccttaacactggatacgtaggccggaatatggtaaataacctgatacagtgcgaacagaatcggcatctggatcacgagctgtaaacagccgcccgtcatggatgtgccgtatttttcatataaagcctggatttccacgttctgcttcatcatggattcctggtcttttttccctttatactttgcctgaatggcattcagttccggctgcataatactcatcagcttcgatgacttctgctgttttaaagtcagtgggaacataagaagttttgttacaagagtaaataagataatacataaaccgatgttctgaattccgaaaatactggtcagcttaaacagccaatccataataatgcccagaacagttgcgaacggccccaaaatgcctccgactttcgtgagtactaaaaattccaatgaactacctcctcaaattcctgtcttttacggaactggatcataaccgccttttgcaaaaggatgacaccgaagtatccttttacaagccaaaaatgtacctttaaacacaccatacttttgcagtgcctcaatggcgtattgagaacacgtaggcgtgtaaatgcagtgagttcttactttcagcggggaaagaaatttctggtaaccccgaatcaacagtatcatgattttctttaccataagatcacttcgattctttttttaaaatgttatgcagtccgcataagtgcagatacgcactctcgattgaatgataattttcttcttttgccgccgctctggcgacgaccacgatgtctaaccctgtctctgtcatgtcttcatgaagcctgaagctttctctcaataatctggttatatgatgccggaccacactgttgccaacttttttgctgaccgaaatcccaattctggtttccggcctgtccgtctttttcacatacatgacaagtaacttgtttgcataggatttcccggtctggtatacttcctgaaaatcccggttttttttaatcgaattaaaatgtttcatgaactccctctgcctggctcgccgctcacggaaatgaagaaaagaaaaggccacaattacttgcggcctggtccatcatttcccctgaacgcatgtgaaggggcttttccataattcccccgtacaaaatgcgaggggcttttctttccttaagctgataatttcgctctaccttttgctcttctggaagctaaaacttttcttccgcctggagtgctcattctggctctgaaaccatgaactttagatctctgtctattcttcggctgaaacgtcatcttcatatctacggacacctcctcttattacaatagcttatcatagcaatatgaataaacatattgagactattttagttaaacatcgtttcaattatatagaagaaataagggttcgtcaagctaaaaatgctattttttcttataaaataagggttataccataaaatgtatggatatcaaaaatctgttactatattttgtatctatatttgtatctattttttgtatctatattttatatcaataaaaacaggcgaccggaatcctgtttccggctacctgttttctatgactttttactcaatgatttctttaccaatcaattccttcctcttatgaattgatcattttctcaattttttcaagagaaatattcagctctctggctgcttcctttggagatttcccttttaagaggagctttaagaccttcacttcctcgcctttttcttctgcttctttctgcttttcctctatttccttctctttttgttcaattttctgctctttttctctcagttccttcttatgctccatctcaattacatcaatatccagaatcaacgcctcttccaccgcttcgctcactccttcatctgaaacttcctgataccgatcataaatatgatggtataactgcagagtcatattttttaatttacggccatcagttggtgttatatttcctgcttttacattcacttctattgatccaattatatcatgggtaacaaggtatttcaacgcatccagattctcttttgtcctctttttttccatcgactttttaagtttcaaaagctgaaatggtatcagaataatcatatttctattctgaagttctttcggagacaatgaaagatactttataacaggtaccttataaatataagtaccactatttccaaaccggattgttaagtctctctcatctggttcagacttcccttcatacaggcagatcaaaaccggatccggaaattccagtacattttcctctcttctgattttaatagcatgatgaaatccatattcaaaaatacggaatgtaatactgccatcctcagtggtctgaaattccatatgatatgcagatagtcctattgttataatcgtatccgccagtgtctttcgtaaatcatcatcctcatgctccgtccagttataagtcactttactatccagcggatgattcaccccaaacgtcccatttataaattggataatcgcacggtttgacagcgtcaggcactttttagccacgcggtcatacatatcgtgatattggttcattgcatacttttcctttctcttttgtttttttagcataaaaaatacattagcgttccctatccatatgcatccgccgcctttccatatttacctgagatattaaattattttttgaatatgtttggaggaacctccatgaaattacctgactgccacagccgttctgcacgggcggcatactaaaaattagatatttattactaaatcatgattctgaatccttgtggaattcacacttacagtttatcatactactggtatttcgtaaatcattatcagaaaaagaggcctgacacttcccctcccatacttaatatctatcttactgaaaatacaaaagcagtaacccatcttctcttccaatggattactgctctttacaatttcattcttctatcgtttcattgttctatctcttcattgccttaaacagtgcctgcgtgaccgccacggttaaaactcccgccacaatagcctcaggaattccgttcaaacaaatgattcccagtataactgtatagattccttctgtcagtccctttgctgccgctccatactcttttccaaaacataagtaaatcagattcattaccagcagagtgttggttaatgatccggcaactgccgctgcagccagagcaatgcttcttcttgcccgattcgctttcagggtcttcataatacctctgaatacataatatgccacaattccaatcaggattctcggcaccaggcagatcaccaggctccagaaatttccgccgtactctccgattttgataaacggggagaacacaaacgaggtggcattcggcatgtacgtatttttccacagactggttattccgaacaccaaacctaagaatccgccatattttggtccaagtataatggctccaattatgaccggaacgtgaatgatggtggcattcatgaatcccagcgggatatacccgaaaggcgtaaatgccatgatgatgataatggccataaagactgcggccagtaccaggttgcgggttttgttctcaatattcattttttacctcctgtgctactgttcttttccaagatacaatgcaactgttacaaccgaattatacccagtagaaggcgccgcgtcaatggtgtgatgtgtactttttcacatgcatattgttaatttacataatgttatccccaaaatgtggataagttgttgataactctctggataagctcttgataacctgtttattgttcacaccccgtattcacaaggcctcttaaattcaaatttttccgtctgtgtataaatgaacttagaaaatgcctcatttttgtggacaactccccttcagaatcattatcaacaccccataaacaacaaattcacatgtcttacacatacttatccacaaaatttttctattatcattgaaaaatagttcgaaatagtataaaatggttttagattgggctaatgcgcactattcccccaaacaggtatgagggggactttccgttatttgcattttgatagatgtaggagacttgaaatgttagaaaagttaaaagaaaaatgggacgaaatcttactgaatttgaaggaagagcacgaaattaccgacgtttccttcaaaacctggcttctcccactgaaagtacattccataaacggagacaccgtaacggttactgtcccggacgtggaatttttagggtatatccgtaaaaaatacggattccttttaaaaattaccattgaagaggtaacgggatttgaatgtaacgtagacttcgttgtggaaaaccaggttccgcaggaagaagttcccaaggcccagaccggaaacacgctgattaacaacgcgatgaacacggtcagccagtcggccatcataaacgccaatttaaatccgaaatatacattcgatacctttgtagtcggtgccaacaacaatctggcccatgctgcatcgttggcggttgccgaatcccccggagaaatctacaacccgctttttatctatggaggcgtgggactcggaaaaacgcatctgatgcattccatcggtcattttattttgaaaaataacccgaatgcaaaggttctttatgtaacgagtgagaaatttaccaacgagctgatcgatgccatccgtaataagaacaacttctctcctactgaattccgcgacaaatacaggaccaacgacgtcctgctgatcgatgatattcagtttattatcggcaaggaaagtacacaggaagaattcttccacacgtttaatgcattatatgaatccaaaaaacagattattatctcctcagataaaccgccaaaagaaattgagactctggaagaacgtctccgttcccggtttgaatggggtttaaccgtagacatccagtctccggactacgagacaaggatggccatcctccggaaaaaggaagagatggagggctacaacatcgataacgaggtaattaaatacattgccaccaacattaagtccaacatccgtgagttggaaggcgccctgacaaaaatcgtcgctctttccaggctggataataaggaaattaccgtagaactggctgaagaagccttaaaggatatcatctctcccaacgacaagcgggaagtgactcctgagttagtcatccaggtggtggcagaccattacggaatcacccccctcgatatctgttcccagaagcggaacaaggaaatcgtctatccgcgccagatcgtcatgtacctatgccgcgagatcgtgggaacaccgctgcagtctatcggtaagtatttaggcggacgcgatcacacgacgattattcacggaatcgagaagataaaggccgatgttgtcaagaatgattccaacttaataaacactcttgatatcctcaagaaaaaactcagtccacagtagcttcatccacaatttcatgtgaattggatgttgattgcctgtggataaccatgaggttcttttcccttctcaggctcatgtggataacctgagagttttccttaaggattgtggacgttattcacactcttattcacagggaaaagcctgtccccttcgacggttttaaggcttttacacatacccacagcccctactactaatacgacggaatttatctatttatttatcaatataattcgtgaatttactgaaaaggagttatcaacaattatgaagctgacatttcaacaggatgccattttaaacggcatcaacatcgttttaaaagcagttccatccaagacaaccatgtcgatcttagaatgtatcttcattgatgccagtggttccgagattaaactgacagccaacgatatggaactcggtattgaaactaaggtagaaggaaccatccatgaacggggaaaaatcgctctggatgccaagctgttatccgaaatcgttcgaaagctttcatctgcaggtgactctgtcgttaccattgaaagcgatgaaaaattcaccactacgatttcctgcgaaaaatccgtgttccatattcagggacgtgacggtgaggaatttgcataccttccctatatagaaagagataactacatctgcctttcccagtttacactgaaggaagtgattcgccagactattttctccattgctcccaacgacagcaataagatgatgaccggtgaattattccaggtatcgggaagccagttaaaggtcgtttctctggatggccaccgcatttccatccggaatgtggaattaaaagatacgtaccatgatataaaagtcatcgttcctggcaagactctcagtgaggtcagcaagattctgggcggcgacaacgagaaagaagtgctgatattcttcagcagcaaccatattttatttgaatttgacgatacgattgtggtatcccgtctgattgagggcgagtatttccggatcgaccagatgctttccagtgattacgagaccaagatcacagtcaataagcgggaactgttagattccattgagagagcaaccatcctgatccgtgagaatgacaagaagccgttaatcatcaatgtggtggatcaggagctgcagcttaagatgaattccagctttggatccatgaacgccgaagtggcggctcataagacaggaagcgatatcatgatcggctttaatccaaagttcctgatagatgcgctcagaatcatcgatgacgaagaagtaactctttatatgctgaatccgaaatccccatgcttcatcagggatgaagaaggaaaatatatctatttaattcttccggtcaacttcaacgccgcatccgtttaggataacgggatgaaaaaaggagaaaaaattggaaataatcaagttaagagatgaatacatcaagcttggccaggccctgaaagcagcgggtctggtcggctccggcgtggatgcaaaatacgtaatagaagaagccctggtcaaagtaaacggcaggacagagcttcagcgcggtaaaaaactgagagccggagacatcgtcgagtacgacggaaagacgattaaaatcgaggaataagagaagtccatgattatcgagtcgatagagcttaaaaattacaggaattacgataaactacatatggatttcagtcatgggaccaacatcctgtacggggataatgcccaggggaaaaccaatatcttagaagcaatctatgtctgtgctacgacaaaatcccacaggggaagcaaagataaggaaatcatacagtttgacagggatgagtcgcatatcaaattaaacgtcagaaaaagagatgttccatacagaatcgacatgcatttaaagaaaaacagagctaaaggcgtggcggtcaacggcgttccaatcaagaaggccagcgaactgtttggaattgtcaatgttgtatttttttctccggaagacttaaatctcataaaaaacggccctgccgaacgacggcggtttattgacttggagttatgtcaacttaataagctgtatgtccattctctggttcagtacaataaaattgttactcagagaaataagctgctgaaggacatcatgttccgcccggactatgaggagacactggatatctgggatatgcagctggttcagtacggacgggaggtaatccggtgccgggaggcctttgtaagccagttaaacgacttaatcggaaccatccaccggcagctgtcaggagaaaaagagtctttacatatctgctatgagccaaatgtcacggccgatatgtttgaagatacattaagaaaaagcaggccttcggatttaaagcagaggacgacgttaacgggaccccacagagatgatttaagctttatcatcaatgatatcgatatcagaaggtttggttcccagggacagcagagaacggctgctctgtccttaaagcttgcagaaatagaactcgtcaaaaaaatagtaaatgattatccaatccttttgctggatgatgtgttatctgagctggatggcagcagacagaatcacttgttatcgggaattaatcatatacagaccatgatcacctgtacggggctggaggattttgtcaataaccggttccggatcgataagatctttaaggttgtgagtggtgaagtttacagtgagaattaggaggaaaatatgagcgaagaatatggtgcagatcaaatccagatattagaggggcttgaggcggtcagaaagagacctggtatgtacattggcagtacttccgtaaggggactccatcaccttgtatatgagattgtcgataatgcggtggatgaggctctggccggatactgtgatatgattgatgtgacgattaatgaagacaattccattaccgtagtcgatgacggccggggaattccggtaggcatccagaaaaaagccggaataccagcggtagaggtagcatttaccatcctccacgcaggcggtaagttcggaggcgggggatacaaggtatccggcggccttcacggtgttggtgcatccgtagtaaacgcattgtccaactggctggaagtagaaattactcaggatggaaagacctataagcagcgctacgaaaaaggaaagaccatgtatccgcttaaggttatcagagaagcgggaccggatgaacatggtacgaaggttaccttccttccggatgagaccattttcgaagaaaccgtatttgattatgatacgctgaagattcgtctgagggagaccgcattcctgacaaagaatttaaaaattgtattgagagacaaccgggaagagaagcacgagcacgtattccattatgaaggcggaatcaaggagtttgtcacttacttaaaccgcgggaaaactccgctttacgatcaggtattttactgtgagggctccaaagatggtgtttatgtggaagtttccatgcagcacaacgattcctatacggagaatatctacagctttgtaaataatatcaatacacccgagggcggaacccatttatccggatttaaaaacgcccttaccaatacactcaatgactatgcgagaaacaataagctgttgaaagaaaacgaggccaatctttccggtgaggacatccgggagggcttaaccgctattatcagcgttaagattgaggaacctcagtttgaggggcagacaaagcagaaactgggcaacagtgaggcgagaggcgccgtggataacattttgagggaacagtttacgtatttcctggaacagaatccgtctgtagccaagacaatctgtgacaagtccataatggctcagcgggcccgtgcggccgccagaaaggccagagatttgacgagaagaaagacggctctcgagggtatggctcttccgggaaagctggcggactgttctgacaaaaacccggaaaactgcgagatttatatcgtcgagggagattccgccggcggctctgccaagacggcccgttccagagatacccaggccatccttccacttcgaggcaagattttaaatgtggagaaggccagactggaccgtatctactccaatgcggagataaaagcaatgatcacagcatttggtaccggaattcacgaggatttcgatatctcgaagcttcgctataacaagattatcatcatgaccgatgccgatgtggatggagcgcatatcagtacgcttcttctgaccttcctctaccgtttcatgccggagctaatcaagcagggccacgtctatctggctcagccgccgttatacaaggtggagaagaacaaaaaggtgtggtacgcttacagtgacgaagagttaaacaacatcctgaaggaaatcggacgtgacaccaataataagattcagcgttacaaaggtctgggagagatggatgccgagcagctctgggagacgaccatggatccggagcgcaggattctgcttcgtgtcgcctttgacgaggagaccgcatcggagattgatctgacatttacgacactgatgggagaccaggtagagccgagacgtgaattcatcgaggccaatgccaagtacggcaatctggatatctaaaaaacaattaatattgcgttatgaaggagaagaattatggaaccaaatatctttgataaggttcatgaggtagatttgaaaaagaccatggaaaaatcgtacatcgattacgccatgagtgttatcgctgcccgtgcgcttcctgatgtaagggatggtcttaagccggtacagcgaagagtcttattctcaatgatcgaattaaataacggaccagataaaccccatcgtaaatgtgcccgtatcgtcggtgataccatgggtaaataccatcctcacggagacagctccatctacggagctttggttaatatggcgcaggagtggtccaccagatatccgctggtggatggccatggcaactttggttctgtcgatggtgacggagcggcggccatgcgttatacggaggcgcgcttgagcaaggtctccatggaaatgctggccgacatcggtaagaatacggttgatttcacaccgaactttgatgagacagagaaagaaccggtggttcttcccgccagattccccaatcttctggtcaacggaacatcaggaatcgccgtaggtatggcgaccaacattccgcctcataacttaagagaggtaatcggcgcggttgttaaaattattgacaaccacgttgaggaaaacagagagaccgagatggaagaggtccttgaaatcatcaaggggccggatttccccacaggggcaaccatcctgggcaaaatgggaatcgaggaagcttaccgcacaggccgcggaaagatcagagtccgcgctgtgacagatattgaaacgcttccaaacggaaagagccgtatcatcgtaacggaacttccttacatggtaaacaaggcccgtctgattgaaaagatggccgaacttgctaaagagaagaagatcgatggaatcacggatttacgagatgagtctgaccgttccggtatgagaatcgtcatcgaacttcgccgtgacgtcaatgccaatgttatattaaaccagcttttaaaacatacccagctgcaggatacattcggcgtcatcatgctggcgcttgtcaataatgagcctcgggtcttaaacctgatgcagatgctaaagctgtatttagagcatcagaaggaagttgtaaccagaaggacccagtatgatttaaacaaggcggaagagcgtgctcatattttacagggcttgctgatcgctctcgataatatcgatgaggtcatcaagatcatccgcaattctcagaatgttcagattgcgaaggcagaactcatggagcgcttcggcttaagcgatgctcaggcccaggcgatcgtggatatgcgtcttcgtgctcttaccggtctggaaagagagaagctggagaatgaatttaaagaactggaagcaaagatagaggagttgagagccattctggcagatgagaagaagcttctcggcgtaatccgggaagagatcatgctgatctctgataaatacggggatgacagaagaacctccatcggctttgatgaattcgacatgtccatggaagacttaattccggatgaaaacaccatcgttgccatgacaaagcttggctatatcaagagaatgtctgtagacaacttcaagagtcagaacagaggcggtaagggaatcaagggaatgcagaccattgatcaggattatatcgaagatctgatcatgacgaccaaccaccactatatcatgttctttaccaatacgggacgtgtttacaggcttaagacgtatgccattccggaaggaagcaggacggccagaggcacggcgatcatcaatctgcttcagctgcttccgggtgaaagtattaccgccattattccgatgaaggaatacgatgacgataaattcctgtttatggctacaaagaacggtatggtgaagaagaccccgatgatggaatacgccaatgtcagaaagaacggacttcaggctattgtactccgcgaggatgatgaactgatcgaggtaaaggctaccgataattcaaaggatattttcctgattacgaagatgggccagtgtatccgcttcaatgagactgacgtccgcgtaacagggcgcgtatccatgggtgtaatcggtatgaagctcaacgacgatgatgaagttgttggcatgcagatggatactcagggagagaagcttttgatcgtatcggaaaacggtatgggaaaacgaaccccgatcgacgaatttaccccgcagaagagaggcggaaagggcgtgctctgttataagattacagagaagaccggtaagatcgtgggtgcgaagctggtgcatgacgatcatgatattatgattatcaccaatgagggaattgtaatcagaatttccgtggaagacatctccgtgatcggacgcaacacctccggagtgaagctcatgaacatcgatcaggaatctgatatacgtgtggccagtattgccaaagtacgtgatgacggaagcaagtcagaaggagaagggctggaagacctggatctggatgatgttgagactgaaacggaaacagaagaataagaggcggcagcgaaaaacttaacatttttttaatagaaattctgctctctttatattataatgataacatcaataaaggggagtagccggcataaccttatggattcccgtgcgtcagtacgattaatgaacgctttcataaaacaagtgaatggcttttcataagccgcagtctcactctgttggattaccgggcgtggattgaaataatccgctgggaattgaaatggcaagacttttattgcagtatggaatatttatgctgcaataaaagtctttttatttatcaggaaatgccggatacccaacctgaataaaggaggaattacgcttggacagtgacccaggcgcggccacgatagccgcacagatcttattattaatagcccttacaatgatgaacgcattttttgcaggggcggaaatggcagtagtatctgtcaacaaaaacaggatccggatgcttgctgataacggcaataaaaaagcggccctgattcaaaaactgtcagaaaattctacaggatttctgtcaaccatccaggtggcaatcacatttgccggatttttttccagtgcatccgccgcgacaggtatatcgcagatattgggaaaccgcatggcgcagtcaggaattccttacagccagagtatcgccatggtactggttacgatcatcctgtcttactttaatctggtgtttggtgaactggtaccgaaacgggttgcactgcagaaggcggaggcattcagtctgtttgccgtgaagccgattgccatcatttccaggattatggccccgtttattgcattgttgtccgtatctaccaacggagtattaaggcttctggggctgaaaacggagaatctggaagaggaggtttccgaagaagaaatccgctccatgcttcaaaccggccgggaaagcggagtatttaatgaaattgaacaggatatgattacctccatctttttatttgacgataagaaagcaagggagatcatgactccgcgtcaggatatgattgctgtggatttaagcacgccgctgctgtccagcatggatgaaatcttaaacagcagacactccagaattccggtttacgaggatgagattgacaatatagtgggaatcctgtttatgaaggattttatcatagaagcgaataaaaagcctgtcagggaaattgatattcgtgcaatcatgcagaaaccatactttattcctgaaaacagaaagacggataaattatttcaggaaatgcagaaaaacaagcttaagatggcggttctcgttgacgagtacggcggtgtgtcaggcattgtgaccatggaagatttaattgaagagattgtgggcgatttacacgatgaatatgaggacgtggagccggagatcacagaactggaacctcacgtctatcaggcagccggaagcatcctcctgtatgacttaaatgaggttctccatgaggagattgaaagctcctgtgatactctgtcgggctatctgatcgaacgccttggatacatacccaatgagaagcagatgccgatagaattatatgaggatggaattcattataccattctcaaaatgaatgaaaaggtcattaaaaccgtaaaactggaactgaatcgagaaaaggaaacaggaggctgaaaatggaattcttattagaaggaattatgtcggttacatggcagcagatgcttatgtatctggtgggaatcatcctgatatggcttgcgattaagaaagagtatgagccggccctgcttctgcccatggggtttggcgcaattcttgtaaatctgccgaacacaggggttatcaatcaggtattgtccggtgtcggtgacacaaacggaattattgaatggctgtttcatgtggggatcgaagcatcagaagcgcttcccatccttctgttcatcggaatcggagccatgatcgattttggtcctctgctgtcccagccggtgatgttcttatttggtgcggcggctcagctgggaattttcattgcaatctgtgcggcagtacttcttggatttgacttaaaggatgcggcgtccatcggcataatcggtgcggcggatgggcccacatccatccttgtgtctcagattctgcattcaaagtatattggagccatcgcggtggccgcctattcctatatggccctggtgccgatcgtccagccgtttgccattaaactggttacgacgaagagggaaagaaccatccatatggagtataaaccggcggctgtatcgaagacgatgcgaattgcatttccaattgtcgtaaccataattgtaggcatgattgcccccatgtcggtggccctcgtgggatttttaatgtttggtaatcttctgagggagtgcggagttctcagcaatctttctgacacggctcagaatggtctcgccaatctgattaccctgcttctgggaattacgatctcctttagtatgcgtgcggacgcatttgtgagaatcgacacactgatgattatgggaatcggtctgatcgcattcgtatttgataccataggaggcgtgctgtttgccaaactgttaaatctgttccgaaaagaaaagattaacccgatgattggggccgcaggaatatccgcattccccatgtcggccagagtagtgcagaaaatggcacagaaagaggaaccgggaaatattattctgatgcatgcagtcggtgcaaatgtatccggacagattgcctccgtgattgcaggaggacttgttatcagtctggtaaccaggttcttataggaggttgagacaatgatggaaaatttattaatcgctctggagatcatgggaaaaggcatgggaggaatctttgtatccattctgatcattatgggctgtgttatcattatgggtaaaatcttaaaataattttgtttcgaaataatttggctttggacttgacaaaaaaaactgtaactgatagtattacatcataaactgaaacaataataattacagatttatgtttcagaaaaagagtatgaatcagacagggggcgaatcacgtgacaagtgaatttgcaatagcggtccacgccttggtgtatttgaatcaccgtcagcagacagtatccagtgaggcactggcttccaacgtatgtaccaatccggccagggtgagaaaggttatggccaaattaaaaaaagccgggatcatttcaaccaaagaaggtctggaaggcggataccattttgaaaaagactcatcctgcgtaaatttaaggcaggtatgcgacgcattggaggtcgattttgtatcggcttcatggaaatcaggagataaggaaatggattgtatgattgcatccggtatggcggccatcatggatgaaatctatgcagatctcgacgaattgtgcagaaagcggctggaaagcattaccattgcttccattgaagcgaagatatttaagagctagattttgaaaagttctgccggtgagaagacggaagcagaacagaatagaaaaacgtgaaaattccgattggagaaaatattctaatcggaatttccacgttttttatttataatcttttcacccgaatgagattactccagattaagcttctttgtaaacacataatctgttatggcataaaatcccgctgtacaggccacgctgaagatggtggtgaacagcatgtagttcttaacggtctgaacggcatactccgaattgctgatcacaggagaggagtaaccgcatatggagaaataaatgctgctgataatctgcattaccacatagatggcaaagtaggaaataatagcccagagaactctgtgtttcttaaataaatggcccagggcaatggcggcatacagcatcagggggccggagatcagcccggcaatacaggtgatggtaacttcaatcaggaatacaggcatatttaagtattttgatacttcctgatagagtgtcccgatatcgcggaatatctgctggagatctgtcagatggagatggccggtaaaaaagatgaagatggataagataaacaaaaggccggctaagatttcccacagaacagccgataacagcttcgcattgattaaggttcccatcttcactggaagcgtattggttaaatatccctggtcactcaccatggtcttataaaagtgcatgacgataaatacagaagtcatgacaaacagggcgataatatagatgaaatacaggacaaaaaagatgactgtaattgtttccatcagccggctgtttcccagaaacgcactgtaactgctctcaaatgcaaatttacataaaagtgtaatcgcgatgaaaccaatcatcagcggcaaaaataatctggatgtagatttcatttcatgtttgaatacttttcctagcatttgaacacctccctgaacagagcgtctacggattttccgttttcttcccggatggcatctacggaactggtcaaaacgatttttccatctttgataaagatgatatcatccaggaccggctcaatatcggaaattaaatgggtcgatataatgatggaaccctgttcattgtaattcgataagatcgtgtttaatatataatccctggcggccggatcgacaccgccgatgggttcatcgagaagataaagatcggcgttacggctcatgaccagaatcagctgaactttttccttcgttcctttggagagcgttttcaaccggctctttggatcgatgttcagacgttttaacatttcgtaagccttatttaaatcgaaattatcataaaagtcgtgaaaataatcgagaatctggttaattctcagcccgtcatttaagtaattcttatcaggcagataagagactctccgttttgtctccacacttaccggaagatcgcagatcgtgattgttccgcttgttggagtcaaaaggcctgtggccagtttgataaatgtggacttaccgcttccgttagggccaagcagccctacgattcttcccggttcgatggtgaaatttacatcatcgagagccgtcaaagagccaaatttttttgtgatatggctgcactgtagtatggaattcattgactcatctcctttgctgctttttctactaattttaatgtatcccccggtttcaggcccagactgttcatgaccttaaaaaaatctctgattttctcttctgcaatttcttcttttacgtgttcaatcattgccgtgtcctccgtgacgaatcgccccgatgttctttgagaatagataatgccgctttgttccagttccgataatgccttttgcatcgtattgggattgacagaagcttctccggccagttccctgactgaaggaaggcggctgccagccgcgtagatgccggatataatgcgaagacgtatctgctctaacagctgtgtatagatcggtctgtcattttcaaaatgccatgtcatttgctcacctcctattgtattactgtactaattgcttaatacaataatacacctcaatccattctttgtcaatagcaattgcaaaagaaataacgcatgattatacttgatttcgacggatcaatcccttatgattagtaaaagagagtgatggcttcatcatttatatggaggaatcgtatgataagaaccattcagagcgaggaaataacaagaaatattaaagaaatgtgcatagaagcaaaccatgtactgtcggatgatatgaagaaggtattctgcgacgcggtggggaaggagcggttaccactgggaagacagattttatcacagttggaggaaaatttaaaaatcgccggggaagacatgattcccatttgccaggataccggtatggcggtcattttcctgaaaataggacaggacgtacatatagaaggcggcagtctggccgatgcggttaatcagggagtacatgacggatatgtggaaggatatctccgtaaatcagtcgtagagccggtaaaaaggattaacacaaaagacaatactccggcagtcatccattatgagattacggatggagaccagatcgatataaccgtggcccctaagggatttggaagtgaaaacatgagccgtatcttcatgttaaaaccggcggatggaattgatggaattaaggaagccgtgctcactgcggttcgggatgcaggtccgaatgcctgtccccccatggtaatcggagtagggatcggaggaacctttgaaaaatgtgcggagatggcaaaacatgccctgaccagaaacttggatgagcagccctcttccggctatgtcggagaacttgagacggaacttctcgaaaagattaacagtcttggaatcggtccgggaggactcggcggcagcatcactgcactggcagtcaatattgagacgtatcccacccatattgccggtctgcccgtggcagtcaatatctgttgtcatgttaaccgtcattcgcaccggatcatataagacagagaaggaggaagatttaacaggatggaccgttacatgaaagcaccgattaccaaagaagatgcagccagccttcaggcgggagattacgtatatttaacaggaattatctacacagccagggatgcggcacataaaaggatgcaggaaacactggatcagggacaggaactgccgtttgaaatcagcggcaacatgatatattatatggggccttctcctgcaagagaggggcgtcccatcggatctgcaggaccgacgacggccagtcgtatggaccggtatacaccaacgcttctcgacatggggttgggaggtatgattggaaagggaaagagaagcaaagaggtagtggatgccatagtcaggaacggttctgtgtattttgctgcagtaggcggagcgggcgcacttctgtccaaatgcatcctttcctcagaggtagtcgcatacgatgatctggggacggaagcgatccggcgtctggaaatcaaagattttcctgtcattgttgttattgacagcaaaggaaataatctatatgagacagccatacaggaatacaggagggaaccatgaaccgtatagcatatatggtgcttcggaatcttttccgggctccaatatggttttatcatatctggaagctgggcagatccggggatacccacacagaacagcagagatatgattatattagaaatgttgtaaaaacagtaaaccgtacaggccgcgtggaagttgaagtacacggaattgaacatctgccatcccaaaatggttttattctgtttccaaatcatcaggggctgtttgatgttctggctatcatggacagttgtcctaatccgctgggaatagtcgtcaaaaaagaagcttctaatattatcttgattaagcaggtgattgcagccatgcatggtatgtccatagaccgtcaggatgtaaaagcttctttaaaggtcatcacaaagatgacggaggacgtgaagcagggaagaaattacgtaatatttgccgaaggaaccaggagcagagaaggaaatcatcttcttgcttttaaaggaggaacatttaaaagtgcggtaaatgcacggtgtcccattgtccccgtagcgctgattgactgcttcaaaccgttcgatgttaattcaatcaggaagcaaaaagtccaggtacgtttcctggaaccgcttcttccggaacaatatgttgggttaaggactattcaaatagcagatatagtacacgataaaattcaacaggaaataaatgaaaatatgggttgacaatcgaaatattctctagtataattgtcaatgcgtctgggaacaatcttgttacaggacgaatcatatggagattatgaactacggagaaatactcaagaggccgaagaggcgcccctgctaagggtgtaggtcgggtgaccggcgcgagggttcaaatccctctttctccgctcttttccaaatgattatttttttgccctttcgtggagaaaaaagtaaaattatggttgactcgataaaaacgatgtgctataatgtaactccaccgcgaaaaacggtgaaaaaagcaaaaaaagaaaataaaaaaagttgttgacaaaacagaaacaatatggtaagataaacgagttgctgttgagaacaaaacaacgcaaacgcactttgaaaacagaagattgaacagtatgtaaaaccctgaaaattctaataaaacaagccattgtttgatggctttgaatgagaaaattcagaacgaatacaagtattgtatacgaaccaaacaacaagtaaaacgggaaataaattagctagttagttgattttgaccccggatcaaacgaatcatttaacatgagagttcgatcctggctcaggatgaacgctggcggcgtgcttaacacatgcaagtcgagcgaagcggtttcgatgaagttttcggacggatttgaaattgacttagcggcggacgggtgagtaacgcgtgggtaacctgccttacactgggggataacagttagaaatgactgctaataccgcataagcgcacagggccgcatggcctggtgtgaaaaactccggtggtgtaagatggacccgcgtctgattaggtagttggcggggtaacggcccaccaagccgacgatcagtagccgacctgagagggtgaccggccacattgggactgagacacggcccaaactcctacgggaggcagcagtggggaatattggacaatgggcgaaagcctgatccagcgacgccgcgtgagtgaagaagtatttcggtatgtaaagctctatcagcagggaagaaaatgacggtacctgactaagaagccccggctaactacgtgccagcagccgcggtaatacgtagggggcaagcgttatccggatttactgggtgtaaagggagcgtagacggtttagcaagtctgaagtgaaagcccggggctcaaccccggtactgctttggaaactgttagacttgagtgcaggagaggtaagtggaattcctagtgtagcggtgaaatgcgtagatattaggaggaacaccagtggcgaaggcggcttactggactgtaactgacgttgaggctcgaaagcgtggggagcaaacaggattagataccctggtagtccacgccgtaaacgatgaatactaggtgtcggggggcaaagcccttcggtgccgccgcaaacgcaataagtattccacctggggagtacgttcgcaagaatgaaactcaaaggaattgacggggacccgcacaagcggtggagcatgtggtttaattcgaagcaacgcgaagaaccttaccaagtcttgacatcccactgaaaacactttaaccggtgtccctcttcggagcagtggagacaggtggtgcatggttgtcgtcagctcgtgtcgtgagatgttgggttaagtcccgcaacgagcgcaacccttatccttagtagccagcaagtaaagttgggcactctggggagactgccagggataacctggaggaaggtggggatgacgtcaaatcatcatgccccttatgatttgggctacacacgtgctacaatggcgtaaacaaagggaagcaaaggagcgatctggagcaaaccccaaaaataacgtctcagttcggattgcaggctgcaactcgcctgcatgaagctggaatcgctagtaatcgcgaatcagaatgtcgcggtgaatacgttcccgggtcttgtacacaccgcccgtcacaccatgggagttggtaacgcccgaagtcagtgacccaaccgtaaggagggagctgccgaaggcgggactgataactggggtgaagtcgtaacaaggtagccgtatcggaaggtgcggctggatcacctcctttctaaggaagaagaagtaggggttttagatactgttgagtcttgtgtttcaaagaagataaaagtaattgaataagaaacgccaagaaagactagaaatttctggtgccgatgcgcttaggggaaacacccgtacccatcccgaacacgatggttaagacttaagcggccgatggtactatgctggagacggcatgggagagcaggtgggtgccagattacttaaaaaaattcactcgaaagagtgttttatatagaacggacacgttccaatgggtggagataaaggcgaagcctgtgttaaagaatgtgttaacctgattcagcagggcagtgctgttccatataactggtttttaccagtgattagtggattcgagtcgatcgagtctgctaatgactgataaacttcagtctgcatgtaccttgaaaaccacatattgaatatatctagatagattcttttaagggagtttaatcccgagaaagagtaaatcaagacatccgaggtgttatatcgtaacagatataaccgaaaattataaactcgttgttgctgtaacgtacagcgataacaaacctaagaccagagattcaacgctatgaatcttagatgagtaatccgcacccgcagatgaaaatcgaactggttaagctaaaaagagcgcagggtggatgccttggcactaagagccgatgaaagacgtgataagctgcgaaaagcttcggggaggagcaaatatcctttgatccggagatatctgaatggggaaacctggctgagcaaacctcagtcggcgtatggtgaatccatagccatacgttgggaacccgctgaactgaaacatctaagtaggcggaggaaaagaaagaaaactcgatttccagagtagcggcgagcgaaatggaaggagcctaaacctgggtgcgtgcacccaggggttatggactgcagtaagtgactcgtatggtaacagaacggtcctggaaagaccggccacagagggtgaaagccccgtatgtgaaaccagaagagagcgggcatgttccaaagtaccacgagacacgagaaaccttgtgggaagtcggggggaccaccccccaaggctaaatactccttagtgaccgatagcgcatagtactgtgaaggaaaggtgaaaagaaccccgggaggggagtgaaaaagaacctgaaaccctgtgtttacaaactgtggaaccacattttaggtggaaccgcgtactttttgtagaacggtccggcgagttgccgggactggcaaggttaagcactcaaggtgtggagccgaagggaaaccaagtcttaatagggcgttgagtcagttcaggcagacccgaaaccgggtgatctacccatgtccaggttgaagtttccgtaaaaggaaatggaggaccgaacgcacatccgttgaaaagggtggcgatgaggtgtgggtaggggagaaattccaatcgaacccggagatagctggttctcctcgaaatagctttagggctagcctcgtattagtttagcggaggtagagcactgaattcttaagggggcgtcaaagcttaccaagagatatcaaactccgaatgccgcataaatgatgtacgggagtcagactgcacgagataagttgggcagtcaaaagggaaagagcccagaccaccagctaaggtcccaaagtgcgtgttaagtggaaaaggatgtgggatttcgaagacaactaggatgttggctcagaagcagccacacattcaaagagtgcgtaatagctcactagtcgagaggtcctgcgccgaaaatgtccggggctgaaacacgacaccgaagctgtggaattgacttatggtcaattggtagaggagcattcttaactgcggcgaagcgttaccgtaaggaggcgtggagtgttaagaagagagaatgccggaatgagtagcgagatggaggtgggaatcctccaggccgaatatctaaggtttccagagtaaagctgatctgctctgggtaagtcggggcctaaggcgaggtcgaaagacgtagtcgatggacaacaggttgaaattcctgtaccgcgtattatcagaactgtggggacacagaaccgaagccaaacccgggaatgaaaagaccggggcaagcgccggactggttagactggcaaatccgtttaacaacaggaaagcgtgacgcgtaccgaacaaaagtagggaagttggtataggggctgtcaagaaaagccgctattgtgtaatacgtgcccgtaccgtaaaccgacacaggtggatgaggagagaatcctaaggccggcgggagaagcattgttaaggaactcggcaaaatgaccctgtaacttcgggataaagggtgcccacgagagtgggccgcagagaataggctcaagcaactgtttagcaaaaacacaggtctatgcaaaaccgaaaggtgaggtatatgggctgacgcctgcccggtgctggaaggttaagaggagaggttagagcaatcgaagctttgaatttaagccccagtaaacggcggccgtaactataacggtcctaaggtagcgaaattccttgtcgggtaagttccgacccgcacgaaaggcgtaatgatttgagcgctgtctcgacaatgcacccggtgaaattgaagtaccagtgaagatgctggttacctgcgccaggacggaaagaccccatggagctttactccagcttgatactgggattcggtactgcatgtacaggataggtgggaggcagagaaggtaggacgccagtcttaccggagccattgttgggataccacccttgcggtattgggtttctaacctgcggccatgacctggccgggggacaatgtcaggtggggagtttgactggggcggtcgcctccgaaagggtatcggaggcgctcaaaggttccctcagaatggacggaaaccattcgaagagtgcaaaggcataagggagcttgactgcgacaccgacgggtggagcaggtacgaaagtaggacttagtgatccggtggtataaagtgggattgccatcgctcaacggataaaagctaccctggggataacaggcttatcactcccaagagttcacatcgacggagtggtttggcacctcgatgtcggctcatcgcatcctggggctgaagtaggtcccaagggttgggctgttcgcccattaaagcggtacgcgagctgggttcagaacgtcgtgagacagttcggtccctatccggcgtgggcgtaggatatttgagaggagctgtccttagtacgagaggaccgggatggactgacctctggtgtaccggttgggtatcaaacccatggccgggtagccaagtcgggaagggataaacgctgaaggcatctaagcgtgaagcccccctcaagatgagatatcccatcgcaagagtaagaccccttgaagacgacgaggtagatagggcagaggtggaagtgcggtaacgtatggagctgactgtcactaataggtcgagggcttaaccaagttggtttaggaaaagaggaaataagaacggatgaaagatatgtacaatgtgtggttttgagggtatatgtaaagccttcaataaaggtttggcctggtggctcagctggttagagcgccgccctgtcacggcggaggtcgtgggttcgaatcccatccgggtcgtttaaacagaatatttcgtatgtgggatcttagctcagctgggagagcatctgccttacaagcagagggtcacaggttcgagccctgtaggtcccattcattatgtaaagtccgaatgagtaattcgccgatgtggctcaattggcagagcagctgatttgtaatcagcaggttatcggttcgagtccgatcatcggcttgcatgaatcaaataaaactaaatagcaaataatatggatggtttcccgagtggccaaaggggacagactgtaaatctgctgcaaattgcttcggtggttcgaatccaccaccatccactagatatacttctaataagggagtatgtcgaatataatttaataacgcggggtggagcagtctggaagctcgtcgggctcataacccgaaggtcgcaggttcaaatcctgcccccgcaattttttgtgagaactttaagtgtacttacagatggacatgcccagatagctcagttggtagagcagaggactgaaaatcctcgtgtcgttggttcgattccgactttgggcattatgggatactagctcaggtggtagagcacttgacttttaatcaagttgtccggggttcgagtccccggtgtctcagtaaaatgaagccttgaaacataaattgtttcaaggctttttattatcggtttgttgcattttacgatatatttataacgttttatgagagtgtgaaaaggaggactgtcaatggaagacaagtaccaggctgaaattaaaaagaaactggccgagagcgtgaaccgtgcatggaagattatcagtgttttcgtaatggcgtttcaatttttgatgctgatactgatggcagtcaagccgggaggaccgtttaagacgcagaggaggactgtttactgctttctctatttggttttgcttttggttacgggaattgccatgattctgaaccagagattttggaagagggaaaacaaaaattaccatcgttatcttaatgcggaaatagtttatgcagcgtttatctgtttttggggatgctgcgttaccctgaatgatcagctggggggcaatgatttaagtgtatttacatatacgatgctgtctgtggcggcactcggttttttggagccggtgaaggcagtagttatttttatgtcggcgtttgtttttctgaacttatgtcttccgggaattcagactattgagaataacatgttcagtaatattataaacagcttttccatagcgggcatttctacggcaatttcttatacgctttacagaaataaggtaatcgttacgaaacaggaaatgacgattcgaaagcagtacgaggagattaccagggtaaatgaaattttaagccgtcaggctatggttgatgaattgacagagatgaataaccgaagatacatggaatggtttatcggtgaaaaaattaagattctggaggagaaaaccggtacaatttcctgcatgatgctggatatcgattatttcaagcagtttaacgatcggtatggccatatttcaggtgatatatgtctgaaaaagattgccgagatgattcgggaatgctgtcaggatcaaaatgtggcagcgatccggtatggtggagaggaattttttatctgtctgtttcagtgggatcaggatgaggcagtagagatggcggagaaaataagaaagagaattgcagaatgccgctttaaaatcaatgatgaagaagaaggagcggttacgatcagcattggtgtgtatacatggcatggtgaagggaaggtgcagatggacgatctgattcgtttatcggataaggcattgtaccaggctaagaaaaatggaaggaacagagtggaggtattgtcataaaagatgagccagagaaccggattatcggttttttggctcatcttctttttctgtggtttcgcgtcggattaaaatgggagtgattgttttatggaccggttccttcaggggagccggttttcgctttttacgctcattcatctggctgacaaggagacttactgcttcgttggcaataaggtcaatctgctgtcctattgtactgatcgggataaccgcttcccgggcaaccggggagtcatcaaaaccaatgatgtaatagtcatcgggcagcctgccgtatttgcggacgattaaatttaacaggatattggcatgggtatcgttggatacaaagattccttttcgcattccggtatagcttgtctccagctcttctaatatgtcttttaaatactgaagagaggaatcataggtattctctgttctgtggcagaaaattttatggttcatattgttttctctgcagaaatccataaatccctgaattcttccataggctggaatattctctgcagtcggcgtattgatatggatcagtatgtcgcagtgatgtctggccagaagactggtggcctggatggcccccatataattatcggtattgatactggagacgtactgatcttcccgttcaatggtgacaatgggaatctgaagatctgccagctcccgggaggacagcgtgtggctcaggacgatgagtccctctatcttataggccagaagttcctggatatattgacgttccgtttcagcattctcatggccgatgaataccagaaatttatatccgtacgtctcgtatgtagaaagaatctgattcagcatttcggagtagtaatgcagataaagattaggtatcagaataccgacaaattctgtcttgccgttggcaaggatgcgggcgaccttgttttctttatagttaagctttaccagagcgtcggatataatctgctggttctccagcgtgagagagtccggattattaaagtatctggatatcgttgttttggaaaaatgagtgtattgtgcaatatcgtcgaaggttatattctttttctgtgccatcctgatgcctcttttcaatttgtaaggtgtatgttccgcttttagtatagcaaaaatagaataatggttcaagagtaatcggttaagtaaccggttttgttaagatcatacaaattataaggctgtaaataggcaaattcacgaaaagtcatttgattattgacataatgacgaaagagatgttatgattaaaacataaagtaaccggttacttaaccggttatatagagagcgacattggatggtataagagaacagtgataaaggaggaatgaggatgatgaaaagtattggtacgaaggccattaaagttatggttctgatggcggcagcggtcctgatgctgacaggatgcagatttgggtttgccagcgatccggatgatccgaacgaggtggtacaggaagagccgattgatacgtcggtggatacgtttgagtatgatgcttctctttccggtacgaagattacgcttttgaattccaaggcggagattcaggtggccttgacgaagatggcggaggagtatgagaaaaaatcgggagtacatgtggaggtcatgccggttacggatggggactctccttataccagggtggtcagtatgtacaattcaggaacgccgcctactatggctattcttgataccactgatgtcattgctctggcggaggaaaaagcggttgatctgacgggagagccctggaccgctgaggcggaggattatctgacagaggtaaacggaaagatatatagcttcccgctctgtattgagggacggggacttatttataatcgttcggtgattgaagaaacactgggcagggaatttgatcctttatctgttacgaccctggatgagtttacggcacttctggatcagctgacggaggcgggcatgaaacgtcctgtatctgtggcaaaggaagactggtctctgggagcgcaccagcttcagtacatttacgagacgtataatggaacttctgagggagcgcaggaggttatcgagaagattaaggaagggacactggatttaaattcttatgaccgcatgaatcagtttttaaatatgtttgatgtcttaagggagtataacgtggcaaaaaaagatccgctgggggccgattatgatgagatggctattgatctggtggatggaaagactgctttctggtttaatggcaactgggcatggcccaatctttcggaggccggtgcggagaattcagatgagtatggcttccttccatactttttgaatcatgatccaggggattttgccaatcagcagatccaggcgtctccgtctaaacagattatgatagatggaaggattgtctcagatcaggagagggcggcggccagggagtttttaaactggattgtatttagtgagatcggtcagcagatgattgtaaagacgtgtaatctgatcccgccatttcagaataatccttacgagcctgcggatccgctgagtcgggatatctacaaccgggtccatgaagagagagcatttaacgcatctgcgatcgttccaaatgaccactgggcggttctgggagcatccatgcagaagtatctggcgggcaggagcagccgggaagaattgattcagtcgatcgagaactattgggaagaacagagataggagagaggtgtccaggatgaaatcaaagagtaaagggaaagatttctgtatttttgcattgcccggattattctgtttttttgcagtcgtgattgttccgtttatctacggtgtctatttgacaatgacggactggaacggcgtttcggatgtgaaaaattttatcggtctgcaaaattttgccggggttatgaaggacggacagttctggtcatctctgctcctgacctttaagtatgtgattgtagtggtggtgtttgtaaatgtgctggcgtttatgatcgcctatctgctgaccagagggattaagggacagaactttttccgggccggattttttacaccgaatctgatcggaggcatcgttctggggtatatctggcagttcgtattttcaagagtctttgtgggaatcggtgatgctacgggctgggggctgtttgaggcgtcgtggctgtcagaaccgacgaaggcatttatcgcactggtgattgttacggtgtggcagctgtccgggtatatgattctgatctatgtggccggatttatggggctgagtgatgatgtgatggaagctgctacgattgacggcgcttctggctggacgaagatgaagagtattatcctgccccttatgatgtcctccattacgatatgcctgtttctgacgctgtccagagcttttatggtatatgatgtaaacctttctttgacggcgggagcgccctatgggacgacggagatggcggccatgcatgtatatgaaaaggcatttacatcgaggagatttggcgtgggccaggcggaggcgctgattctgttcgtgattgtggcctgtatcagcggaattcaggtttatttaaccaagaagaaggaggtggaagcataatggcaggagagaaggcaggaagcggtaaaaagagaaaaaaatcagatcttgtggctacagcaggattgattgttatatttattctttacatgttcccattctacatggtggtgatcaattccctgaaacagaaacgggatattatcaagagcccattttcctggctgtatacgattaaagggctgtcgtttgataacttcgtgaaggcttttgttcagatggattttttaaacgcgtttaagaattccatgattgtaacggtatttgcaacggcgctcgttacatttctggcggctatgctggcctattatattgtgcggaataataatgcggtttccaggactgcctttgttttgatggtggcttctatgattattccgttccaggcgattatgattcctctggtgagtatctatggcggcaagctgaatgtgctgaaccacagaagcacgctggtgtttatgcatacgggtttttccatggcaatgtctgtgtttatgttccatggatttattaagggaaatgttccggttgcactggaggaggccgctaatattgatggctgtacccatgctcagacatttttccgaattgtttttccactgctgaaaccgattatttccacaatggtaatcttaaattcactggcgttctggaatgatttcctgttgccgtcgctggtgctgtcggataagaagctgctgactctgcctctttccacatacagcttttacggcacgtattcggcagattacgggacgatcatggctgggctgctgttgtgtgtgataccggtgttaatcctgtatatcgcccttcagaagcagattatcagcggtgtggtggccggagcggtaaaataagccgggagagacggggcctgtgtcggaacacagtccggcgcagtaatgacagaaggagaggctgcatacgatgactgaaaatacaatacatataaaagcgccgggatgctggatgaatgatcccaatggatttatttattacaggggaaagtaccatatgttttaccagtgttttccttttgataccagatggggaagaatgcactgggggcacgcggtgagcgaggatctggtgcactgggagcataagggaatcgcattgtttccgagcaaacacggggaccgggacggatgcttttccggaagcgcggtggagcatgagggaaagctgtatttgtactataccggcgtccgttatctggaagaggatccggaggatacgaatctctgcctgaatgagaagtttgtctcggcacagatgatgattacgtcagaggatggcgttcattttgacaatataagggataaaagagagatcatcgcacctttggaggacagggaaaggggagacgctgcccacacgagggatcccaaggtatggcggggatcagatgcctggtatatggttttgggaacccatggaggcgactcaaatggcaggctgcttttttaccgcagtgccgatctggaaaactggtcatatgtgaatgcggtgtcgaaaagcggtttgggatggatgtgggaatgccctgactattatgagacaaagggcggaaaggttctgtcattttcacctatgggatttttgaaggacgggtaccgggaagagaatcagaatatctgcatggtggtggattttgaggaagaaagctgtaccatgaggatgccggaacaatatcagtttctggattatggcctggatctctatgcggcacagagtacggtggatgaggatggacggagagtgatggctgcatgggtccgtatgccggaagcagcggatggggaatggatcggtatgatgtgcagccccagagtggcagaagtggaagacggccatatttattttcggatgcatccggcagtcagaggggcttataccaggaaaattgaccggccggatgaggctgccgaagcagggtatctgattgcagcggacttagaggagggcgatcggattgagatcggcggatacctgatttaccgaaagggaaaccggatctgtacggaccgaagcctgactgcgggaaatgacagggatggcagaatgcagtttgagacgccggagattaaaaatggcggtcatgtggagattctggtggatgcgaatctgattgaggtttttgtaaatgatggtgagtacgttatttcaaatgtggtatatggagttggaaatgagatattgacggcaaataagataaagttatatacaatcagggagacagggtgaaatggattattgtaaggaatatgaggcacggtttaatcaatattatgatgaattgaaatggctgtactgcgagttatataagaatcaggatgaggcgctggaacagctgtgcggacagatgtaccgtttttatacagagaggaaggcggctcttaagaggatggaccgggaacgggcgaagaacccgcagtggtataaaggaaaccggatggtcggtatgatgatgtatacagatgcctttgcaggggacttgaagggggttttaaagcatctgaattatattgaggagtgcggggtcaattatctgcacctgatgccgcttctggatacaccggagggaaggagcgacggtggatacgctgtttctgattttcggaaggtgaggcccgatctgggaacgatggaggatttagagtgtctggctgcggagtgtcataagcgggatgtgagcatctgcctcgactttgtgatgaatcacacatcggaggatcacgaatgggcaagaaaggcgaggatgggggatccggaataccagagccggtacttcttttacgataattacgatctcccggcgcagtttgagaggacggttccggaggtatttccgactacggctccggggaattttacctgggtagcagatgcagggaaatacgtaatgactacattttatccctatcagtgggatttgaattactggaatcctgttgtcttaaacgagatggtcggcaatatgctgaatctggtgaaccgggggattgacgtgatccgcattgacgcagttccctatatctggaagcagcttggcacaaactgcaggaatctgccgcaggtgcacagcattgtgcggattatgagaattatctgtgagattgtgtgtcccggggttcttttacttggagaggtggtgatggaaccggataaggtggttccgtatttcggcagcgtggagaagccggagtgccatatgctttataatgtgacaaccatggcggccacatggaacagcgtggctacaaaggatatcaggctgcttcgccagcagatgaatgtggtgagcagtctgccgaaggattacgttttcttaaattatctgcgctgtcatgatgatatcggatgggggcttgattatccgtggctcaaacagttcgggatcgatgaggtcagccataaaaagtatttgaatgatttcctgacgggacagtatccgggatcttttggacggggagaattatacaattcagatcctgagtcaggggatgcaaggttatgcggaacgacggcgtcattatgcgggatagaaaaagcagcgtacgagagggatgaggaagctcttaaaaaggcggtaaggctggatctgatgcttcatgcctacatgctgtcgcagtcggggattccggtgatctacagcggcgatgagatcggtcaggagaatgattatacttaccatgagaatccgaaaaaatgggatgattccagatatctgcaccggggcagtttccgttgggatcttgagaagaaacgcagcgtaaagggcagccttcaggaaacgatttttgaagggattaagaagctggagtcaatccgggcacagtttcctgtgttctgtacggatgctgaagtgtggaccattgatacgtgggatgacgctgttctggggcttgtgaggaggtctggggaagaaaagctgattgccctgtttaatttcagtgaattcgataaagtcgcatggatcaacgaggaggatgggatgtataaggatctgatctcggggcggaagctggaagcgaaaggggtgcaaataccggcttatggcgtttactggctcatgagggaaaaatgggatgagaaggatacggctgtggaacacggagaaaaatcagtttaaataataattacagtaaaaaaggatctggagacttcgcgtcccggatccttttgactattcgtcaaattctacaatcacatagtaacctctgtcattatgctttacttcttttacgattccatggtcggacttgatgcggtcgcggccggtatagcagccggacatggcgaccgccgggtcgatgatatagctgtaactgctggttccttctctttcgattatggatacttcatcgcctgccttgacaagtcccgggcgttccatcttaaattctattgttctcatgataacttttctcctttttattcctgtgggggttgatctcgatatctattataagacgagggtcaaaaaaagtaaagaaaggaaaaacgaaagaaaatcttacattttattataatacaatattaaattattgaatatcaataaatagatattgaaaaatgatattgactatggtatgttacaggaaagagcagtattggatgataagaaggaggtttgaaatatgagtgagatgaattcgatgaattcggtggagccgatgagttccatggagccggttccggcatggaagaagggaaaacaggaggtaatgacacagcagtttttattgtttatgggggcggcccttggatttggaatactgtataccttttgtatgtatcaaaatcccaatgggattacgtatcctgttatgattgtgggtgtttacggtgtgctgttctggatgctgaaacggctctccatcgaatggaagcgggactcatggtttttggcatctgcagcggttttgctgggaattgcggcctgcaggactgctgattccctgcttattatgatgattaagaccgcagaatttctgctggcggttatctttgtaatgcaccagttttatgatgacagggagtggagtatcggaaagtatttgtcttcaatggcagtctacctctgctgtgtgattgcggccgcagtctatccgttttttcagggaaaagaatttttcaggaaggcaaatttaaagaagtataaaacagtttctaaggtggctctggggctggcagcggctctgccgattctgttggcagccggattgctgctggggcaggcggatgcggtgtttggtgctattgttgttcattggctggaaaagattctgaatgtatggaccattcttattatgatagtcatgacggcatttgggacttttggcgtttactgtctgatctgtggagcgtgtatggatcagatatccggtgaagaaaagatggtgagaactcatgagccggttactgctgtcacctgtatgagcgcgattgcactgctgtatctgtttttttgtggaatacaggttatttacctttttcttgggaaaggaagtctgccggagggcgtgacatactcttcctatgcgagacagggattttttcagctgttgttcgtggcggttatgaatctggtcatggtgcttatgaatcttaaattttttaggaagagccgtttgctgaatggtgtgttaactgtgatctgcggatgcacctatgtgatgatcgcatctgcggcgtaccggatgattctgtatgtccgggagtatcacctgacgtatctgcgggttctcgtgctgtggtttctgcttttactggcgtgcctgatggcaggagtggtaattttaatctataagaacagatttccgctgtttagctggtgtctcgtgctgatatccgtattttttgtggggttttcatttatgaggccggagcgggtcattgcagagtataatgtgaatcatgtgaaggaatggagtgacagcgattttcagtatatgacacaggtactttcggcagatgcggtaccggtagtgcttaaagcgctggaggatgatgccgttttggagcggttttattccggcgggaaaaaggagtttttagcggagtattatgactgggcggtctcaagaaactaccaggtgcgttcctcagatttcagaacatggaatctttcctttgaaaaggcggaacagtcttttagaaatgaggaaatgggaatttgacattttatcttcaatctgctaatctggaagaaaattatctggaggatgaagatggaaaaggatctgctgagccgattaatcgaatatggaaagtctgacgtctatccgtttcatatgccgggacataagaggcggacggatagcggatttgcagagaactttcccaatccgttttctatggatataacggagatcggcgggtttgacaatcttcatcatccggagggggttttgaaggaatccatggaatgggcagggaaagtctatggggctgacaggacgtattatctggtgaatggaagcagctgcggaattttgagtgcaatatgcggttctgtttcccatggagggactattctcatgagccggaactgccataaatcggcgtatcatggcgtttttttcagtcacttaaaggcggaatatatttatccacagacgattccgggatttggtatccagggtggattagcgccggaggatgtcagacggatgttgataaaccatccggagacggaggccgtgctggtggtgtcgccgacgtatgatggaattgtctcggatattgaagcaattgcaggtattgtccatgagaggggaattcctttgattgtggacgaggcccacggggcgcattttccttttggaaaggaggcgggatttcctgtttcggcgctggggcttggtgcggatgtggtgatacagagtttacacaagacgctgccatccctgactcagactgcagttatgcatgtaaaagcgggctttgcggatttagacaggattgaccggtatgcccacatgtttcagagcagcagtccgtcgtatgtgctgatggcttccattgaaaattgtatccggtggatggatgaagcggggagacatgagatgatggcttttggcggcagactggaccgtattcggcagcagcttatggagatggagtgtctgacccttgttgacggtgtgaaaggccggtgccatgtttttgatgtggaccggtctaaaattgtggtttctgtggggaaaagcggtctgaccggtccggagcttcaagaacggcttcggagagagtaccggctggagatggagatgtgcgggccggattatgtgacggcgattacaacggtggctgacacggatgaagggctggaacgattgtgcagggcgtttatggagattgatcttgatcggaagcggtctgcggagggctgtgagaattctgccggaagctgtgtggggagaaacggggataatgccggggaaagaagcagtggaattgtggataacgggatggaaaaggaacgtgtttgtggatggccggagattgccatgacgattgcccaggcgatggacgctccgggacagcctgttccgctcgatgattgtgaggggctggtttctaaagagtttatctatatctatccgccgggaataccgattgtggcgccgggggaagtattaaaaccggagctggtagatgagatccggaagtataagcggaaggggcttcctgttcaggggaccgcggacccggaggtggaagcggttctgactgtggcggatcgggaaaatatggtgaatgaaacagggaaaattgagggatagagcatgggaaagatattttatgtgatgggaaaaagtgcatccggtaaggatacaatatataaagaactgcgggaacggattccggaattaaagacggtggtcctttatacaacgaggccgatccgggacggggagacggagggggtggaataccattttacgacggctgaacggctcggtgattttcgcagggagaaaaggctgattgaggaacggacgtatcagacggtgtatgggccgtggagttattttacggtggatgacgggcagatctgtctggataggaaggattcttatctgatgatcgggacgctggaatcttatgagaagatgagaggatattttggtgaaaatgggcttgtgcccgtctatatcgaggtggatgacggtgtgcggctggaacgggcgctgcagcgggagaagggacagaaggagccgaagtataaagaactctgccgaaggtttctggcggatgaagaagattttaaggaagagaatctgacgagatgcgggattagaagaagatacaggaatgatgatctggatgtgtgcatagaggagatttgccgggatataagggcggttacaggaacgtagagtacgaaagggaggatggagaggaaaagtatgggaagtatgtttatgaggtatccgggaggaaaaaagaaggcgcttactttaagctacgatgacggggtggagcaggatatccgcctgattgaacttatgaagaagaacggtttaaaagggacctttaatttaaacagcgggctttatgcagaagagggaacggtatatccgcccggaacggtacacaggagaatgacggagaagatggcgacggaggtctacggaagcagcggtatggaagtagctgttcacgggctgacgcatccgtttctggagcagctgccggtaaatctctgcacggcggaggtgataaaagacagggagaatttggagaagcagtttcaaacgatcgtaaggggtatggcatatcccttcggaactaccagtgatatggtggtaaatacgcttatgcagtcggggatttcctatgccagaacgacggtttcaacaggggatttcaggcttccctctgactggctccgcctgacggccacatgtcaccataaggacgggaggcttaaggaactggcgaaaaagttcgtggaagatacgccgaaatacggttcctggctgttttatctatgggggcacagctacgagtttgaggcggatgagaactggaatgtaattgaggagtttgccgcgtataccggaaacagggatgagatctggtatgcaacgaatctggaattatatgattatgtgacagcctatgacagactgctgttcagtgtggatgggctgactgcatataatccaaccagtacagatgtttattttgataaagatgacaactcttactgcttaaaagcgggagagaggaagttcctgtccgggacatgatggagtggtaaaagggctgcgggctgtgaggcgccgggctggcagtaaacagcaactcctgcttcccgcttatgggaattcccagcacttatttcttgtgagtatgtattttatatgctataataaatcgtatattttctaatatttacggtccataagctgtatggacggcagataattgcgattaagcagatgcgagacggaggtgccccatgccgggatttaatgatattatcggtcatgagatgataaaagagcattttaagaaggcgatagagacgaatcacgtatctcatgcgtatattctgacaggtgaggcgggaatggggcgtaaatcactggcgaacgcatttgccatgacgcttctctgtgagaaagggaagaaagaaccgtgtatgcagtgtcatgcatgcaaacaggtaatgagcggcagccacccggatttgatttttgtaagtcatgagaaaccgaacagcatcggcgttgacgatatcagggaacagattaatgatacgattatgatacggccttacagcagctactataagatttacattgtggatgaggcggaaaagatgacggcgcaggcgcagaacgcgctgcttaagaccatcgaggagccgccgtcctatgcgattatcatgctgctgacgacgaatcaggaggcatttcttccaaccatattatcccgatgtgtgcagttaaagcttaagccgcttcaggacagtgttgtgaagacgtatctgatggaatcccagggtatttccgaggtgaaggcggagatttacgccgcgtttgccagggggaacttagggaaagccattcatctggcatcctcagaggattttcagctgatgtatacggagcttcttcatatgctgaagcatctgaaagatatggatattacagagcttttggactatattaagaagttaaaggacgagaatctggatatttatgaatgccttgattttatgcagctgtggtatcgggatgtgttgatgtataaggtgacacaggatattaatcttctggtgtttaaggaagaatataatacaattaaggaaatgagcgccgcctgcgcctacgatggagttgagaagattcttcagtctattgacaaggcaggaatacggctgaatgccaatgtcaacatggaactggccatggagctcatgttactggtaatgaaggagaactgatagatgataaaagtgattggtgtaagattccgcaatgcgggtaaaatctattatttcgatccggccggcagagagattcatacgggtgaccatgtgatcgtggagacggcaagagggattgaatacggttatgtggtgctgggaagcagagaggtgccggatgacaaggttgttcagccgcttaagtctgtaatccggatggcatcgaaggaagacgaggaagtggagttaaagaaccacgagaaggaaaaggaagcgttccgtatctgtaaggaaaagatccgaaaacacggacttcagatgaagctgatcgatgcagaatatacctttgacaataacaaggtgctgttttattttactgcggatggaagaatcgattttcgtgaactggtaaaggatctggcatcggtatttaagaccagaattgagctccgtcaggtcggcgtcagggacgagacgaagattgtgggaggaatcggtatctgtggaagaccgctgtgctgtcactcttacttatcggagtttatacctgtttcgattaagatggcaaaggagcagaatttatcgttgaatcccacgaagatatccggtgtctgcggcaggcttatgtgttgtctgaagaatgaggaagagacgtatgaggaattaaacagcaagcttcccaatgtaggcgattacgtgactacagacgacggtctgaagggcgaagtccattcagtcagcgtacttcgccagctggtgaaggtcatcgttatcacaaaggatgagaaggaaatcagagaataccgtgtggaccagctgaagtttaaaccgaggcggcgcaaggataaaggctctgtagcggatgcggagctgaaggctctggaggccctggagaaaaaggaagggaaatccaagttagatgataattgagctaaaaagtgatgaacggcttgatgatttacagaggaatggttatcagatcattcagaagaagaacgggttctgttttggtatggatgcagtgcttttgtcaggctttgcgagggtgaagcaaggggagaaggccattgatctgggaaccggaacagggattatcccgattcttctggaagcgaaatatgaaggcgaacattatacggggctggagattcaggatgagatggcggacatggccgcgcgcagtgtggcgctcaatcacttagaagagaaggtctcgatcgtaaaaggcgatatcaaggaagccagccggttgtttggtgcggcttcctttgacgtggtgacatcgaatccgccctatatgaacgatgcccatggactgaaaaatccggacctgccaaaggcgatttcccggcatgaagtgctctgtacactggatgatgtgacgagggaggccgcgagactgctgcggccgggcgggagattttatatggtgcacaggccgcaccggttgattgagattattacagcacttacgaagtataagctggagccgaagcggatgaagatggttcatccgtttgtggagaaggacgccaatatggttctgatcgaggctgtacgcggaggaaaatccatgattaaggtggaggcgccgattgtggtttatcaggagccgggggtgtatacgcaggagatttatgacatttatgggtattgaagggctggattagtggggctggtaaagctattataatggaaaagttggttaagcagatggaaaatcagaaaacaggaaagctgtatttatgtgcgacgcccattggtaatttagatgatattactttacgggttttgaatacattaaaggaagtggatttgattgcggcggaggacacccggcacagcattaagctgttaaaccactttcatattaagacgcctatgacaagttatcatgaatataataaagtggacaaggctaagtatctggtggagcagatgaaaaatggggtttcgattgcattgatcacagatgcgggaacgcccgggatctctgatccaggcgaagaactggtgagacagtgccatgaggcgggagtaccgcttacatctctgcccgggccagcggcctgtatcacggctctgacgatatcgggactggctacaaggcgtttctgctttgaggcatttctcccttcggataagaaggaaaaacagtggattctggaggaactgaaacgggagacgagaaccatcattctatatgaagcgcctcaccggctggtcagaacgctggaggagctgagggaggccctgggaaacaggagaattacgatatgccgggaattgacgaaacggtatgaaacggcatttcagactacgtttgaagaggcactggcggtctatgagactgaggagccgagaggtgagtgtgttgttgtaatcgaaggaaagagcatcagtgaaatcagggaagagcggatgaaaacgtttgaggagatgtctttggaagaacatatggagttgtatgagaaacagggaatagagcgaaaagaagccatgcgcatggtggcaaaggaccggggaatcagtaaaagggatgtttatcagcagctgatgaagtaaaaggggatcatggaactgctggttccgtataaagggccggatcgagaagatccggcttttcatatattggtcagatggtgtaataccgttgtatctagcgaagcagaggaagatatcctgtcagcttattcacggttttttttggtccgcagattgcaattccgagataggtaaatgatttttcctcggtggcagcggccttatcgataaattcatcataagtcttacagctctgtgccgtatcggagaaatccaccacggtcagatcggcgtactccggacggtaaagctgttccctcaattcccggatcttcgcaccgtcagcttttaaaacaggtaccggaaactgaatgattccccggtgggagcagccggtcttgtccgtgacgtcaggtcccacagtatccggcatctctttgccaagcgtgattcccataatttcggccgtgttggcgatcaggccggcggggagtgtctcatcgatgaccattacacatttttcattctgcaaatccatttgtattacttccttttctgtttgttgctttattttaccacttgtccggcgaaatttcttgaacgatatggcatattgcaggatacagaaaagggagattccttatctgcagtcaggtgtctctctttttccgtaacagcatttcagtttttcacttttttccaatcacggaaccagcccctcaccagttcgatatcctcctcacacaagccggccacatcttcttctgtcataccccgtaaatacatatttttcgctataatctgctccgtctctaattttcctttcagatttccttctcttaatccttccagttttccttctatccttccatcctcaatcattccccgtatcgcttcgcacatgttgattttttctcctttctctctgtatgtttcctttactgcttccagttccttcgatccggacatcacggtaattatatcgtatgcatcttcactcagctgctcaaagctttcccggtgtccaaacacataactgcgctctgcttccttatccccggaaaaacctataaacccaaatacttcccgcagatcggtctgaaagagatcggtatctttaaaacgtctgacctccagaacatgcagcctgtagttgttaaacagattcttcagaccttccggtatctcctcaaaattgataagcgaatacaaatcccctgcgccatcccacggttctgcaccgtagtacagaacgatggtaaaaattgcgtttaaccggtcttctttccgaaaaccgccgagaaactcccctctcgacaggcccctggcctttcgattctttttctggattctccgcatctgttcgtcgtatccggcggcatcctctagcatgacccggaccggcatcccgtaatgaaccagatcctgatgctccagagcgataaccgcaaagttcatccccatgactacccgctttaccgcatcacggtatttctggactgcaaaccactttctcactgtccccaaaacaccggtcaccaggatatttttttctaagatatccgagccggatactacctgttccccggaaaacacgtatccgttaatcagatccgcatatcggtcctcatcttcaaaatatctggccagggcaatatccttttttcccatacacatgtactcccgctttcaattttacgcaggaagagaagaattccataccataattatagagggcatctacgtaaaatacaagtgttggaactctttttactcttccttttgttattatttactttttattgttttactttgttttggatttcattggcgaagtgccggaattatttcaatctacattttgaacccctatatcattcaaaatgacacagcagctttgctgctttttatccggtgccggatagtcttgacttcatgtcagtgggggatatatgtccaccactgccgttaagtttgtttttggcgattcagccctccacctgtagcggtgggggaatcctcgcttattttgttgaaaaaattagataaaaaaattagataaaaacgaaatagcttcagggtgtaactgaatacatcaatttacagtatataatactgtattttagagtaaaaagcaagagaaattgatttttttaactaaacagcctctgcttatgcccgaaaccggaacaggaacggccggggaaagcgccagagccaaagtgggcggtgaggtaccgggctggctggaaatagtagcaacctgcagccactactcaaaaatttttcttgacaaacgaattgggattgtatagaattggtttgaatatcaaaatatttgaaacgaaaaatatcagagacaggtgaaaaccacgggttttcccatttacctggatgtgtgtatcacagcacgaatgggggaaattatgacgactagaattataggaacaggttcggctgtgccgaaacaggtggtaaccaatgacgatctggcaaagatcgtggataccagcgatgaatggatcaggccgagaaccggaatccgggaaagacggattgcagcggcggaatcgggaacaaccgatctggcagcagaggcggcgagaatggcgattgagcagtctgggattaagcccgaagagctggacattatcgtacttgcgacttcctcgggtgactgctgttttccaaatggtgcctgcgaggtacaggccgcggtcggcgcggtcaatgcggtggcgtttgatataagtgctgcgtgttcgggatttgtttttgcattaaacacggtacatagctttctgtctgcggggatctaccggacggggcttgtgatcggagcggatacactcagcaaactggtggactggaatgaccggagcacctgcgttctcttcggagatggggcgggagcagctgtcgtaagggcagagggcaccggagtcataggactgactatgggtgcggacggaacgaaaggcgatgttttaaaatgcggcggacgcactacgggaaatttcctgacaggaaagaaaccggaattaggctatatgtccatggatggccaggaagttttcagatttgcggttaagaccgtaccggaggcgatcaaaaagacactggcaggaagcggaaccgaattagaggaaattaaatattttattctgcatcagtccaattaccggatttccgaatccatagcgaaaagacttaaattaccgatggataagtttccagcgaatttagagcggtatggtaatacttccggagcgtcggtgcccatccttttagatgagctgaaccgcgaaggaaaattgaagccgggcgataaattgcttttagccggttttggtgcagggttaacctggggaaccactcttctggagtggtaattaaaaagactaatactttgaaaatcaaagtaattagataaatattaaaaagatgaatgaaataaaagatggaaaagtgaagaggagaatgaaaccatgttagagaagatgaaagaaattatcgcagagcagttaaatgtagacgcagaggccgttacagcagaatcttcctttaaagaggatttaggagcagattccctggacttattcgaacttgttatggcattggaggatgagtactctgtagagatcccttctgaagatttagagaagctgacaactgtaggtgcggttatggactatttaaaagcaaagggcgtggaaggctgatgaaaaccagaataacggaacttttaggaattaaacacccgattattcagggtggaatggcctgggttgcggaacatcatctggctgctgctgtatcggaagccggcgggctgggactgatcggcggagccaatgctccggccgaagtggtcagagaagagatccgcaaggcgaaagcgctgacaaacaagccgattggcgtcaatgtcatgctgctgagccctcatgccgatgaggtggcaaaggttgttgtggaagaaggaatcggtgtggtaaccaccggagccggaaacccggagaagtatattgagatgtggaaggctgccggagttaaaattattccggttgtggcttctgtggcactggctaagagaatggaacggtatggtgcagatgcggttgtagcagaaggatgtgaatccggagggcatatcggcgagcagactaccatgacactggtgcctcaggtcgcggatgctgtttccataccggttatcgcggcaggcggaatcggcgacggacgcggaattgcagcggcatttatgcttggcgcggaggcagtacagatcggcacgagatttgtagtttctgacgagtccattgtacatgagaattataagcagcgcattatcaaggcaaaggacatcgattcggcggttacgggacgttcccacggccatccggtcagatgtttaagaaatcagatgaccagggaatacgtaaagctggagcaggaaggcaagagcttcgaggaactggagtacttaactctcggaaagctgagagaggccgtacaggagggcgatatcacaaacggtaccgtcatggcaggccagattgcaggtatgatcagcaagactcagacctgtaaggaaatgattgatgagatgatggaacaggcagagaaactgctgaaccgctaattaaaaacggcggaacggacatggaaactgccggtcaggtaagtaaaaatgatggtacggatcagaaactgccggaccagcaattgaaaaaaggagttacggattatgagcaagactgcatttattttcccgggacagggtgcacagtactgtggaatgggccaggatttttacgagaatacaaagactggaaaagcgatctttgacatggcgtcagagctgcttggattttctgtgccggagctgtgctttgagaagaacgacaggctggatatcacggaatacacacaggccgccatggtaactgccagcatcgccatgatgcgtgttctggaagagacaaaaggcgtgaggccggatgtggctgcaggactgagcttgggagaataccctgcacttgctgccgcgggcgtgatgagcgacgcggatgcgatccgtaccgtaagacagagaggaatcctcatgcaggaggcggttccggtgggaatcggagccatggccgccatcctggcactggatgcatctaaaatagaagaggtattaagcgatattgacgatgtttccatcgccaactataactgtccgggccagatcgtcatatcgggacggaaagaggctgtggaagaggctaatgcaaagctgctggaggcgggagcaaagcgtgccgtcatgttaaatgtcagcggaccatttcattccgccatgctcgcggaagccggcagaaagctgggtgaggtactggccggtgtgacgatccatactccggttattccgtatgtcgccaatgttacggctcagtacgtgacgaaggcagaggatgtgagaccgcttttagagaaacaggtgtcttcctccgtcagatggcaacagagcgtggaagccatgctgcaggatggagtggacacatttatagaaatcgggccgggaaagacactggccgggtttatgagaaagataacaagagatgtaaaagtcattaatatagaaaaactcgaagatattgggaggatgccggaatgttagaaggaaaaacagctgttgtgaccggtgccggaagaggaatcgggcgggcgatcgcgcttcgtctggctgcggaaggcgcgaccgtcattgtaaattataatggttccgcgaaacgtgcggaagaggtagtaaatgagattacggcaggcggggggaaagcggaagcgatccagtgcagcgtatctgatttcgaaagcgttgcggccatgatggacggcgtcattaagaagtatggctccatcgatattctggtaaataacgccggaattacaaaggataaccttctgatgaaaatgtcggaagaggattttgacgcagtgatcgataccaatttgaagggcgtgtttaactgcatgaagcatgtggcacggcagatgattaagcagagaggcggcagaatcatcaatatttcttccgtttccggtgtgctcggcaatgcggggcaggccaattactgtgcggccaaggccggtgtgatcggactgacaaaatcctttgccagggaagtggccagcaggggaattacggtgaatgcggtggctcccggatttattgagacggaaatgacggaggttctgtccgatgcggttaaggcaggagcgacagaacagatcccgatgaaacattttggaaccactgaggatattgccggtgcggtagcatttttggcatccggtgcggctggctacattaccggacaggtgatctgcgtggacggcggaatggcgatgtaataaggagagagcgatatgaagacaagagttgtagttaccggtatgggcgcaattacaccgatcggaaatgatgtagagagtttctggaacggactgaaagaaaaaaaagtgggaatcggaccgattacccagtttgatacaacggattacaaggcaaagcttgcggccgaagtaaaggattttgatgctaagaactatatggacccgaaggccgcaaaacgtatggagcgtttctcccagtttgcagtagctgcctcaaaggaagctttggagaattccggcattgatatggaacaggaggacccgtaccgcgtaggcgtctgtctgggatccggtatcggaagtcttcaggctatggaacgggagcacaaaaagcttctggaaaaggggccgggccgtgtgaatccgctcctggtaccgatgatgatctgcaatatggcagccggtaatgtggcaatccagttcggattaaagggaaaatgttttaacgtggtaacggcctgtgccacaggaactcattccatcggtgaagcattccgctccattcagtatggggaggcggacgtcatggttgccggaggaacggaagccagtattgcaccgatcggcgtggctggttttacctctctgactgctcttactacggtgacagacccgctgcgcgcttccattcctttcgatcaggacagaagcggttttgttatgggagagggtgccggtgttgtcgttctggagtctttagagcacgctcttgcaagaaatgcgtccatttatgctgaggtgatcggatacggatcaacctgtgacgcttaccatatcacatctcctgcagaggacggaagcggagctgccagagcgatggtgaatgccataaatgacggcggtatcagaccggaggatgtggattatgtcaacgcacacggaaccagcacgcatcacaacgatttatttgagaccatggcaatcaaatcggcgcttggagacaatgcaaaacaggtgaagatcaactcaaccaagtccatgatcggccatctgctgggtgctgcaggcggcgtggaattcattgtctgtgtaaaatcgattcaggatggttttgttcacgcaacagccggccttgagacggagggagaaggctgcgacttagactacacgaagggcgagggcgtttcctgtgaagtaaatgtggcaatcagtaactctcttggatttggcggtcataatgccagtattttagtgaagaagtttgagcagtaggaggccggatatggagatcaatgatatcatcagactgatgcaggcggtttcagagaatggcctgaccagctttaaaatagaggaaggcaatttaaagctttccatcaggaaagaaaaagaacagattataaccgttgcgggaaacagcacggtgcagcagatggtaccggcagcaggtgcggctttggagatggcagcgcttccggcagcagagatttttgcatcggcggcagcaggcggaagtgaaggtgcgcagactgcaggaagcataacggaggccattgattctgataaaatcgtggcgtcaccgctggttggaaccttttataattcctcttcaccggatgccgagccgtttgtcaaggttggagatacggtaaagaaagggcagacccttggaatcatcgaggccatgaagctgatgaacgaaatcgagagcgagtatgacggcgttgtagaagccatcctcgtctccaatgaaaatgtggtggaatacggccagccgctgttcagaatccggtaaaggggcatataagaccgttactgacaggaaagaaaagttgaaaagagggagcattatgttaggtattaaggaaatcgaggaaattattcctcacagacatccgtttttgctggtagactgcattgaagagctggaaccgggtgtccgtgccgtgggatataaatgtgttacgtttgatgaaccgtatttccaggggcattttccgcaggagccggttatgccgggtgtactgagaattgaggcgctggcacaggtaggagcggttgctatcttaagtgaagaggcaaataaagggaaactggtattttttggcggaatcgacaaagcgaagttcaagtataaagtagttccgggcgaccgcatgcgtctggaatgtgaaatcatcaagcgcaaggggccggtaggcgttggcagggctgtagcaacggtcgacggtaaaatcgccgcttccgcggaactgacatttatgattggataggtggacgtcatatgtttgataaaatattgatcgcaaaccgcggcgagatcgcggtgcgtattatccgggcatgccgggaaatgggaatcaagacggtagcggtctattctgaagcggaccgtgattgtctgcatacgcttctggcagatgaggccatctgcatcggcccggcgccatccacccagagttacttaaatatggagcggattctgactgccacggtggcgatgaaggcggatgccatccatccgggatttggttttctctcggagaacgccagatttgcggaactgtgtgaaaaatgcaatattacatttatcggtccatccgctgagattatcaataagatgggcaataaatccgaggcgagaaagaccatgatggaagccggagttccggtcgttccaggcggcaaggaggctgtccacgaagtggaggaggcccgtctcgtagcggaaaaaatcggatatccggtgatgatcaaggcatcgtcaggcggcggaggaaagggcatgcgtatctccagaggtccggaagatttcgatgcaaatttccagaatgcccagatggagtctgttaagggattttctgacgatacgatgtatattgaaaagtatattgagaagccaaggcatatcgagtttcagattatggcggataagtatggaaatgtcgtccatttgggagaacgcgactgttccattcagagacgccaccagaaggtgctggaggaatctccgtccgctgctatttctgaagaactgcggaagcggatgggagatacggcggtccgtgcggcgaaggctgtaggttatgagaatgccggaaccatagaatttctgctggataagcataagaacttttatttcatggaaatgaatacaagaatccaggtggagcatccggtaacggagctggtatccggactggacttaataaaagagcagattcgtgtggcggcaggagagccgttaagtgtgtcccaggatgacataaaactcacgggccatgccatcgaatgcagaattaatgcagaaaatccggaaaagaactttatgccgtgtcccggactaattacgaatgtccacgtaccgggaggcaatggagtccgtgtagacacccacatttataatgattataaagtcccggcaaactacgattccatgctgatgaagctgatcgttcatggaaaagaccgtacagaggcgattgccaagatgcgaagcgcgctgggagaattgattatagagggaattgagacaaatgtagactttcagttcgatatcctgagtcacgaagcatatcaggctggagatatagacacagatttcataccgaaatactttgcgtaagcaatgagcagtgcacccagatgaaatttcgtattctcagatgcaagctcgcttgtatctgagaatgcggagtttcatctgggtatggggcgaatgcccgacagccatgggacgccaaaggcgttccatggctgtccactgcggatgtatcggcctaatcacctcacagctgcctctccctaatcctcatttttctttcttaaaggagcaaaaaccatgttaagagacatgtttaaaaaaacctacacacttatcgacagcaaatataaaacgcccgacaaggcagacgaaccgaacatcccggccggtctgtggagaaagtgcaacaaatgcggtcagcctatttacgcagaggatgtcaaaaacaatttttatatttgtccgaaatgtaaaggttatttccgtgtccacgcttaccgcagaatcgagatgactgcggatgcaggcagcttcgaggaatgggataaagaaatggaatttgccaatcctctggattttcccggttacgaaaagaaaatcgaggcggccagggagaagacgaaattaaacgaagccattgtaaccggaaaatgtaccataggcggcgagcctgcggtcttaggcgtctgtgatgccagattcatcatgagcagcatgggtcacgtggtcggtgaaaagattgcaagggcggtggagcgtgccacaaaggaacagcttcctgttatcatatttgcctgttccggcggcgccagaatgcaggagggaatcgtgtccctgatgcagatggcgaagacctctgcggcattaaagcgccatcacaacgcgggacagctgtttatcagtgttctgactgatccgacgacaggcggcgtgacggccagctttgcgatgctgggcgatatcattctggcggagccgggggcgttaatcggctttgcgggtcccagggttatcgagcagaccattggccagaagctgccggagggcttccagcgttccgagttcttacaggaacacggctttgtggataaaatcgtaaagcgcgaggacatgaaatccacaattgccgccattttaaagcatcatcatccacatacatgggcacaaaacggtgaaaaatcattttcccctgtggataactgtttaaaaccagaagccttcagtggaaaagataaaaaggtgaaaaaccgcaggaataaaaagacgccatgggataccgtacagctttccagaagcgcggaacgcccggcagccagtgattatatcaatgcagtatttgatgattttatggaattccatggagaccgttactttggcgacgacggagccatcgtgggcggcatcgcctccttccacggcatgcctgtgaccgtcatcggacaggaaaagggaaagaatacaaaggacaatatcaggcgcaatttcggaatgccatctccggaaggatacagaaaagcgctgcgcctgatgaagcaggcggagacctttggccgtcccatcatctgttttgtggatacgccaggtgcgttctgcggactggaggcagaagagcggggccagggagaggcgattgcccggaacctgtttgaaatggccgatatcaccgttccaatactttccatcgtaatcggagagggcggaagcggcggggcgctcgcgatggcggtggccaatgaagtctggatgctggaaaattctatttattcgatcctgtctccggaagggtttgcctccatcctttataaagacagcaagaaggccagcgacgcggcgcgcgttatgaagattactgccagggatttaatggagctgggactgatcgagagaattattgcagaagaggagccggcttcggcagagaacctgacaactttagccggggagatggggaccgccatggaggcgtttttcgataaatacgcagccatgaagaaagaagaaatcgcctccgggcggtatgacagatttaggagaatgtaatgggaaatttaaaaccattggtaataggagaactcgtagttccgaagccggttattcagggcggaatgggagttggaatcagcctctcatccctggcaggcgcagtggcaaaagcaggcggcatgggaatcatttctaccgcacagatcggttttaaggagccggattttgcggatcattcgctggaagcaaacttaagagcgattggtaaagaatttaagaaggccagggagattgccccggaaggtgtgattggatttaacatcatggtggcaacgaaaaattatgccatgtatgtcaaagaggcgataaaggccggtgcggatattattatctcgggagcggggcttcccgtcagtcttccggcatatttagccgaagcggcggcagaaatgaaatcggccgggcttggagagacggtaaagacaaaaatcgcaccgattgtatcatctgtcaagtcagccatggttattttaaagatgtgggaccgcaagtttggacgtgtgccggatctggtggtgattgagggaccgttagccggtggccacctgggattttcacgagagtccttaactgagctgggagtggatacgccggatgtggagcacacctatcaccaggatgcctatgatgaggaaatcagggggattatccgtctggtaggggaatacgcggagaagtatcagacaaagattccggtggtgacggcgggaggcatctacagccatgaggatgtgatgcaccagattgatttaggagccgacggcgtccaggtagcgacccgctttgtaactactgtagagtgcgacgcgcccgaggaattcaagcaggcttatatccggtcctccaaagaagatatcgtgattacaaaaagccctgtgggcatgccggggcgggcaattcataacgcctttttaagcggtgtcggccagactccgtttaagctggagcactgctaccagtgtctcgagaaatgtgataaaaagacgattccttactgtattaccaaagcgctggtaaattccgccgaggggcatacggaggacggtctggtgttctgcgggagcaatgcgttccgggcggagcggattgagacggtggatgaggtaatgaaatcactgctgggtgagtaagagagaagaactggtttttcagattgagaatataaggccgcagagaggaaatatactttctttctacggccttttttgagtaattttagagttatacaaaaaacagcttcatataccagatgccggattctaaattagctgatggtataaataaatttccgcaatcataaaatattattaaaatcatcacggcggttaaaatggtatgttaaattatctttgggcgtttatgatggtggcaggtgttttgtgggcggcatttcatgggaatttaagcgcggttaccgatggcgctctctcttctgcaaaagaagcggtaatgctttgtattaccatgctgggggttatgtcattttggagtggaattatggaaatcggacagaagtcggggcttattgaacggctgtctcaccggatgggcccagtgctccgcttcctgtttccaagaattccgaaagaccatcctgccatggaccacattgcaaccaatatcattgccaatatcctgggcctgggatgggcagctacgccagccggcttaaaggccatggaatccctacaggagctggaggaggagcggagagaggaagaacagacgggattggataaaaacagtctggagagctctaaaaagcgtcaggtgaagaaaagaccacgcgctatgccgccgggaaccgccagcaatgagatgtgtacattcctgattattaatatctcatctctgcagcttattccggtaaatatgatcgcatacagaagtcagtacggcagcttaaatccggctgcggtggtggggcctgcccttgttgctaccctgatctcaacaatcgtaggtgtgatatactgcaggctgatggaccgctgacctgcagtattacagcagcgagacagtagactgccgctcaatcagttccacatccagctgcacatgcggctgttccacatggccggtgcggagtttttctaaaagcagcttcatggctgtttctgctttttttgtaacattttgtgatatcgtggtcagcttcggcgtcgtataggtggatacggaaagattatcataaccgatgacggacagatccgtggggatccgaaggcctgcgagtctggcgccttccataacaccgatcgcacagatatcagcggtcgtgacaacagcagtaatcttatggccgctgccggcaatggctttgccggcggcaataccatcatcataggacggggaataggaaaagatgcagtcgggatcacagcccaactcactttcctccatggcggcccggtaaccgttaaaacggtcagttaacagcggattgtcttcgcagtatgcagcgaaggcaatttttttatgcccgcggctgataaggtagcgtgttgagagataacagccttttttgtcatcagagtatacgtttataacctcaggattggtgatccgggcgtcaaagagtacaacgggtaaatgggtttcttcaataatggcattgacagagtcctcaaaacattcacccagcaggggatagagaaagataacgccgtcaacgttccagttgcgcatcagtacagataagtcttcctgggtctgaacagaacggatcatgacgaaatatccattattgcgcagttcccgttcaatcactccgatcatggagctgacataaggattgtcaaaatagctgacaggggattcctcggaatctaaaggcacgatgacgccgataatgtgagatgattttacagtcaggcttctggcggacagattcgggacgtaattgtattcttttataattgtatttactttttctatggttgcagcggatacacgactgtgtttcccattaatgacgttggatacagtcatcatgctgacgccggctttttctgcaatatcttttaaagtcatgttcaatacccctttgatcaaatagtttaacgataaatatattatacgcgatcaaaagaagaaatgcaatcatatttttatgactgttagtaatattgcctagtttaatgtggattaaactatttaaacatgacaaaataagaaaataatgttgacattgctttcgcgtggtggtattctcttatcagatttagcgctaaactatagcgcgaaaccaaacgtaagccgttttctttaaaaaaagagagtggtcatggaaaaagaataaggaggagtttgaaatgaagaagtgttggagaagttgtagaacggctgttttggcagtgacagcggcagtggcggtgacaggccttatgggatgcagcggagcagattcgggaaatggaaaagatgccgggagcgcggctgtttctgtgccgacagagccgtttggagatactgtaaagtatgatccggctcagccggtcaacgacggaaaagacatttccgtagaattctgggaatggggcagtgacaacctgtttcaggagctgattgacggttatacggcgatccatcccaacgtatccatcaagcttgtcaataatccatgggacgattactggacaaagctccccctgtctctcggcggcaccaatggcccggctatctttaatgtacataacagccagcacgaaaacctgattcattatatggctccctatgagatttcacaggaagatttagacgctgattttaacggggtaagcgcccatgtgattgacggagatgtatactatattgactatggaattatgaccggttccgtctattataataaggacatgtgggaggcggccggacttacggacgcggatattccaaagacctgggacgagatgcgggaagtggcgaaaaagctgacagtcaaggagggaaacagttttgtacaggcggggcttaacttcaacggaaccttccaccagaactaccttcttggactgaactatcagctgggtcagaatctgtttgaagaggataaaaagactgctacagtcaataatgacgcgatgaagaaggttatgcagcttctggtagatttgtatgaggttgacggggtcggttcgaaagactttggagccgagggcgcggacagcttcggacagggccagtcagccatgaccattcagtgggggcacttcaataatacactgaagacaaatttcccggatatcaatttcggcgtctttgagattccggtatttacagagaatccgtacgcttataaccgttataacggggaatcaaccttcggaattaacaagaacgcgccggcagaccagcaggcggttgcacaggatattgtaaagtatttcctggccgatgatgagatccagaagaaattcaatattgccatgagcacgttcccggctaagaaatccctggctgatgatgcggatattttagcaaatccatccatggccgtactggcagaccacattgaccgctacatctggccgggtccgatgcctgccaccatggaaacttcgctgaagacggcgggagagaatatcttcttcaatggaatgtccgtcgacgacgcgctggccgaggcggaggagacgatccacaatgatatgaaaaacagcagttttgaatccgtagaagatctttataaattcgcagagtaggaagcggccggcggggatgctgccaaatgaaagcttaaaagttgcatccccgcatgaaggagggaaaaccatgttccgaaaatcaaatcccctgcagagcaagagtgaaattctgctccgcaatctcacggtaaccggcatgatcattttttacgtggtatttctgctggtgcctataggaattgcctttgccggaagcttccatgaatggaatccgctcagcggtatttaccgctttaccggcatagaaaattatgtgaatgtatttaccagcgcactctttggaaaagccatgctcaataccctgatcttttcggttgtggttatctttttccgggtgggtttaggactcgccatagcagtggccatctattcgactctggtcaaacataagagctttttccgcgctgtttattacatgcctgttgttacgcctatggtagcggtggcttttgtatggaaattcctgtacaatccacagattggctctatcaaccagattctggggctggatatcaactggctgatgaatccgaagacagctttaatcgcaattatggttatgacgatatggaaagatttcggatatgcggtcgtcatgtttatggcgggactctattctctccccagcgatgccatggaggcgacaaaggtggatggtgcgtcctcctggcagacttttaaatatttaacgcttccgctgctgaagcccatgacattatttgttgtgattacatccattatttcctatattcaggcgtatgttcaggtgctgatcttaactgagggcggaccgggaacggctacttacttatcctcctatatcatctataacgaggcgtttgtgaaatataatttcggatatgcctcagcaatgtcctttgtactgtttgtcatcaccgcggtatttacctggctgtcgttccgggtatccggggattcggaataagggggaactatcatgagaaaaagggttagcagtattgttttaaacatggtgcttctggtgctgggcgttgtgaccgtctatccgtttttatggatgctggcttcgtcttttaagaagaacagtgagattgtggctctgcatcagacgtttctgccgaagctgttcacgatctccaattacatatccatgaattcgcattttaacttcatgcggttttttgcaaacagtatttttatcacgctggccattacagtgatcgtgatttacaccagtacactgtgcggttttgtactcagtaaatacaggtttaagggcagggacgcgctatttggccttgtgctggctaccatgatgattccgtggtgtgtcacaattataccgagatattccatgatcaaggcgtttggatggatgaattcttatgccgcgttaattgtgccggcgtcattttccggctttggaatctttatgatgaagcagcatattgcatccgtaccggatgaaatcctggaagcggccaggattgacggagccaatgagttttatatttttcacaagattgtcattccgatggcgaagaacggaatctcaagcattgcaatttttcagttcttatgggcgtgggaggacttcctgtggccgtacctggtgattgacgacagcaaaaaacagcttttgtctgtaggattaaagatgtttaacggacagtattcgacggattacggcgcgctgtttgccgcaaccacgatatctattataccggttctggcggtctatctgttcttccagaaacagtttatcgcaggaatcgccgcatcggcagtaaaggggtaaagacagaaggagaaaacggtgatgagagatattttcaaggttaagacgaacccagcagcgaccggggaaaatgtaatagcgggtacctgttaccgcatcagtgtattgacggaagggctgattcgtctggaatacaggaaagacggctgctttgaggaccgccccacgcagatggcgtggaaccgggattttaaaccggcgggttaccgtctgataaaaacggaagacggaatcgaaatcataacaaaacgggttcatatcatttataatgaacaggaattttcacggcacggtttaagtattcaggtattgggaaacttgagcgcctatcacagcatctggcattattctgaagatatccatgatttgaagggaacggccagaacgctggatgaggtggacgggaagacagaactggaaagcggcgtactttcgagattcgggtattccgttattgatgacagcaggagcatgatactgacggaagacggctgggtagaggcacggaagggggaaggggatgacttgtatttctttggctacggccatgattacctggactgcttaaaggatttttattacctcaccggaagaactcccatgcttccgaggtttgctctcggaaactggtggagccgatactataagtataccgaagaatcttatctggcgttaatggaccggtttgagcaggaagcgattccgtttaccgtggcagtcatcgacatggactggcatctggttgatgttgacccgaaatatggcagcggatggaccggttatacatggaacagggaattctttcccgatccggagcgttttctgcagacgctccacaggcgtggcatgaggacgacgttaaatgtccacccggcggatggggttcaggcttatgaagagatgtatgaggatatggctaaagatctgggagtagactgggagcatgaagatccggtgtgctttaatattacggatcctgattttctcgaagcgtattttcagtaccttcatcatccttatgaaaaaatgggagtggatttctggtggattgactggcagcagggggggaacagcagaattcccggactggatcctttgtggatgctgaaccattaccattttctggacagcgggagagacggaaagaggccaatgacgttttcgcggtatgcgggaccgggaagccaccggtatccggtgggattttccggcgatacgatcacaacatgggactctctcgaatttcagccgtattttactgcgaatgcctctaatatcggttatggctggtggagccacgacatcggaggccatatgagaggctataaggatgacgaaatggaggcgcggtggacgcagtttggcgtgttttctccgattatgcggctccacagttcctgcagtgagtttaacggaaaagaaccgtggcggtttaagaaggagacagaggctgtcatgggagatttcctgcggctgcgccaccggctaatgccttatttatatacgatgaatttcagagccagctgtatggcggaaccgttaatcatgccgatgtactataagcatccggaagcggcggaggcttatgaggtggcaaaccagtactatttcggcagtgagatgatcgtggctcctgttacggcgccaagaatcgggcagatcaatgaggcaaaggtgcgtgtgtggattccggaagggacctgcattgatttctttaaccacatggtgtatgaaggcgggagagtcatggaactctacaggccgctggaagcgattccggtgctggtgaaggccggcggcgtaattcccatgacagacgatattggagctgctgaagtgacggcaaacccggagacgctgcgaattcggatcttcgggggtgcggacggtgcatttaccttgtatgaggatgacaatgaaacctgtaattatgagcagggtgtttgcgtgactaccgatatgaagttcgactgggaaggggaaaaacagtcctttacaattgcttcagcggtgggggcagtggagttgataccggagaaaaggaattatattctggagtttgctgctgtgacggatgcagaatgcagtgtgacgctgaatggcggggaaaccgcatgcagaaagtcttatgacgcggacagcagaaccctgactctggagatcaatcaggttagtactgcaaaaacgctggttgtaaggtttgagacgagcatgaagctttctgaaaacccggtggagaaacttgtttttgattttctgaatcaggcagagatcgagtttgagataaaggagatgttgtttaggcggatcagggaagggaagagtttgaaggtctttctttcggagctgcaggcgatggagattgatggggagattaagggggcgttggtggagattttgacggcgtgagcgctaaaaatactcgggaaatgaataaataagacaatcaaaaacacttgaaaatcagccccaatcaacctatactaatcatataaacatcgtgtcgggtcagcagaagaggaggctggaatatgaacattttagtagtaacaggaagcccaagaaaaggcggtaacacggagatactggcagatgcgtttgcccaggctgcgaaggagagcggccacgaggtggccgtacgaaaattaagccggctgaaggtaggcccctgtctggcctgcgagtactgttttactcacggcggcgtctgcatgcaggatgacgctatgaacgagattttacaggatgtacataaagcagatatgctggtgctggcatcgcccatctactggtttgatatttccgcacagatgaaatgcttcatcgaccggctgtatgcgtgtgccaaaacagggtttcacatcacttcagccgccatgctgctggattccggatcgccgggggtgtataatgcggctcaggcccagttaaaggacatctgcgattacttgaactgggagaataaaggcgcgtttacggcacctggtatggtggagaaggggagtatctatcagtccgctgcactcgcccaggtaagaacctttgcagagaatctgtaacttgaaagaccggctttcctatgaaggccggtcctttttttactggtttcggttatcgtatcagcctgattcttccaataacaggaagttcccgcttctgtccctgaatgacagatacgattcccataatggcaaaaatcaggacgacacagtttaaaagatcgccgattaaggtcatgtgcggaataaaagagatacagccgaacacgatatttgcgatcagcagaaccagtccctggtttaaatgaaatcggacaaatgaatcttttccgggaataagagccggaataagaatcaggatacttaaataggagagacaggcatagagctttgaatgcttcatgatacaaccttcctttcgtggctgagtgatttgttctttgtttgtatgtgatcccggatgcagtgtacgcctttatgggcctgcatgcctcccaggcattcccggttgcagccggtacatttgaatagcttggagacggagccggaagcggttttcttcacccattccggatctgcaatcagctggcggctcatggcggccagttgaattctccctgatttcagctgttcttccacgaaatccggagaacagaggcggcctacgccgcatacgggcagatcagtcaggcggcggacctcatcacagtaggataagaagcagccttccccatgaaaatacgggtgtgaagccggcgggatggtgtcacttaagtcagaatgattggccagggtgacatgaaagctgtttacgcctgcctgctccagaaggggaacaaagaccggaagctcttccatcagaattccggcattcccgtaatggggattttcctggcggaccgcaagcttaaaatcaatggttatatccggaagggctctgcggactgcggcgacggcctcgcaggcaaagcgggctctgttttttggacttcccccgtaccggtctttccggcggttgtatatggaggaagaaaagcttccgcacatccggtcgccatggatttgaatgacatcgaacccggctttttttgctaagaccgcagccttgccaaagccccggatgatttcagagatccttttgtctgtcaggccggtaatataatcggataccgtattgtttaaaagaattctcagctcattcggcttgatttttccggtaatcatgccgggcagatatttaatcaggcggctgaactgcgagtctgacatatgcagctgggcggcggccagggcaccgttttggtggatggtttccgtgatcctgcggtaacggagaaatccttttctgctgtacaaggacagaaacggactcttcagaacgggcacatccccgatgataatcatggcggtgccgccgcgggcaatggcgcccagtttttccaagtactcctcttcctttaagcccatggaggtgggggcaaaaataattctgttttttaatgtcacgctcccgatggtaaaggggctgtttatggtctcgtacatggttcgcttccctccttacggtcttcccggctatcagtaacaagacgaagcagttccaaaagctgttctctctggatatcgcttaagtttttacagacggcctgatcccagtcataaagcagggtatggagttctttgaaaatggtctccccctgcgcggtaagcgttaagtggaaatggcggtgatccgcagtgtcacgggtacggactgcatagcccagctgctccagttttcctatacaacgggttacgtgtccgttgtctgcttttagaaaacgggctgtctcgctgagggaacatccgggatttttaccaatataaataatataatagaacagcccgtctgtaaggccgtactgtttaagccgtgcatcagaataggcatttaaatcttttctcagggctgtaatatagtaagcaagaaaatccggcatggggtgacgctcctttctctgtaaacaaaaaagtatttgacttagtcaattatattcttgatagttgactttgtcaaatactttttatattacatttccgcctgcggattgttccggtgagccgcccttaccagtgaacggcattcgcagattttgtcatgcaggagcttttgctcttcaccggaggtaatctggtacagtttttcttcaataagctgggactgaatgaccaggtggtaataaaactgtgtatcggttacaccctggctgcagagctttgacagcagctttgatgcaaaatcgtattttttcagcagagtcccggcggcggtactgcggtgataaggaaagagcaggcagttggcggcgtaggcaattacgatcccggcaattacatatgccagacggataagcagcatacggctgaccggcgcccatccgaatgcgctcataaacacagccccgcccagtgcgccgaccgtggaacaggtaaaggtacccttataatcggtaaaataaaagctcagatagcccgacagcatcataatggcggttctgccagtcggagacggaaccagagaatagagaatcacactgaagatacctccggctgcagtagcaaagagacgtttttcggccttctgcccaacgtcatccgcgtatggaagcgagacagaagcaagggtgaacagaagccactttccgtgggggagtttcaggctctggaccagcagtgtggcgagtgaaagcaggagcgcgacgcgcagggcgtaaatcacacgcactctgcttacttttaaagcagcctgaatccggatggaaagggaaagcagggtagggcgatagtgggattttttttcaggatctgccatatggacaagatggttcctgatatatttcaggctgttgtaaaactcttcctggcgcaggtcttctggatctgtaataaaatcagtccgcgcaatgagatgaggggctgtggtcttcttattgacatatgactcaaagtggctcagctgagtgagcgtcttttccagcatatcccggcagtcctccggatgctctgtctgggacagcagtatgagaaggtgttccagaccgcgtccggaatccactaaggcaaagctggcatcggagatgcacagttcccgccgccttcggtcatataccatacagcttaagcggcgtacattctttctgatatcctccagaccttccggtgcagcgctgccggataagagacaggatatgtactgctttgcctcccggatcagagtgagaagcacatcggtaaccgtttcttcggcccggtttcgccccatcacaagctggtacagaatgatgcagacggctcccgtcaccatggccataatccgcttcggaagctgttccgggctggagggggagatgaataccagaaataagtaggacagaatatatggaaaatacagatgtccggaatattcataggtatatgtatacagaataaaataaatcactgcaaagttgactggcagagcggcccacggatttaaggtggagaccaggcaggcggagactgccatcagcaccagcacggcggcctgtgcaaacagatgctttaagggggtagaagttagatcgcgggccatggaggccgacatcatgatcgtaaagatgactccaacgatggaattttctgctccaaatagtttctgaaacacattgacgtaagcgataataaacagaaatgacagagtggcgaatttcagatttttccgtatccggtcctgaaccaccggcaggatggaactttttttgggtattgccatagataaaaactcctttctttcgaagatatatggtatcacagaaaaagctgcagtgcaataacgtgccatttcttaaaaatttatgaagaacaggatgagaccggaaaagaaacaggccgcggctgttatcctataaacggataaccggagccgcggcctgtatcatcaccgtacagactttttggtttgattctgttttctgtatttcagctgcttatgtaaacctcagaggtctgttccgccggattcctgtcaggagagggattccttatactgcttcagagctttcgccagctgatccgggcaggaggtaggtctgggaccgcagtggattccatcgagacgtttgatggcctcatctacgtccattccttcaatcagacggccaagaccctgggtattaccggaacatccgccaacaaagcgaacattggtaagcttgttgtcctgaacttcaaaattaatttcctgtgaacatacgccgtgtgttttataaatcatgtatcattcctccacatttcttctatacttttatttgttttcagccttgttatcggtttctgcatttttacaattatacagaataagggaacagattgtcaatagcggacgacacggaaaccctcttgcaaacagggcgaaaacagttataataatcaatatatgcaaagtatcccggaagggaacaggaaaaggaggcgctgtatgttaggaattatcggagccatggatgtggaagtggcggaagtaaaggaagcaatgcagggtgtggaagtaaagaccatggccggcatggagttttataaaggaacactgaagggaaaagaggcggtggtcgtccgttccggaatcggtaaggtgaacgcggcggtgtgtacgcagattctggtggatcactatggagtggatgcggttatcaacacggggattgccggatctttaaaaaatgagatcgagatcggcgatgtggtgctctctaccgatacggtgcatcacgatatggatgcgtccggattcgggtatccggtgggacagattccgcagatggaagtgttctcatttccggctgatgaaacgcttcggaatctggctttaaagtgctgtaaggaagtgaatcctgacattggagtttttaccggaaggattgtttccggggatcagtttatttccgatcaggttaaaaaagactggattgcggaaaattttggtggatactgtacggagatggaaggcgcggccatcgctcaggcggcatacttaaaccacgttccattcttaattatcagggccatctcagacaaggctgacaacagcgcaaccatggactacagcgagtttgaggccagggcggtacgccattccgtaaatctgattttagccattgcagaaaggtattcatgttaagttaagaatcgaatcctgacgggatttgacgaacgattctaggctctctcatcttcccaaaggaagtttcggtggttataataatcctatcaccggaacaaccgggaagaaaggggagctattattatgctggaatttttacagacaggcaaagcgctgtacgtgcttgcagccgtatgcggccttggggtcgtgaccagatggctgacacgtaacctctacaaaagattaattaaagaaacggacaacatgtcactgacgaagaataagaatcttcgtgcatttaagcagaagacagaaagcagctatcagatgaatcaggggattccgaaaatcaggccttacttagagaggcagatgtatgatttcagatttatgggcatgacgcttaacggatggaacactttttccaatcagatgacgcttctttgtttcctcgcaggaggggcggcggcgttcggcgcatactggtatcgtaccgatccttattacatagtactgtacggctccatgggaattctggcagggctctttacaatccttgtggaccacggagcaggagtcgcggacaagaaacagcagctgtttaccgcactcgataattatctggaaaatacgctgatctaccgtttggatcaggaacgagatgaaacacaggcaatatcggggcctcatatggaaacccgtgaaaatatccggtcgatctatccagtggcagcaggtactgcggcaggacaggcagaagagccggagaaacaggaaagtgtgcggggaaagcagagaaacaggacggagcgcatgaaaaaccagctgaaggcggaatcgcaggctcgcagacagaacagcggccggtccgacggaaggcagagagatggaagacagggtggtatcatacaggaaacgataagtacagagtccggtatgagcccggcagctgatgagatgcagctgggagccgggaatcagaatatggtgccggaaatggcacggagcggtagcgggccgtcagaaatggaaggatccatacgggatgtggactatttaaagaagagtctggaacagatagcggccagccgcgaacggggaagaaccgtaaaacagcaggaggactggctgaaggatttgaaccccgaggaattgaagctgatcggagaaattctgcatgaatatctcacgtgaacatttggaagggaaaggaaaattatatcgcaattggaggggatttatggtatactgttcctgaacaggcattctaaaacctgaaacaaaaggaaaaggagaatgatagagatgggaaaagaagttgtatttgattattccagagcggcaggctttgtctcagcagaagagatggataatatgaaagccacagtgatgtgtgcaagagatgtgctgatggcggggtccggcgccgggaatgatttcttaggttggattgatcttcctgtagactatgataaggaagaatttgagagaattaaaaaagcggcggcgaagattcagaatgattctgacgtacttctggtagtaggtatcggcggctcctatttaggtgccagagcggccattgagttcttatcccacagtttctataatgtattgccgaagggaaaacgcaaaactccggagatttatttcttaggcaacagcatcagcagcaaatacatccaggatttgaaggatgtgctggaaggaaaagatttctccgttaatatcatatccaagtccggtacaacgacagaaccggcaattgcattccgtgtcttcaaggagatgctgatcgaaaagtatggccgtgaagaggcgaataagagaatttacgctacgacggacaaggccaggggtgcacttaagaatctggcgacagaagagggatatgagtcctttgtcgtgccggatgacgtaggcggacgtttctcggtcctgacagcggtcggactgcttccgattgccgtatcaggcgctgatatcgataaattaatggaaggtgctgcagcagcgagaaaggcggctctggagactccttatgagtccaactccgcattacagtatgcagcggtgcgcaacatcttacatagaaaaggcaaggccgttgagattgtggctaattatgagccgagccttcattacgtttccgagtggtggaaacagttatttggtgagagcgaaggaaaagaccgcagaggtattttcccggcagccgttgatttaaccacggatttacattccatgggccagttcatccaggacggttcccgtgtgatgtttgagaccgtgctgaatgtcgaagaatccccggctgagattctgcttcagaaggaagaagtggacacggacggcatgaactatctggcaggcaaaagtgtagatttcgtcaacaagagtgccatgaacggcacgatcttagcccatacggacggcgatgtaccgaacctgatggtaaagatcccggaacaggacgaatactgcctgggtcagttattctatttctttgagtatgcgtgcggcgtcagcggttatattctgggtgtcaatccgttcaaccagccaggcgtggagagctataagaagaatatgttcgctcttcttggcaagcctggatatgagaaggaaagagaagaattgttaaagagattataggacgaaaactgaatagggtatgaatagatagtcaggacccgtattccacagctgggtgagcagttgcggagtgcgggtccttttctatatccatatttttccctgattatacaaaaaaattaatatgttcattaaataagtgtatgatataataaaagcatacatcagaactggcggagtatctgcagacgattgggatctgtgactccggtgcagtcagcaagcatgacggatctataggagtggctgatatttgcggatcaggggaagagaagtggaggggcggatctcatgaaaaggaaaaaaatatggaaggcagtggtgctgtccctgactcttgcctgcgtagtatccggttgtgcgcaggggaaaaagcatgggctggatccgaaaaaaccgactgttattacagtctggcatgcatacaatgcttttgcaaagacgaaatttgatgaaaaagtaacggaatttaacgagacgaaagggctggaactgggaatcgtggtggatgcctacggttatggttcgagtggtgaactggacgatgctttgtttaactccgccaataagattattggatctgacccgcttcccaatgtgtttacggtatatccggacagcgcataccggctggatcagctggcgcccctggtagagatggaggagtatttcagtgcggaagagctggagcgataccggccagagttcttaagcgagggcgtctggggagaagaaggcagacataaactgatcccggtggcgaaatcgacagaacttttatttgtcaacgagactggctggaggaagttttgttcagacacagggattacggatgaggcgcttggcacatgggaggggctggttttggcggcggaggcgtattacagatggtccggcggacagccgtttctgggaatgaacagttttaatgattttgctgtgctgacagcgattcaggatggagcggatcccttccccacagatgggaaaagcgtttcgtttgcctattcgaaagagacagcgaggaaggcgtgggatgcttattacgttccccatatgatggggtggtataaaagcagcgtatttaatcaggatggggttaagagcggaagcctgcttgcctacataggctcgtctgccggcgccggttactttccaaaagaggtgatcgtggatggagagaatcagtatcccatagagtgcagcgtgcggccttaccctacgtttgaggggggacacgggtatatgtcccagaggggggcggatatgggaatattccgttccggggaggcagcagagtatgcgtctgccgaattcctgaaatggtttacggattctgaacggaacatcgagtttaccgcgtcgatcggatatattccggtggaaaatgcggcattgtcatccatagaagagctggaaaaatttgtacagaagagtgataacgcggaggcggtaaaaaagagtgtgacggcggcccttgaggcgatgcaggaagggaagttttatgccagaaggccgtttgagaattcctatgaagtgaatgaactgttttcacgctctctggagaagaaggtggagcttgatttaaatgagcttcagaaccgggtggagaatggtgaagacagagggacggtgatatccgggtttatggacgacgggaattttgaagcatggtatcagaacttaatgagagaaataaatggagagattaatggagaaataaatgaataaaaaggtgagaagtgattcgatcgcctttaaactggcgctcacatttgtggcgtcggttgtgattcagagtctgttgatgacggctcttctgagtctgggcggtgtgatcgggcagtcccgggagaatgcgtaccagattttttcggagaaagtgaaaaaccgttcggtaaccattgaaggggagatgaaaaatgtctggacgaattttgaactttatacggatgaactgagccggtattttacggaagctgaaagagatgagaacggggaactgctggaaaaggaagatctgcttaaggcggtcgcccctacggtactgaatgcgctgtactatacaaaaacaacgggggcatttttgattttagacagggggacggaggaaaccgagagttatccggccctctacttcaggaatgccaatccgaaccgggttgatgaacgcaattccaatacctatcttctggcaggcccctgggatgtggctcaggagactcaggtagtgacggatgctgcgtggaagtaccggctggaactgacggatgccagccgtgcgttttatgaaaagccattcagcagtgtgggactggcaggtgatgaaaaactgctgggctactggtgtccgccgtttcgcctttatgaagggggcgaggaggtggttacctattcgatacccctggtagaccagcggggaagggcggtcggtgtattcggtgttgagatatcgctgaattatctgtataagtatctgcctccgtctgacctgctggcggtggattcctacggttatgtgatcggaatccgttccggagagaacgacgggatccgtccgcttgtcacacacggtgctcttcagaaacgtatcctgcaggctgagagcccgatggagcttaaggcaaaagactctgagaatggtatttttctattgggaaatcacaatggaaacggtgcggtctatgcatgtctggaacagatgggaatgtattacaacaataccccgttttcgggagaagagtggtatctgattggcttgatggaggaagatgcgcttttgcagtatccgcatcgaatccaggagatcctgttctattcgtttcttgtttcgctttgcgccggcgcaggaatcgcggtgctgatcagccggtggtttacccgttattcacgacttctggaactctccgaggtcccggtgggggtctttgagatggggaccaaaggcaatcgggtttacatgacgaaccagattccgcggctcctgggattatcgaaggatcaggaacggactttttgcaggagtcgtaatgaatttcaggcatttttaaagaagatttgtgagaagcctacagaggatgaaaatatattctgtctggaacagccggaaggaaaacgctggatccgtttaacgctccgggaggacggcgagaaaaagagcggagtcgtggaggatgtcacagaggaggtccttaagacccagtcgctccgagcggaaaatgacctggatggcctcactagggtgctgaacagaaaagcattcgaacaccggcagcagaaatgggagggaatgctggagtttggaaaaccgctgaccgtcctgatgttcgatttgaactgcctcaaaggggtaaacgacgagttcgggcacgaaacaggcgataagtatatccgtttttcagccagagcgatctccggagctctgaaggatgcatggatataccgcatcggcggtgatgaatttgccgctgtaattgagggagtatctgagaattctccggaagaatgcagccgtctgttagccggccaggtggaggcttacggaaaagaaaatggctttaaggcgggaatcgcctggggatatgcaggctcagacccgggcagtaaggaaaacttcagcgaactgctgtcccgtgcggatcataatatgtatgagatgaagaaacagatgaagtctgctgattcattgtaaatatggggcccatgcctgcaatctgatgaggattgccggcatgggcctttgtatcagcttttattgatgtaccgtattctgtttcctgtactgattcggactcatccccgtaaactttttaaatatctgtgagaaatacgactgtgaggcgaatcccgtgctggacgcgatctctgcgatcgagtaatctgtctgggtgagtaagtccttgctggtctgaaggcggcgctggatcagataggtgatgggcgacatccccagatatttggaaaaggtatgcgataaataaaacttgttgatatgggtggccgccgccagagagtccagggtaatcggctgcgcataattcgcatccagataccgtttggcactggcacattccttgggcatgcgggaggtgtccgtggagatgatgccaaactggtcgtttctcgtgatatagatgagaagaacctccagaaggtcatggcatacctgttcgtaaccattctttttctctttgatttcgcgaagcatcagctgggaaaagttcagcagatgctttttttcagcggaataattatagtaaccgtagttttgcggggcctccggactgccgaaggagaaggtcagtccctcaacgccgaatacgatgtactccagcggtttggaatccatggatttttccgtgtgttccacgttgggattaacgatgaccatgtcgtgttccttaaccgtgatcagctggtcttctaccagaaattttcccaggccgctgatgacatagaacagctcggtgaagtgatgggtgtggggaagactctgccagtcgccttcgtatttggaggtagaggcatacagaagctggaaattcagtttttggagcgtttcgagattcttgtcaaaattcaatcgttcattactcatagaggcacctctttgtttttaagggttttttacctattttacataaaaaaagcaaaatagtaataaaagagttgtttaaaatacgtgaaaataccggatatatcccgtttatattgtttattataggtgatatgtgtggaaaagaaaagtattttattgttcttaaagcaagatatataaaaaatgaagcaagaataacgttgaaactgggggaacaatacaatatactgtaactacaacaaacggttcttgtgcaatatgacaaggaatgataaggaggatatttatgagaaagacattatccattctgctggcagcttccatggtagcagccacacttgccggctgcggctccaagcctgcagagacaaccgctgccccgaaggcagaagagacgactacggcagcagatgccgctaagacagaagagaccacagcagacgcagcagagagcaccggtgatccggttaccttaaagctggcaatttttaaaggcggatacggcgacgcattctggacagcagtgacagacgcctacacaaaagctaatccgaacgtaacatttgagatcgatgcagacccgtccatcggtgagaaggttaactcctccatgctggccggcgacattccggatttcatctactgcccgagcagcaacccgtccggccttgcacagagactgatcaaggatcaggcgcttgcagatttgacagacgtatttgaaggacctttaaaaggtaaaatcttagacggtttcctggacacttctctttcccagccgtacggcgatggaaaagtgtatctggctcctctgtactacacagcgaacggcttattctacaatgcaaccttatttgaagaagccgggctgaatgtaccgacaacctgggatgaattcttcgcacttggcgatgagatcaagggcaaagatatcgccggtaagagcgaccgttccttatttacataccagggcggaaacgcaccgggatacatggagaccgttatcattcctctgctgaccgctaaattaggcgtagaaggcatgaacgactgctttacctacaaagagggagcatgggacaaagaaggcgtaaaagaagtatttgacctggttgccaaactgggaagcggcggatacttacttccgaatacaaccggtattgaccatacgacagctcagactgctgttatgaacggttctgcattattcgttccgtgtggttcctggatcgttggcgagatggctgacatcacaggcgaagaaattaacggtaagccgtttgcatggggcttcgctcctgttccggctatggatggaacaactgacaagtacttaatgtcttctgtagaagaagtttacattccggcagcaagtgagaatgttgatgcagcaaaggatttccttgcattcttatacagcgatgaagcgatcaagctgaatgctgagaagaccggtggaattccgccagtcgttggcgctacagatttaacaaaagacatccttgatccgatgattctttccacattccagtccttcgacaacggctacaagccatacattggcggatttgcagcagttgacagcgaagtagtaccgaagtcagaattctacggccatgtaaatgcagtcgttgatggaaaagaaacagttgatgactgggttgcagcctgcgataagctttctgacacggtaagagattctctcgttacagctgaataaggaaagcaataactgaataaagcataattttagtgcctgaattgtccctgacagtcaggcactaatcaataagaggtaatgataagagataatcataatagaaaggtgaggtgcagatgaacggattagcccagaggaagaaaaaagagaaacgattcctggcctgctgtgtagctcctgcattgatagggttctgcctgtttatactctatccggcatttcaggtgttccggatgtcgttatataaatggagcggcggtactggaaaaaagacctttataggtattaataactttgtgacactgtttacaagtgataaattctggcttgcatttgtaaatacgctgtttctcatggtatttgttacaattgttaccatggcgctgtccctgttttttgcggcaattatcagcaggggtaaattaaaagaggcaaatttatatagaattgtattattcttcccgaatgtcctttctattgttgtaatcggtattatttttaaaaatctgtttaaccccctgaccggtattgtcaattcctttttatcagccatgggaaaggccaatctgcctaactggctgggagacagtaagtatgtactgtgggtaattgccctggccatgatctggcaggcggttggttactacatggttatgtacatagccggaatggatggtgtttccgcggagctttatgaggtatctgaactggaaggcgccaataaaattcaggaatttttcaagatcacacttccgcttatctggccgacagtccgtacgacactggtattctttattctgtccaccatgaacatgagtttccagttcgttacagttatgaccaacggagaacctcagggccattccgaggtgctcttatcctatgtcaacaagcaggccttcagcaacgcaaactttggatatgcaatgtccgtttccgtcgttgttttcctgttttcctttatcctgtcactcatcgctcaggcgctgactgccaggaaagacagttaattgaagggaggaatcagaatgagtaaagaacaaaaaagtaaagtcgtcagactgttgctccgaatcctgctgttcgtagccgttgtactggttatcctgcctttaatctggacatttatatctgccttaaaggataataatgagatctcccagttccctatgcgccttccgaaaaagcttcagtggaataactttgcaagggcctggaccaatgcggatatcggcaagaacttcttaaattctatttttattacggtgttttccatggtgctgtcactcgtcatggtcgttccggcttcctatgcgctgggcagatataaaggcaagatcctgacgccggtgaaagcgctgtttatggccggtatgtttattcagaagaactatctggtagtgccgctgttcttacagctgttaagctttaatatgttaaacagccgtgtggctatgtgtattgtttatgcctgcacaacgctcccgttctatatcttcctgatgtccggatttatggaagggatcgataatgcatatgtggaggctgccgggatcgacggcgccagccatttccggaccatggtgagcgtggttttccccatgtgtaaaccgggtgttgcaacgatgctgatgttctcctttatggaatactggaatgagtacattctggcccttcagttcctgcgggatgataccaagaagactctgccggtaggtcttaagaacattatggagcaggcaagatttgcgacagactggggcgcgttgtttgccgctatggtgattgttatgattccgaccatgatcttctatctgatggtacagaagaaactgacgtcaggtctgagcatgggtggattaaagggttaatactgaaactgaaagattttgagagaggacaaaactgactatgaatgagattaccggaagacttaccctgcctacggatgtggacatggtagatgagacaatccgactgaaaaatctgctgggggccgacgcccttcgtgactgtgacggaacgaatatgccggaggagctgttaaaactggacggcaagatttacgccacctattatacaacgagaaaagataatgactgggctatgcagaatccggaagaggttcagcaggaatatttaatcagcgaccggatcacggcacggggggagacgcttcgcatcgaactgatgcacggcttccacaccgagcagttaaaggtcaacaccatcgatgatccaaagcgctggtgggaagtaatcgaccggacaaccggtgaagtggttcctgtgaccgactgggagtacgacgaggcttccggagaggtcgggattaagacgataccatatcacgagtatacggtaagcttcctggcttttttgatctgggatccggtacatatgtacaacttcatcaccaatgactggaaagatgccgagcatcagatgacttttgacgtccggcagccaaagactcaggtcttcgttaagaataagttaaaacgctggtgcgaggagaatccggatgtggatgtagtccgttttactaccttcttccatcagtttaccttaacctttgatgataaaaaacgagagaaatacgtggagtggtttggctacagtgccagtgtcagcccctatattctggagcagttcgagaaatgggccggttataagttccgtccggaatacatcgtggatcagggatatcataactcctgcttccgtgtaccgtcgaaagaattccgcgattttattgaattccagcagatcgaggtaagcaggctggccaaagagatggtggatatcgtccacagctatggcaaggaagccatgatgttcctgggagaccactggattggaacagagccctttggcaaatattttgcggggataggccttgattctgtcgttggttccgtaggcgatggtgtaaccatgcgcatgatatcagatatcaaaggtgtgaaatatacggagggccggctgcttccctatttcttcccggatgtattctgcgaaggaggggatccgattggagaggcggaagacaactggatgaaggccagaagagccatgctgcgttccccgctggaccgtatcggatacggcggttacttaaaactggcgatcgagtggccgggctttattgaagaaatccagaaagtggtgggagagttccgccagattcaggaaaatatggatggaagccgttctcatatggcgccgtttaaagtggctgtcttaaactgctggggcgcgctgagaggctttatggccaatgaggttcaccacgccatttaccacagggagatctattcctatgtcggtgttctggagtgcttaagcggtatgccgatcgatgtggaatttattgacttcgaccagctcagagagggaatcgacccagacattaaggtcatcatcaattccggcgacgcttacactgcgtggagcggaggagacaactggaaggatgagaaggtcgtgacggctgtccgccgcttcgtagatcagggaggcggattgatcggagtgggagagccgaccgcctgccagcatcaggggcgctacttccagctgagcgatgtactgggagttgaccgcgagatgggattctctttaagtaccgacaagtataatgagttgaatcaggagcattttattctggaagatatcgaaggcgaaattgacttcggtgagagcaagagccggatctacgctcagggcgaccactatcagattctcaacaaggacggagaatacagccgtctcgttgtaaatgaatacggtcagggccgcagcgtctactttaccggtcttccttattctccccagaattgccgaatcctgcttcgcgccatatactacgcggctcataaagaagaggaaatgaagaaatattatgtaaccaacgtagatacggaggtcgctgcatatgagaagacaaagaagattgtagtgatcaacaattcaaaggagccgaagacgacggaactgtatgtggaaggcgtgttgaaatgccgtcttgacatggaacccatggagatgcggtggatcgatatgtaaaacaatcaaatatgtgatgatcagaaaaagaaaaaggtattcagcagccgggaacggccatggaatgccttttttccttttttatgccagagcaaagtaagaattagtaaaaatattggctaaaattcaaaaatacatgaaattatcctctctgttttcccttctctgttctataatggtaccataatcaatacagagaggacattacggaatgagaaaaacggtatgtataaatgaaaactggttcttttcaaagacatgcggagtacttcccgacgctctgcctgccggctgggaaaaagtaaatttgccccatacgtggaatgcggcagacggtcagtatggaggcaatgattattacagggggatctgctggtatgcgaggtccctttaccagccttgcgggactgacgggctgagaagctatctggaatttgaaggggcggcgatggcggcgtccgtatatataaatggaaccaatgtgtgcagccatgaaggcggatattcgaccttccgcgcggatatcacagaccatctgcgggtcggagagaacttgatctgtgtatctgtggacaacggagtaaatgaccggatttatccgcagatggcggattttacgttttatggaggtctctaccggaatgtaaacctgataacagtaccggaaactcattttgatctggactattatggcgctccgggtcttgcatacactgcaaagacagagggagaaaccgcggccgtgtcactgaaggcctgggtcacggctccggaaacgggagacagcgtctgctttacgattctggacagccagggtatcacagcggctcagggctatactccggcggaagcgtgcagcagtacggtgctctgcctgacatctcctcatgtatggcagggagttttagatccttacctgtataccgtaagggcagagcttgtacgccggaatgagagaatcgactgtgtaaacgttaaaatgggaatcagggaattttctgttgaccctgaaaagggatttcttttaaatggtatccctaccccgctgcgcggcgtttcccgtcatcaggacagactcggtgtcgggagcgcgctgacaagagagcagaatcttgaggatgccgaattgatccgggagattggcgccaatacagttcgtctggcccactaccagcacagccaggatttctatgaggcgtgtgacgccatgggatttgtcgtatgggcggaaatcccgtttatttcgcgtatgagcggcaatccggccgcccatgaaaactgtattctgcagctgaaggaactgattttacagaactataaccatccgtcgatctgcttctggggaatctccaacgagattacgattggcggcgacagcccgcagcttcaccggaatttaagagaactgaacgatctggctcacgccatggactccacgcggcttacaaccatggctcacatctcgatgctggagccggataatgagcaggtatatctcacggatgtgatgagctataaccactattttggctggtatggcggtaagctgacagggacggaagcctggatggacaagttccatgaggcgcatccgaaccgtccggtcgggatatccgagtacggagcggaggccaacatcacgtaccacagttccgaaccgagatgccgggattacagtgaggaataccaggctctgtatcatgagcacctggctgaggttatcagccgccggccgtacatctgggcgacccatgtgtggaacatgttcgatttcggctgcgacgcaagagacgagggcggtgtaaaggggcgcaacaacaaggggcttgtcacgctggaccgaaccataaaaaaggacgctttttatatctataaagcatactggagcagcgaaccgtttgttcatatctgcggaaggagattcgcgaggcggaccggagattttctgagtgttaaggtatattccaacctgccggccgtgacgctgtttctggacggaatcaggattgcagaccggatgggagataaggtatttgaatttcaggagattccgtggacggaggggattcattttatccgggccgtggggcaggactgcgaagactgtatcactctggaacgggtaacagagccgtgggagccgtatattctcgtggacgaggaagcggcccagggagacggggcggccaactggtttacaaacctgatcgtggagactcctccggaaatgacgttcgatccgcagtatttttccgtgaaagacagaatccgggaattactcggatgcaatgaggcgatggaggcagtcgtcggagccatgtactcatcctccggcatgaagtttaagaaaagcatgctcagcatgatgggggataacacactggaagatctccaggagatgatcgataaggcatccggggaagaaaacagtgtgaagccctctatgaaacaggttatgacacggctgaatgccgttctgcagacaatcaggaaatcctgattgtctgctttttgaccctgtgggaggaggaggcgtgatgaaggaagttgatttaatcagcatgatcgaatgtgtgacagccagttttcatatcaatttatccatcgtgaaatcgcccgaggatgagaaaaactgctttgacttaggactgcgggagaatatcttaaaatgcggccgcccaaacgatgttctccacaatatttatgcgggatgcggacctttcatactgcaccatgtgattgaccggtacgactcggaatacgatctgtttgcacttccggaggacatgagatcctgcggtgactatattttgatcgggccgtaccggaaagagtatatggatgacttccggctaaaccggctgattcaaaaatgcgggcttcccattagtctgacctccgggctgagagattacttctgtgaggttcccattgtgatggacagcggctcctgggatgagctgctgctttccattgtccgcatgtgttatgacggccaggagattaaaaaacgccttgttgagctgaaagaggatgagagcatgggctggaaggaagatctgccggaggataccctggtgcacacaaaaatgctggaagaccggtaccgaatggagaatgaacttttacatgcaattgcatctggggatgcggatactgctctgaggatctgccggaaattttccagtacctcagtttcccggcgttttaaggatccgaaccgcgaccggcgcaatatcctgattacttccaacgccatataccggaaggccgctgaaaatgggtgtgtacatccggttcatatagaccggctttcgtccggatttgccaagaaaatcgagacggtctgcacagaaagggaagccagccggctggcccttgagatggtacgcaaatactgccttctggtgcgcaacttttctctgaaaggccattctgccgtaatacagaagatcgtaaatcatattgatttaaatctggctcacgatttgtcgctaaagaggctttcggaagagtattgcgtcaatgccagctatctgtccacgctgtttaagaaagagatggggcagtccattaccgcctatattgcggagcagcggatgaaacaggcgattctgtatcttaattcgaccgacatgcagattcaggagattgctcttgccgtggggattaccgatttgaattacttcagcaagctgtttaaaaagatgacagggatgcctcccagcgtatacaagaaaaatttgtagaattagtaaatatacaagataaaatgaaatattgacaagatatttactcatgcttctccgaaaatagctgtaaaatctaagtacattcatgaaagagaaaagagatgcagctgctgaaagaagaaggggaagaaaatatgaagagtcagaataacacgaaagttaatggaattcaccgggctcatacgtgggaaattgggctgtatgcgctgaacaatacgtcgacaaatctctatgcgatgctgatgggatacgtttcttactacgtatccgggctgatgggcgtggctgcggttctggtcggaacactgcttacggttatgcgggtgtgggacggcgtcacggatcccgtcatcggctttgttgtggataagaccaacggcaggtttgggaaaaaccgcccgtttatcgtaatcggcaatgtaattatgattattacaacttatatcctttaccatttcggtcataagctgccggacaattacggattgaggctcggtttctttgtgctgatctatgctgtttacatcattggatacacatgccagtgcgttgtcacaaagtcggcacaatcgtgtatgacgaatgatcctgagcagagacccacgtttgcagtctttgatgccgcatacggcggattaatgtttgccggaaccggcatgctggtctctaagtatcttgttcctaaatatacggtcgatgggatttccggtttccgcaatcctgccatgttccatgaattctggctgatttttgcgggcctgtcgcttcttttggcggctttgtcaatcgttggactgtggagaaaggacagaccgcagtattacggactgggcgttcctcagcagatccgaatccgtgattactgggagatcttaaagcataaccgcgcgattcagatgctggtggtggcggcgtctacggataagctgtttcagaatattatgactaacagtattgttctcgttatcgtctttggtatcatctgcggagattatggcagctatggcaccatgagcatgctcattattgtgcctcagattcttctctgtggttttggtattcgaaagattgctgctaaaatgggacagagaaaggcgctgtggaccggttccatcggagccatcatctgcgcttcctgcatggcgctgctgtttatattcggcaatccgaaagacttcggattctcccgcatcacattttttacggtcgcgctctgtaccctttggattctggagaaggcgtgctccggcatggcgggaacactggtaattcccatgacggccgactgcgccgactatgagacctaccgttccggtaagtatgttccgggcctgatgggaacactcttcagctttgtggacaagctgatttcctcactgggaaccacgatcgtggctctggagctggccgccgttggcttcgcaaaggtacagccggatcagaccacgcctctgactcccggactgttctgggtcggtatcatcagcttttgtctcgtaccgattatcggctggctgtgcaaccttgtggccatgaaattctatcctctgactaaggaaaaaatggcagaaattcaggacaggattgcagagattaaggccgcctcttttgataattaagcggtttactgtttgtacacggccgtaattcgtttttcgtcagatttatttaagaataatgatctggaattaataagtggggtatagtatactagatcatattatatatttcaaggaggaatctatgaaaaaagttttagcacttcttttgagtgccgccatggtactgtccatggccggatgcggcggtggaaaagacgccagaacaatttatgatgaagcttctaagaagacttcagagctgaaggatatggatcttactacgaacgttgccatgacgatgtctcagggggatcagaccatcgacgtgacaaccgctatggatattcagatgaccggagccaatacggaagacatgagatatctggcgacgggaaagacctccatggcgggccaggacatcgatatgtcgatgtattatgagggcggctattactatatggagacgatgggacagaagatcaagtacgccatggatttaaatcagcttatggaacaggtgaagcagagtacggaaggtgcaaatatggaatcttcctacatgaaggagatcacggcaaagaaggacggagagaaccagcgcctcacatttacggctgatgctgaaaagatggatgcgtatgtgcaggacattatgagcagcatgggaacagctgccgccggtatggaaggcgttacctataagattaaggaagccagcggtgaagcggttgtgaataaagatggatacttctcaagcatgaagattaagatgcttatggatatggaagtgcagggggaaaccatcagcatcgatatggatacagacgctgtctaccgcaacccgggccaggtggttacactggctgcgccgagtcttgacggctatcaggaagttgatcccgcggcaatgggagtacagcagtaagaaattaaacacatttttttattatgaagataacggcaggcatgtcaggtgggaattcatctggcatgcctgccgtttattcccgcgggctattcaggaatggtgatagaagcgtcattgaatcgctttaagtttacataattgtattttgtcatggaatttatttcgctatcctcgagtgtcgtgatcggtgttccatcagctgtttcataagtgagtttatactcaatggttaaaagccggcctgtagagtcgatggcggcctccagcgtttctgctgtatactttcggtttccgtcagaataaggcggggattctaactcctgctcatgccgcttaagccgctcatcccggactaattgaaggggaagaggaagatagccgggctgttccgtgctgcgtataagggtaatgacggttttgccgtcttccttttttctggatacttctgtgaaatcttcaggggagatacgatggttataaatccagagtctgcccttgtaggattcatttcctttctggtctccggaggattccagcatccagccgtttaccggaggttctgtctgcgctgctgactggctggtcaaatcagccgggatatggtattcccctttattcttatcaaaaatccggtgatagtggctgtctccgataatcttatgttcaacggtaaatgaggaagtcttatccgacggtatgcctgccatgtagtaattccggccgccgtcttcagaaacgcagatgtaggcagtggtctggagctcatattttgtatcattcaaataggtgccgtcactgatcgtgaattcatagctgtccatggatagatcctgttcaatggcggcatttatggcgtctgcggcgtctgcaagctttctttcactgtttcccgaagaacagcctgataaaagaagagagagagtaaaaagacttacagcaggcagcagtcttaagtaacgtgtgcttttttgtatcataaaaatccctccttgtctgatttgattttaacagatgacagggagggaagtatttctttttccttaatatttattcttcaatgacctgaatttccagaaaatcgaaatcaatatgctcgataaaattatcctgtaagaaacgggctttgtcatgaactttaaattcatgtatcgtggcgtccagccagattggcttgcctaagtcgaactcgtagcagatatcatcaagagcctgaaataccatggcagtcctggacattgaataatctgagatgcagataacggtatcccggatgagtctcgtgtccttaacaatctttccccacatgcgaaacatagatttttcctccttccgtatacctgtggctgtgataaaatgaatacgatgttgattatatcattaaggccggaagcggcgcaagggatttattatttatcacccaaaacatgagattaaaaatttgtaaaaatgattagaatatgatagaatcaacgggtctttgacaccctaatcatagaaaattagccactaagccgctactggcttatatttttttgtcaaatattttgttttaatatatagccttttttagctttttatggtaaaatagggatgggggctgattattttgaaggttgatacaacgaagtccaaaaatgcggaatccttttacatcagacaatcctatgtaaattcagaggggaagtccacatctaagaccatacgaaaacttggaacattaaatgaactgttagtggagcatggaccgacccgggatgatgtcatgagatgggcaaaaaaacaggcggagatcgaaacggaaaagtataaggctcaaaaggatgtaaaaacagtattgatccctttacgtgctgataaaaagatcgattacaacatggaaaaacgttttcaaggtggatacttatttttgcaatccatctactatagcctgggactaaaccgggtatgcagaaagattcgggacaagcatcagtttgaatacgatctcaatgcgatcctttccgatctgatctatacgagggtcatggaaccttccagcaaacgttcttcctataaagctgcctgtggattcttagagaagccaggctatgagctccacgatgtataccgggccttaagcgtccttgctcaggaaagtgatctgatacaggcagaactttataagaacagcaacttcttaacgaaacgtaatgatcatatcctctactacgactgtacgaattattactttgaaattgagcaggaggaaggggataagaaatatggtaagagtaaagaacaccggcccaacccgattatccagatggggctgtttacagatggcgacggcatccctctggccttctccttattcccagggaaccagaacgaacagacctctttaaaaccgctggaaaagaaagtgatcgaggactttggctgtgaccggttcatcttctgctcagacgccggtcttgcttcagagaataaccgtttattcaaccatacaggaaaaagagggttcattgtcactcagtctattaaaaaacttgcagctgaatacagagaggcagcgcttaacagaacaggattccggagattatcggatggaaagccggcggacctggagcagttaaacgaagctgattctcaggaactgttttataaagaggagccttacagttcaaagaagctggagcagcgccttattatcacctactcccctaaatatgctgcctatcaaaaagacctgcgggaaaagcaagtacagcgggcaatggatatgcttaaagatggaaaacataagaaaaccagaaaaaatccaaacgatccggctagatttatagacaaagaagctgttacaaaagatggtgagactgcagatatcttatactatctggacgaagcaaagattgcagaggaagcaaggtatgacgggctttatgccgtctgtacagacctgtttgatgaccagccaggagacattcttaaggtgagtgaaggccggtggcagatagaagcctgctttcggattatgaagactgacttcctggcaagacctgtatatgtccaaagagaggaccggatcaaagcccatttcctaatctgcttcacagcgctgctggtctaccgtctgttagaaaagaaactggaaaagaaatatacctgcagcgagattctggaaacgctcagaaaatttcaatttgcagatgttggcggacaaggattcatgccactgtacaaaaggacaaagctgacggatgcgctccatagtaccagcgggattgagacagactttgaattcatcacaaagagcaaaatgaaggagatccagaagaaaagcaaacttagataagctgccaattgagatgggacagcgctggtacaagaatttaactgcaaatggctagaaaccaggaaaataccaaactttaaaacgaagcaacaccgctgtgaaatccgcatagaatcggactttcagcggtgttttattttgtttaactgtcaaagacgggattatatcattaaggccggaagcggcgcaagggatttattatttatcacccaaaacatgagattaaaaatttgtaaaaatgattagaatatgatagaatcaagttagcgttttttgtggaaaagaatcggataaaaccgaaggaggacgacaacgaatggcacaaccgataacagaccaggtcggattcctgtctgaggcgtgcagagccgtacaggaactgtctgcgagtaaaaattcactggataaaatccgtttggatgaaaagcggctggagaaggatctggaggcggaaaagaaggccgtggcggatgcgatcagcctgactgtgaagaagcgtatggaagagattaacggttcctatgacaaggagattgcaaaaggtcaggaccgtttaaagcgtgttcggagcaaacgggaaaaggcgaagagccagggaattaaggaacggatcgcggaagagacgaaggaactgcacgatgataaccgggaattgaagctgcagatgaagacaacgtttcagaaggaccgggtccctcgcttctgtaaatctacatggtactattctctgtattttacgagaggattttcggaatttcttatcttgctggttacgatcctcatctgttttctggctgttccgtacgggatctatatgctgcttccggagaagtccacgtattatctgatagggatatattttgccgtggttgttgtctttggcggtatctatattctgattaataataagacgaaggtacgccatcaggaggcgttaaaacagggccgcaagatccgcgatctgatgcgcacgaatcataaaaaaatccgtgtcattaccaattccatcaggcgtgaccgggatgaggccgtgtatgatttagagaagtacgatgatgagattgcccagatcgagcaggacttaagcgatatcaccagcaagaagaaggaagcgcttaatacctttgaaaaggtgacgaagacaatcatatctgatgagatcgcaggcgccagcagagagaagatagaacggctggaggaagaactgctccgggcttcggaagaggcgaaggaagccgaggtgaaggtaaaagagcagacgcttttcattacggataactatgagtcgtacctcggaacggaatttatggtaccggagaagttagatgaactggccgattttatccggatggggaaggcgactacgatcagtgaggcggaggcgctttacaggagtatgaaagggtaggctgacaggaaccggtaattcaatattagacagactttaaaaaccgccgaacggatggattaaaaaatcttccgctcggcggttttttagtagtactcattaggagccggaattaccgcaagcactgtaaataaggctggcgtcatagattgatataaaacatgcacaatggaatacaaaataaactagataaagtaataattatatgaataaaaaaagtatataaaatatgaaattcggtatattgtacaacttgattaagaaatatatactttccatatactaaaaatacgaagggaagatgaaaatgaagccgaaatttgaatttgtaaatggaagtctgtgggaagaaaaaaaagagattcctgttgccaggaattgtgatgtggcaattgcagggggcgggccgtccggtttggccgcggcaattgcttcagccagaacgggggcagatacgttactggttgagagtcagtcatttttagggggtgtggctacgtcaacaatgatggcagccctggtggatgcaaagagagccaatgggatttcagaagaattgattaagagaatgggagaaaggaatggagctcccctgctttcaccggaaaaaaatgtaaatacaataccatttgatccggaaacgtttaaaacctgcgcattacagatgctgatggagtcgggcgcctctgtattgttttataccattgtaacagagcccattgtagtgggagatgaaattcgaggatttatcattgaaaataagaatggcaggcaggcaatactggccagacaggtgatcgactgcacgggggacgccgacttggcttatcgggcaggagctccctgtgtaaaaggacgagaggaggatggaaagatgcgtccgctgtctctcctggcacggatgggcggcgtagacgtatataaaacactaaagtacctggaagagaatccggaagaaatacagccgcagtaccggaatggaggaatactgaaggcaggagaagaagacgtggttcagaggctaagcggattctacaagcttgtggaacaggcaaaagaggaaggcggtcttttcccggaatgtcattatttcagactggaaaacctgtgggccagccggggaactgttatttgtaataccgcaagagcctactttctggatggaacagatgcggatgatttaacaaaagcagagatcatatgccgccgtcagattgataagctcctggtatttgcccggaaatacgttcccggattcgaaaatgcatttgtaattgatatatcttccaggctgggagtgcgtgaaacccgccggataaagggcgtttacacactaactgatgaagacgcatatggagatgccacgtttgaggatcctattctgtttttaagtgggaatctggtaaagcggcctctgccgaaggatctggatgttcacatgccggagccgattgagggttccgataaagactggctggaaaaatatcctgaaagagtaccgatggaacaccatgagtaccagcttccgttccgatgccttattccgcagaatatcagaaatcttctggttgcaggaagaagcctttctgtcagtcacatgatcgacagctttacgaggaatatgatcccatgcatgtggtttggtcaggcggcaggcgctgcggcgggcttatgtataaaatatgatacaatacctgcagaactggaatatgaaaaattgcatcaggagctgaaacggcaggggctgacgttttgataatcactcactggagaagaaatggggatgggaagatggaaagaataccagtgaagaaaaaaaattataaacggtatatatccttatacgtaatgatgagtgtaagcatctgctactacgtggtctatcgttatgctccaatttttggaaatataattgcactgaaggattataacattcaggccggaatttttcgcagtaactgggcggaaccgttaaataaatactttaagatgttttttgaatcccccaatttcaggcagctgctgaccaatacggcgattataagtttttataaattggtttttgttacgtttggaggaatcagcctggctttactgttaaatgaagccaggaagaaacggttgagacagactgtccagacggcttcttttctgccgtactttttatcctgggtggttatctacagtatttcccaggtgtttttcagccagtcaacaggattgattaatcatgcaatacgtcagtcaaccggagaaaccattccctttttatcttcggataaatggttccgttttatcctgatcatgacagatgtatggaaagaggccggctggtcttccatcatttacattgcggccatggcgggtatcgacccggcgctatacgaagcagccagagtggatggggcaggacgtctccgcatgatcataagtattacgctgccatgcataaaaaatgtgattatcatgatgctgattttaaagctgggaacaattatggatgccgggtttgaacaggtcttcatcatgtacagcgttccggtttacccggtggctgatattctggatacctgggtatacagagttggactgcagcagatgaatttcagccttgcggcggcggcaggtcttttcaagtctgtcatcagctttatcctggtagtagcggccaataaggtatcaaaaagatggggggagtcaatgtggtgagtaaaatatcagataaatcagtcgattttattgtacatacgattttgctggtcataggattcatttatatatttccgctgatttatgtaattgcagtgtcgctcactccttactctgaagtgcttaaaaatggagggtttgtattgatccctaagaggattacgctgcagggatataaagaaattttcagaaattcaggaatacccagggcttttatgatcaccgtgtttataacagcggtgggaacctttattaatctgcttctgactgttactttagcgtatccgctgagcaaaaaagatttaccaggaagaaagttctggctcttatttgtactctttccaatgatctttggggccagtattattcccacttacctggttgtaaaagcaacaggattgttaaactcggtttgggcgatgattattcctttggcggtaacggggtataataccattatattaaaaacgttttttgaaggggtgccggaaagtctggcggagtctgcaatgttagatggagcgggggaatttcaggtgctgtggcatattgtactgccattgtcgaaaccggcagtgacaacggttggaatgtattatgcggttaaccactggaatgaattttttaatgcggtttattacattacagatgtgaagctgaacccattgcaggtagttctccgcaatattattgatgtttctacgatggcgagtacggagattaatgttcctacgctgacgatacagatggcggcggttgtagttgttatatttccggttttaattgtgtattttctgcttcaaaagcatattgaaaaagggatgctgtccggagcggtaaaaggatgagtgtgtgcaggagggaaaattgaatgaaaaaacagatgaaatatggattggctgcggttttactgggactggcggggatgacgctgctgtccggatgccaaaaaaaggaaacaaaagagattggacaggaaaacgcggataaggtaaaattagaagtattggttgaaggcgccggaatgccggcgtcatcggatgaagatcctatcctggatgctttgaatgaacggctgaacatggatatgaatttttccgttgttcaaaatgaatacagcaaccagttgaatgtccgtgtggcgggaggaaaccctccggatctgttttcactgaattacgagcagatgcatacctacgcggagcaggatcttctgctggactggactccttatctggatcagatgccccatgtgcaggaagttctgaagcaggaggactgggtgaagggaatggtgaacggaaaaatcgttgccctgagcaagaggccgtttatcaagctgcattctctctgggtcaggaaggactggctggatgcgctggggctggaagtaccaaagacgcttgaggatctggtgaatgtatcggttgcatttaccaaacaggatcctgatggaaacggggtagatgacacgtatggcttcaccgcgcccggcatgacggcggccggttctcagggtctgtttggtttatctcctgtctttggggcgtttggaacgactcaggagggccagttttatgtgaaagacggaaaagcggtttattccacggaagaccctgcattccgtgatgcgattgaatttatccgatccttcattgcaacggggtccgttgatccggagctggtggtgaataagaacttttcagagcgggataaggcatttcgcggggaggcaggcatcatctatatcgcgtggacggatatggtaaagggcaaccttcaggaacagatgaaggcagtaaatccggatgcggaatggatccagattgaaccgccggcaggcccgggaggttcctatgacggttttatcgatctgggcgacactccgaaccggtatgcgatgccgaaggatatagcgccggaaaaaagggatcaggtgttaaaactgatggattatattgcgggcggcgagggacttgatctcgtatgctacggtgtggagggcgtccattataagaaggagggagatcagattaccgctctgccggcaatgtctgatatcacatggtcctataattaccagctggttggaagagatgatgttccttattacggagtaaaatatccgacgctcacggagtaccgggattttgcttacggtttggaccgcatcaatgtgtatacaaatttgattcagattccggataagttcaacattgttgatctaagaagctacgagcagcaggaactggtgaattttatctatggtaagatggacatggatgagttcgatgatttcctgaaaacattagaggacacgtatcatttgagcacctataaagcggctgcggaatctacattgaaagaatgtggatacattaaataggagagattatgtataaggttgtactgatcgatgataatgagatttttttggaatccctgaaaaaaaacggcccctggaatgaaactgactgttgtctggaaggggtggcgtatgatgggatcagcggaaaaaagatgatagaggagctcagaccggatattattatcaccgatatcagtatgcccgaaatggatggattaaccatggtggaagccatccgcaaggagtgtccaggcagtaaaattttgattatcacaggttatgataagtttgaatatgcacagaaggcgcttcagttaaaagtaaatcaaatactgctgaaaccagtttccttacatgatctgcagtgcgccctgtcagcaatcggggaagagtttaagaaagaagaagagcggaacaataattttatcagcttacagaaaaagctggatttaaataagagaaactatgagcgggaacagagaaaacgcatgtttcaattattattaactcttccctgctgcgatcaggcgtggattgataaacagacggagaagcacgaatgctatgacggcgggtatacgatttttgttatgcccgccgatcaaaagtctatcattgaaaaagattccgcagtgatcgaaagcgagatggaaaaatacagagatatcgcgccgctgatccagatcgtttcctttgtaaacagcagttactttataacactggttttgtataaaaaatacatgaggaaagataaaatctcatatgcggaagaaaagatgagaaatattttgcgtgattttggggatcagaaagaataccttctttcggtaacctgcgcggacaatcatttttacaggatgcaggaccgatatgaaaagctgatattacagttagaggaacgcatgtattttttatatgagacagttgccggagatcagttaaagttcagtgagagccacatcatgacgtattttgagacggtaattacgaatgtaaagaccagtaaatatgaagatggggttctggcgctcgataaactggtggaagagatatcacagttctatacgcctgatcttgttctgatacggacggcgctcaatggtttttctgttttgctggtgagggcctttgacggtatggaatatggggagacgggcgcccacggactgatgaacgggttcaacaccgtcatgaacattaaacaggcgaaggaacagcttcatgcgatatacagggaatgtttaaaacagcgatcaggggaggataaaaagtattctgctctggttttggccgttctgcagtatgtcagaggcaacgtttacggcgatatttcgcttgaaaggactgcgcggtactttaatgtatcttccggatatttaagtggtctggtaaagaaagaaaccggaatcaattataatcagatcgtgctgcaggaaaaaattaatgcggcaaaggaactgttaaagcatccggagtattcaatcgaggagatcggagagaaaataggatatacgaattacatcagcttttacaaggcatttaaaaaagcaacgggaatgtcgcccagagaatgcaggtgaaggtgagcctatgagagaaaagattaagaattacctaaaagaacggtactccgatattggtattaaaaaagagattatcatgataaactctgccatcgtgtcggcggcggttctgctgacgtttctgttctgttttttcttaaacctggaaaaatccacgcagaatatcgagaaaattgcccgtcagctgacggaggagcagtaccataccgtgaacagcaacattccgcatctggaaggacagatatttgcactgatgcagaataaaaggcttcagcagctgctggcggaggcagggacggaaccgctggatgtgttttcgagagacggaataagaaccgagttggaacagatgtgccatttctaccattttatcgactttgttgtggtaaaagatttacaggggatatggtacggctctggaggctcctccgggcttgattttatcaggcagtgggacagtgaaaacggggagaggctgaaggctcagacggggaagtgtatctgggagatagaagatggggaaatctatgtggaacgggagatctttaacgttactaccatggaaagactcgggaccattgtattaaatatcaatcagaattatttcaatgaactgataggtctgccccgcaattccatgaattactgttatttgctgtcagacacggggaaatgttatacctacacggaatcagaaggggccccccgctggagcgatatctcgcctaagatcctttatgaggagggatatcaggagaagtatctgttccatgatggaacggtctatctgatgcaggcgctgatgggcgggacgggcagctggcagattgtcaacctgataccggggaatgtgtttaccgacggctggaaaaccagtattatgatatccatcctgataggtggctgtgcagttgcagtcgccattttgctgatttcaaagttttccaggaatttatctgcaaggatcgaaggggtcatcggacagatggaccggattgcagacggagagtttcatacggaatatcaatcggaacgcagagatgagattgacaagattcgatgcaggttaaacattctggggaaacagattgagcagcttctggaaaatacggtggcggaagaaaagcagaaaaaagagatggaggttcaaatgcttcagctgcgctactatgcggtacaatcccagatgaatcctcactttatctataatgcactggaaaccatcagcagtatggcgctcttatatggagcggccgaggtcagcaatgcggtttgtgaatgcgcagcgctgttccgggcgaatgtaaggcggatccaccagtttgttacgctggaggatgaactggagtatgtgaagctgtgtatgaaattctatgagctggcatatcccaaccggattgataccgagtacaggatcagtccggagctgcaggagtgtatggtgcccagctttttactgcatcctttaatagaaaacattattgtgcacggggtttccaaatctgttaagagggttaaaatattggtgagctgcaaacagcggggggatatgatcaaaatagcagtctgtgacaacagcatcggtatcagccgtgaaaagcagcagcagcttctcgatgcaatgaaggagaccgacatatggctgaatgaggattcgaaggcgcctcatacggagattggactgcctaatatttattatatactgaaaagaagctttggagagagggcagatttgaagttatacagcagagaggaaaggggaacgtgtatatttttaagctttccgcgtgagcgccagatacagaattgagtgcggtgttttccgtaccgaaaaaaggaagtgccgacttccggatcatagtgaataattcccgaaatcgcggcttataatagaacagagaataagaaggacatcaaggcaggatattatgagactatgggaacgcatcgcaatccgcggcaatcgggaagtttattactatgacacaaaacagtcctttgaggcggaagagtttgcctcgaggctttatgatttgatctgtatggaacaggaaaacggaaaaacggcgggggttgtatttctgtgtatcgggacagaccgttccacgggtgacagcttaggaccgttaatcgggtacaagctgaaggaaaaacgactggagcgggtggaaattctggggacactggaacgccctgtacacgccatgaatttagagacctaccaggcaattttaaaatttcagtacccggatcacgtggtggtggcagtggatgcctccgtggggaacatggagcatatcgggtatgtgacgcttggaaaaggctcgctgaagccgggacttggagtcagcaaggaactgaaggcggtaggcgacatttttatcacgggtattgtcggaagctgcggcagcttcgatcccttaatgctccagagcatccgactgtctgtcgtcatgcggatggcggactgcatcagcagaagcatttatcttgtcgaaaagttatgggaaaatgcttcccttctttgacaggttttgcgctcatcctgtgctatgattcattggattaatatgaatagcggggtgagcctatgggagaattgtacaatccgttcccgaagctgccgaagaatatacggcagatcggggagcgtgacgcaatcgtaaaattgtatgtggaagattacgtgaatacgtatttgagacgtctgtatccggcgggtggacaggacctacgggtcggcctactgctcggaagcgtggagatgaacgatgggacgccgtatatctttattgacggcgccatggaaatggaagatgtaacggaacagggtcagaaagtggtcttttcagaactcgcgtggaaaaaggcgtatcagagcgtggagcagctgtttccgaaacggtccgttctgggctggtttctgtgtggagcgccgggaaatgatttaagtccgcttaattactggaagcagcatgttcagtattttcagggacctaataagctgatgtatttaagcagcggagtggaaggagacgaatcagtttacataacgtcggaagacggattctacaagctctgcggctacagcatttattatgaaagaaatcagatgatgcaggattatatggttctccggaaggatgtgaggagaattgagtccggatcggatgagaaggttattcaggaattcagaaagcggatggatgagcacaaggacgaggtgacggacaggcaccagactcttgggcttttacgtggtatgtgcatggccatgtctatcgtgatcctggcaggcggaatcgtaatgtttaataattacgagcggatgcaggagatggagagcgtgatcgcatccgctattccggaacgggtggagtcggcgctgatgggaaaggataacgcggcggtgaaggataaaccggaatcccatgtggtcgtggaagaggcggatggcggagtctatccgacgacggcggcggtgacaaaggaaaccatgtcagaaacccagccgggcaatcaaaacggcggggaaggtcaaaatggcggggaagatcaaaatggcggagacggccaggcggctggaagcggccagaagagtgaaaatactcaggatggcggagacgtccagagcagcgggaacggccagaatagcggaggcggtcagaacggcgaaagcagtcagaacagcggaaatggccaggatggcggaaacagtcaggagtctgcccagacgcagggaggaaataagggggcgtctaaagaagagggggccggaagccagagttcatccggcggtgcctcccaggctgcggccggtggtacccagagagttcatgtggttcaggatggagaaacactgtatgggatctgtatatcggaatatcatgatgtaaataaattaaaagaaatctgtgagttaaacgggctggaggatgaaaataaaatagtatccggccagaagcttctgcttccctaaaggccgcaaactcgcggaaagaaaaaaataatgcgtttctcccggaaatgatgtatactacaatcaaaccagttacggcattttaggagaaaacataatgagtgatttagactctatgaacagagaaattaaaaaaaggcagctgagacggcagattgttccgcccccagcccctcaggaagaagacagtgaggaaatcgtacggaaagcccgaaagcgcgtcagaaggaaacggcttaagattattctgattattggagtgatcttaatcgccgcaggaatcggcctgttccagtatttccggctctaccagtatacgagttatgacgtcgtgtgggaaaaagagttaaaggaaggcagctttgtgggttatatggattttggcggcaacgtcttaaaatacagcaaggatggagcctcctacattgataaccagggaaaagagatctgggtccagagctttgagatgaagtcgcccactgcgtgtgtcaacggtaattatgcggcggtggcggatcagcagggcaacagcatctacatatttgataagtcggggcctacggggacggcgactacgctgcttcccatcattaaggccacggtctctgctcatggtgtggtcgcggcgatcctggaggactcaacctcaaactacatctatttttataagaatgacggaagcgttctggatgtaaagatcaaggcgctgctaaacggagagaccggctaccccgtggatatcagcctttccccggatggaacccagctgataggagcgtacgcctatttaaagaacggtgcgctgaacggccgtgtcgcgttccacaattttgcggaaatcggaaaaagcgtgccggatcgagtggtaggcggatttgacgagccttacgagtcttctctggtggcgcgggtccatttcctcgatgacacttattcctgtgcatttgcagataacagcgtatccttttattcgacaaagaacgcgctgtcgccggagctgcttaagcaggttgtggtggaggaggagatcagggcggtcttctattcgaataagtacgtagggattattgtaaataatgcggaaggcgagaatccggaccggatggacgtctacagtcctgacggaaacctcgtattttcggaggcgtttcgttatcagtacacccaggccgatattgacggagagcatgtaattttgtataatgaagactcgtgcagggtttataatatgtccggacgactgaagtttgaaggaacatttgattttcccgtatccaagatccggaacggcagatttcccaatacgctgctggtaaccggacctcagaacatgaaagagataagattaaaatagaccaggaggaataataccaatgagtaagatcgaaaccatgtcagtcaatgcaattcgcgttctttccgccgacgccatacagaaagcgaaatccggtcatcccggccttcctctgggctgtgcttcggctgcctatgagttatgggcaaatcacatgaaccacaacccggcagacccgaactgggccaacagagaccgctttatcttatccggcggccacggttccatgctgctgtattccctgcttcatttatttggttacggagacttatccaaagaagatatcatgaatttcagacagctgggttccttaacaccgggccatccggagtatggccacacggttggaattgaagccaccacaggaccgctgggcgcaggtatggcgatggctgtcggtatggcagctgctgagactcatctggcggaggtctttaataaagaggattacccggttgtagaccactatacgtacgtgttgggcggagacggctgtatgatggagggaatttcctccgaggcgttctcactggcaggaacgctgggactctccaagctgatcgtcctttatgactccaatcaaatttccatcgaaggaagcaccgatatcgcatttacggaaaatgttcagaagcgtatggaagcgtttggtttccagacgattaccgtggaagacggcaacgatctggaagcaatcggacgagccatcgaggaagccaaagaagatacggagcatccgtcctttatcaccattaagacacagatcggtttcggctgtccggccaagcagggcaaggccagtgctcacggcgagcctctgggcgaagaaaacgtactggcaatgaaagagaacctgggctggccatctatggagccgttctacgttccggatgaagtctatgagcactattcccgcattgcagaggaaaaggcggagacggaagccgcatggaatgtcatgtttgcagcctactgcgaggaatatccggagatggaagagctgtggaacgcctatcacgatgagaatgcaggagaaaaagccatcgaagcgtgtgcaggcttctggagcaaaccggaaaaggccgatgccacaagaaatatatcaggaaagattttaaataaaattaagacatatatgccgaatctgatcggaggttctgctgacctggctccgtccaacaagacgaacatgtcggatctgggagatttctccagagataaccgcggcggccgcaatctgcattttggtgtccgtgagctggcaatgacggcgatcggcaacggaatgatgcttcacggcggactgcgcgtgtttattgccacattcttcgtattcagcgattatacaaagccgatggcgcgtctttcctcactgatgggagtaccgttgacgtatgtgtttacacatgacagcatcggcgtcggtgaagacggaccgacccacgaaccgattgagcagatggccatgcttcgcgccatgccgaatttccatgtgttccgtccctgtgatgagactgagaccgagtgcgcatggtattctgcactgacctcccaaaagacacctacggcactggttctgacgagacagaacttaacgccgatggaaggcagcagcaaagaggcgttaaagggcggttacgtgattgacgactgtgaaggcacgccggatctgattctcattgccagcggttccgaggtagaactggctgtcaatgcgaagaagcttctttctgacagaaaggtccgcgtcgtttccatgccgtgtatggatttattcgaggaacagtccgcagaatataaagaatccgtacttccgaagtctgttcggaagcgtgtggcagtggaagccttaagcgacttcggatggggcagatacgtaggactggacggcgcctgcgtgaccatgaccggattcggagccagcggtccggcaaaccagctgtttgagcattttggctttacggccgatcatgtggctgaggttgcaagatccttatagacagtaaaatgtgatgcggcgcaggaggaaaaccgaatgcgccgccggataatacaaaagggaaaaggagtatcgttcaaaatgggaaagaaatgtattggcattgatgtaggcggaaccagtgtaaagatcgggttattcgaaacgacaggtgaccttctgttaaagtgggaagttccaacgagaaaagaagagggcggaaagtatatcatcggtgatgtggcggcctctatcttaaagactctggatgagaagcagatcccgatggaagaggtggtcggtgccggactgggagttcccggaccggttatgccggacggctctgtggaagtatgcgtaaacttaggctggcgtaatgtaaatcccggaaaagagttaagcgggctcctcggcggaatgccggtaaagagcggcaatgatgccaatgtggctgctcttggcgagatgtggcagggcggcggtaaggggtttgatgatatcgtcatggtcaccctgggaaccggtgttggcggcggtgttatcatcggacagaagatcgttgccggaaagcatgggctggccggagagatcggccacattcatatccgcgacgaggagacggagcactgcaactgcggcggcgtaggctgtgtggagcagatttccagcgctacgggcattgcgcgggaggccagaagaaagatggcggcatcggatgcgccgtctgcaatgaggaaatttggcgaccgcattaccgcgaagaacgtgctggatgccgcgaaggccggcgatgcactggcgcttgagacgatggaggtggtaggccattatctggggctcgcactggcacagatctccatggtagtggatccggaagtgtttgtaatcggaggcggcgtgtcaagggcgggacagttcctgattgataccatctataagcattacgatcagtatacccctatttccaagaataagagcggaatcgtgctggctacgctgggcaatgacgccggtatctatggggcagccagacagatcctggattaatttgctaattttccgttaatatgcccgtaaggacttgtaatcaggaataaatgtggtaaactcaaactatagatattacataacgaaaggggtattcttatgaaattttatgtttgcagccactgcggaaatattatcgcatatgtaaaaaacagcggtgttcctgtcgtctgctgtggggaagccatgaaggaactggttcctaataccacggatgccgcggttgaaaaacatgtccccgtgatccatacagatagtcagaaggtaactgtaacggtaggttccaccagccatccgatgcttgaagagcattatatcgaatggattgcgctggcgacaaagcagggcaatcagaggaaagaactgaaaccgggccaggagcctcaggcagagttcatgatcagcgaggatgatgaggtcttagaggtatatgcgtactgtaatctgcatggattatggaaggcatgagcagttaaaatgtagaaacagtgcttgaagcagatcgcctcaggcgctgtttttttgcatccggccatgttgtaatctcaaaaatttatagataatttgtgggcaaacccgtttgattgttaacaaacaggaagaataagtgggaaaaatttacaatagtatggacataacctgtatttgtaagtaaaataacaggtataaaaagtggaaaaagacttacaaagtggataactccggtctggagtgaaggaaacgtggaaaaaggagggacgtcatgaagtttggattcaatcccgaaaaacgagtcattacagagaagtctccgcctgtatttgcgtgtgaatccctgattttttttactgcctccggcagtggtattcttcatgtaaacggagtaaatctgaaacttaaaaaagggagctttggatggcttcacacgtaccatatctatcagttcgaaccggactggggggaggttctggagctgttctgctgtccatttgattatgcgtcagcctcttatatcgcctatcggaacagtttgaaaattacgatgactgtcctgacagagagttcccctgtggtgatgctgcgcggggaaaatgaggaatatgtcagatcactgatggaagaattgatcgaggagggatccgggagcgaagcagcagatatcgtacatggatactcgctgtttctggagatcgtcacgctgtttctccggtattcagcgagggagtatgagcggcaggaagggcaggaaaacaggtttgagcgaagtctggcctggaagctgcttcagcatatttttacctacagcaatgagaatctgacgagggaaaagcttgcgtctgcctatggtgtcacggaccgggtggtcagctgccagttaaatcttgtggcaggacagagctttgcaagcctgttaaaccgtgcgagggtggaccgggcctgtgatatgatgcattttggcggcctgacaatgcagtatatcgcgcgctatgtgggataccattcagagacttctttttacagatcctttaaacaggtgatggggatgacgcctcaggagtaccagaaagccgtccttccggaaggcggtgacgaggcggctcatattgacgtgcgggcgctgctgatccttaaccatctgtttggccattaccgggaacctctgaccacgcaggacacggcaaaagctttatacatggagaagaattctgtaaatccccttttgaaggaaaactttggtctggatcacagcgggattcttacagagcttcgaatgacgtattcggagtcgctgctggaaaacagccggatgccggtgattgatgttgcatttgcgtgcgggtataacagttctcatacgtttatcagaatcttttccgagcgtcacggaatgacgcccggagagtaccggcgtttttccgtacatggcggttatgaaagcagataaggggacaggagggaagaaatatggaatgttcactggagacgagagaagactccgggtttcgcggaaaacagtatttttcaccggaattactgccggaaaggctgaaggcgcgctcctttcgcttcaaaggggagggggcctttgaaaacagggaggatgtgaccgtgctgtccatacggaagggaagagggcgcatatacttaaacaaccggatttatccgctggagccaggcatggtatttattctttatccgtttcatatctggaagatgcaggcggaggaaggcggtgagctggaaggggaagaatgcgtgatgaatatgggggcgatgctgtttttgtttgccatacctccgtaccaccgtccggtgccggtttttgaagaaaacccttctgtttaccggctggaccaggaatatggaagccgtgtggagcggctgtgggaccggcttttgaaggaaaatgaatcgacggactgctacggcggaaaaatgcagttttcgcttatgatgcggattatggttctctgccggaaacatggaaaagtaatagactgttccagtttttaaccggttttgtcaaaaaataaacgaaaaaaacggctgtattgacactcctctaaaattattttatactgaggcaaaattctgacagggtcagataagtttagaggaggtatatcagtatgacaaaatgtatgatcggggcgttaaaggggaaagccgctgtaatcactggcggaggttccggaatcggaaaagctatggtggagcggtatctggcggagggcgcctccgtggtggctgcggatatcaacgaagagagcctgaaagtacttcaggaagaactggagccggagtatggagataagcttaagattcgcagggtgaatgtgtcgagtaaagaggaagtagaagctatgattgactataccatcgaggcctttggcaaagtggatgtggtcatcaacaatgccggtattatggataatcttcttccgattgccgagatgccggacgacatgtgggagagaatcatgaacattaacttaaacagtgttatgtacgcatgccggaaagcggttcagtatttcctgaaagaaaaccgcgagggcaccatcatcaatacggcatccttaagcggactctgtgccggccgcggcggtctggcctacacgacctccaaatttgccgtagtaggtctgacaaagaatgtggcgttcatgtattctgatgcgggaatccgctgcaacgccctgtgtcccggcgcgatcgagagcaacatcggaagcggaatgcgggaacccagcaagctgggctttacgaaggcggtaacgggcaatgccggccgtcaccgcaacggatccgcagatgaagttgccaccgcggcggtgttcctggcttctgacgctgcttccttcatcaacggtgagacgctgacgatagacggggggtggagtgcctattaaaaacgcgagataaacctgcattccgttcgttttaacgaaccgttgaactgtgctgacaatccggcagcgattaccttcccccataccggcttgtcagctgtctgcaggatgctgactgcgaaactgtctgggtgtgcagccataatggcgcataaacagctcggaatagtagcttaagtggttaaatccacattctgttgcgatctctgtaatgcttttatccgtctttttaagaagatgggaacttacctccagccggtaggaatttaaaaaatcaatcggtgactggcataagtattttttgaatatctgacagcatttgctccggcatactccgccggaggcggctatggctgagagcgtcagcttttccgtgtaatgctggtaaataaaggaaaccatatctttctgaactttcgtatccatgtcttcaatgcccggagcggcagttttaccggccttgaactgccgggccagatgtctccatatgagatagaataatccgatgatctccagttcatatccatactcaccgtgttctttcagttgtgtcatttccatcaggcagtccagtataaatccgtgatcgggtcggccggaatccagatatacaaattcagtctcgcggtcttccagaagcggcagcagatacttctgataaatcagcctgtttgatgaaaacagcgaaggatgaacaagaatgcagagaaaggaacaatcgttctggttaatggaggaaccgtaatgcatctgcctcgtgttgaccatgatcccgtcgtgttctttcagaaccagattcttcccattaatataataattcatctcaccatgtacaattctgataaattccaggtcatcgtgccagtggcacagtgctttcctgtccggataccgggacaattcgcctgtctgtatgtagagcggtatgcctgtctcgtcgtaacggacgatctcggaagcgtcctgcatgatatcaacgtttattttttcctcgttattcagcatatttttgaccctttcatttggtgaaggcggcggaggttctgatttcagggcattggcggtcgggattcactttataaaatcacgaaataaaatacgattgttataatataaaacgattatacagatattggagccgcacttcaagtaatataattataaaatgtgatttaacagcgataacttaactattacttttaaggagttccaatgagagaaaatgataaacacttttataagaatttatttgtgctggttcttccgattgcattccagaatctgatgtcggccctggtcagcgcttctgatgccatgatgctcggtatggtgaaccaggattccttatcggcggtatcgctggcggcacaggtgcagtttgtactgagcctgttctgggcagctttgaccatcgggacgaccattctggcggcgcagtactggggaaagaacgacaggctgtctgtggaaaagattcttgcgattgtcctgaagtattcttttgtgatatcgcttctgtttttcgcggcggcggcgctctgtccgcgtgtgctgatgcatatctttacgaatgatgagacgctgatcgcgctgggggccgaatatttgaggattgtcagctggtcttatctgctggcgggaatctcgcagatctatctgtgtatcatgagaaacagcggcagaactcttaagagtacggtgtttggctctgtttccatggttttaaatatttttttgaacggaattttgatcttcgggctgttggggtttccaaagctggggatcagcggggcggccgtggcaaccgtgacggccagagcggcagagctgattctggcaatgtgggaaaaccgcagagacggtgtggtccggattcgctggagccttctgaaagaatcacacgccgtactgaggaaagattttgtgaaatacacgacacctgttatggcaaatgaactggtatggggctgcggttttacgatgtttaccgttattatgggccatctggggagcgatgccgtggcggccaactccatagccggaattgtaaaaaacctgatatcctgcttatgcatcggtattggttccggaagcggtattatcgtgggaaatgagctggggagcggaaatctcgttcgcgccagagagtacggaggacggctctgccgcctgtccctggtgatgggagctgtgtcaggtgttattttgctggcgttcagtccctggatcatgcggtatgccgctaacttaagcccacaggcgcaggcttatctgcaggggatgctgtttatgtgtgcgtattatctgattgcgaagtcggctaatatgacggttgtggcggggatcttctgcgcaggcggtgatacgaagtttggttttctgtgtgatacggtcaccatgtggatcattatcgtgccagtcggattgctggctgcgtttgtctttaagctcccggtgctggcggtctattttctgctgaatctggatgaatttgtgaagcttccggcggtttaccgtcattataaaaaatatcagtgggtcagaaatctgaccagggaggaaacggttctcagcgggtatgcagagacagaaatcccgctgcagaaataaaaaggagatggaaaaatgctggcggattaccatacacacacgtattacagtgatgattctgagtgccctatggaggaaatggtcaggaaggctgtggccatcggacttgatgagattgcctttacagagcacgtggattacggtgtgaagacggatttgaattgtgactatgaggcatattttgaagagacagacaggcttaaggagagataccgggacaggatcactataaaggcggggatagaattcggggtgcagagccacaccattcccatgttccgccgtgattttaaatggtatcccttcgagttcgtaatcctgagcaaccatcaggtgggagacagggaattctggaactatgcgttccaggagggaaagagccaggaagagtatcagacggcctactacgaggcgatttatgatgtgatccggcagtataaggagtattccgtgctggggcatctggacatgataaaaaggtatgaccgcttcggagattatccggacgaacggatcatggggatggtggaccggattctgagtcaggtgattgctgacggaaaaggcattgaagtcaatacatcaagctttaaatacggcgtaaaggatctgatgccgagccgcgccatattgagactctaccgggagctgggagggacgatactgaccatcgggtccgatactcatgagacggtgcatctcggtgaccatattgcggaagtgaaacaggtgttgaaggaaatggggtatcagacgtttaacaccttttcaaatatggagccggtttatcacagcctgtaaataaaatctgctctgaagagaaacggcactgcaaacaggaaagttcaacactttcgtccggtttgcagtgccgttttaaattttgtatttgcccagtctccggatgtttacaatttttgaggatatggtatactataatccaattgattgtgcatctgcagaagatggcagaaaccctgtgattttaatgatactttatgctataatgaacacgcgggccgcaggtttgcgtgcctctttgaaaacgaccggaccggacaggggctgtgaatttaaacaaaaaaatcctcatataaatgaggagaccccggtcgacgagcaaccggggcaattatgaaaaatctatgtgcaatttgacgatataatcaattcgcataaatgatttcctatgcatttagtataaaaaatacatatgaataaaatatgaacttcatgtaaacagattatgaaaaatataaggaggcttcatgggagagaaaataagcagaaaaacaattgttatcggtcacaagaatccggatacagattcgatctgttcggccatctgttatgccaatttaaaacggtgcattacaggggagaattatcagccgggccgggccggagcagtcaacgaagaaacacagtttgtcttaaagcattttaatgtggaagccccggaatttgtggaaaacgtgaaaacacaggtacgcgatattgaaatcagggagacggcaggcgtgaaaaagaatctgtcgctgaagaaggcctggaatctcatgcaggaggcgaacgtcgtcactattccggctgtcaccgaggaggggctgctggaaggactcatcacagtaggtgatatcgccaaatcctatatgaacgtctacgacagcagtattctgtccaaggccaatacacagtataccaatatcgtggagaccctggagggcgccatggtcgtgggggatgagacgtcgtatttcagcgagggaaaggtcctcattgctgcggccaatccggatatgatggagtattatatttccaggggggacttggtcattcttggcaaccgctatgaatcccagctctgtgcaatcgagatggatgccgcctgcatcattgtgtgcgagggagcagctgtctccatgaccataaagaagctggcacaggaacacggatgcacggttatgacgacgccgtatgacacatttacggcggcccgccttgtcaatcagagcatgcctatcagctattttatgaagacagaggcgctgattacatttgagatggatgactatatcgatgatatcaaggatgttatggcaagcaaacgtcaccgcgatttcccgattctcgataagaacggcagataccgcggcatgatttcacgccggaacctgttgggagccaagggcaaacggatcatcctggtggaccataatgagaggagccaggcggtggaaggcatggagagcgccgagattctggaaatcatcgaccaccacaggctgggaacggtggaaacgattgcgccggtatttttccgcaatcagccggttggctgtactgcgaccatcgtctatcagatgtatcaggaaaatcgtgtggagattgaaccgtggattgcgggcctgctgtgcagcgcgattatttccgatacgctgctgttccggtcgccgacatgtaccgatgtggataagagggcggcgcttcatctggctgaaatcgccggagtggaggtggagacttatgcgtccgccatgtttgcagccggaagcaatttgaaagggaaaaccgatgtcgaaatattctatcaggatttcaagaagttttctgttggaaaggtatccttcggtgtcggtcagatcagttccttaaatgccggagagctggaggagttaaagggccgtatgctgccgtatatggcgaaggccagggaagaacatggaatggatatgatgttcttcatgctgaccaatattctgaccgagtccacagagcttctctgtgaaggccagggcgcagagcagatgattgccggcgccttccgcacttactcggaagagggcatgggcgttaaagatcacgtggtcagccttcccggcgtggtatccaggaagaaacagctgattccaggcatcatgctggcagtacaggcttaggccacagacggaaaggaagctgcggctggaaaggaattatgatggcgagacaatattttaaaccgggtaatatgctgtatccggttcctgcggttatggtaagctgtgggcgggagggcgaaacgcctaatattatcacggttgcgtgggcagggacggtttgttcatcaccggccatgctgtccatctctgtccgtcctgaacggtactcccacgcaatcctgatggagacgaaggaatttgtggtgaatctggttacaaaggatctggtgttcgccgcggactactgcggtgtgaagtccgggcgtgatgtggataaatataaagagatgaaactgactccgtcgccttcaaagtttgtaaagacaccgggaatcggggagagtcccgtaaacctggagtgccgggtgacggaagttaagaaactgggcacccatgatttatttctggcggaagtggtgggcgtttccgtgaatgagaactttatggatgagaatgggaagttccttttaaacagtaccgggctggtggcatattctcacggtgagtactttgaactggggaaaaaactgggaagcttcgggtattcggtgaagaagacgggaaacgggaagaaaagcggttctgcggagaagacgaatatcggaaataaacgtgacaatcagaaacatgcttccgtaaaaggcacgggagcaaaacgcgcagggggtaacaggaggaagagcaaatgatgcagaaactggacaatatcacactggtcggaatgccggcatcgggaaagagcacagtaggtgtacttcttgcaaaacgtctcggttattcctttgtggacgtggatatcgtcatacaggaaaaggaaggtcggctgttaaaggaaatcatagccgaagaaggattaaacggctttatggaagtggaaaaccgggtaaatgccggactttccgtacataaaagtatcatagccccgggcggcagcgtgatttatgggaaggaagccatggaacatttaaaggagatcagtacggtggtctatttaaagctcagttacgaggcggtagaagccaggctggggaacctggtggaccggggagtcgtgttaaaggatggaatgacgcttcgggatctctatgaggagcgtgtgccgtactatgagagatacgcggatattactgtggatgaaacggggctggacgcgggacagacggttgataagttaagggaaatgctgacagatatgtatggactcagaacgtgatatccggaccggcaaaaggagagggggagcacaggatgagaattacccaggatgtggcaaagacaattgttaatgaaatcagtaatacaattaataagaatgttaatttaatggacgaaaccggaagaattattgccagcacagcttctgaccgggttggaacgtttcatcggggggcacagaaaattgtagaggaaaaactggattgtttaactatttatacggaccaggagtattccggctccagaatgggaattaatatgcccatctattttcagggtgaaattgtcggagtgattggaattactggagagtgggatcagatcagccagtatgttcagttgatacggaaggccacagaaatcttattgatggaatcatatttgaaaaacagagagctgcatgatgaagcttccagacgagagtacgtttataaactgttgtttgaagagtttgacaggatcccggaacaattttatcaatatggtttttctataggcattgatgcggttttagcccgggcatgtctgactgtgtcctttaaagatgggagcaggggagagcggccaaaacaaatttatgaatatcttgatatggcagaaaagaaagtacatgaatatcaggcagaagcgaaacagatactggtttacagagaactgacacagctcagtatctttataccgggaaaagacagtgaagaggtaaaaagaacggcagaagatatcaggaagaggattactctgccggaaggaatcgagataaaagccggcctggatgagtcgttgtattcgggtgcagatataagaagcggatatacaaaggcatgtaaaagtttattggttgcaatggcttctaacgaccgatggctggtctgctacaatcagctgaccctgggacttttcgttgatgaggtatcgagggccacaagggaagagtatgttaaacgtatatttgcgtttatatcggatgaagaaattgcaaagtgggtaagccttctggaagtattttaccgatgtgaaggttcgataacagagactgccagcgaactgtttattcacaaaaacactttgcagtatcaactgaagaagcttgcctctataacggggtacgacccaagaagtctgtcatgtgcgggactgtatcaaactgctatcaagtttttttattccttttaattgtgcaaatagtatagaaaaataaataaaatacaagatatgctgtcgcttataacaaatatgcggcagcttttttcgttttcggtaacgatgacagaagaatttattttcgctatactaaatatatcaaaaaaatggagggggagaagatatggaggttttttcctgtgatacaatggttgccctgggaaacagtacaaaaagcggaaatttaatctttgcgaaaaacagtgacagaccgctgacagaagcccagccgctggtggtatatccggcaggtgatcataagccggatgaaatggttcaatgtacgtatattaagataccacaggctgctcacacttaccgggtactgggatcaaaaccattttggatatggggatttgagcacggtatgaatgagcaccacgtggtgatcggcaacgaagcggtatgggcgagagagccggaagaaaaagaagacggtctgctggggatggaccttctcagattgggattagagcggggaagaactgcatatgaagcgcttcatgttattacaggactcttgaaacagtatggacaggggggaaatgcagcgctgggcatggaacacaggtacaataatgcgtttctgattgcagatgatcatgaggcatggatcctggatacatgcggccgcagatgggtggcgcgcagggttaaggacgtcgcgggaatttccaattgctacagtacggaagagcaatgggatgaagactcaggtgatgtgaaagaatacgcatatgagaatggctgggtcagccgtgatgttccgtttaattttgcaaaggtatatagtgcgatgggattaaagcatcgggcggcccatccaagatatgcgagactcaataaactgttgaaccagcataagggcagtattgatttaaacgtgatcagaatgatacagagagaccattttgagggggaaattattgaaccgagatggagcccggccgatggtcttcacgtgagtatctgtatgcatgcaatcaatgagaaagccagcagaactgccgctgctgctcatatagagcttgcaaaaggagagacgcctgtctggtggaattgtttttctgtaccttgtatgtcaatttttgcaccgtataccgtagagtcagagcttcctgaaattatttcccatgcggagcagtgttacacggaaaattctgcatggtggcagtttgaacgaatgcagtatgcaatggaacaggattatccaaagtacattgggcagtggagaactgttcagaaacagctggaagaaaaatacttagaagatgtcagggaacatggcgcacctgcaaatgagaaaatcaaagcaaatacggaggaaatgctgaaagcggcagataacatgtaccgtatgattacctgccatcccagcgcatccggagagccacagaaggcggaggcaaatgaagtagcaaagaaacgggcgaagattgtattttaaaatgaatgggggatttacttatgatcagtatggcggcattggcatggaccggaattatgattatagcgggagtggtattgagggcgaaagtaccttttttacgcaataatctggtacctgcaagtgtaattggtggtgttataggctttatagtaatgaatctgggatttattacggactgtacggttggtgaatttggggatattgccaacctgttgtggatctttacatttgccaatatgggcgttactctggcggcgaaaaaggagactgtaaaaactgcagatggccagtcattcagacaaaagcttgcgaacagccagttttccggtatctgcggaatgggatttatctgggtcattccgtatgcgttttcaggtcttatcggatttcttgtactgcaggtgattggaaaatactttggtatgcctgcgattcacggtctgcagcttccctttgcatttgcgcagggaccaggacagtcggttaactatggcggaatgatggaagcaaatggagtagcggatgctgtgcaggtaggtgttacttttgcggcaatgggatttctggttgcatttctgattggggtgccttatgcaaaaaaaggaattaaaaaagggcttgcaccatacagcggtaagatcggcgaaagtatgttaaaggggttatacgagccggatgaacaggaattctacgggaaacagacaacacatcccggaaatgtggatacacttgctttccatgtggctttagttggtattgcctgggtaggcggtatgtatatcggtaaactttgggcgctggtaccggggtacataggaacattattttccggatttttatatctgaacagtatgctttgcggatatgtaatcagatggattattggaaaactggggctgtcaaagtatctggacaggggaacacagattcatctgtcaggattttgtattgacatgatggtaacaagtgcgtttatggccatatctcttgaagtagtaggaaaatggctggttccgattctgatcctcgtactgattacaacggttttcacctatatcattacccgttattttggagaaagaatgggaggaaaatatggattcgagcgttctctcggtgtatggggagcaatgacgggaacaaatgctacaggacaggcattagttcgaatggtagatccggatcggaaaactacagttttggaagaaatgggtccaatgaatgtaattaatgtaccggcctgttacgttgttatgcccgcggttattgcttattcagccggagaaatttcgacgacggcattgtttgtgtctttaataggagttggcgttgcatttatggcagcaatgcttgttactggcgtatggggcaagaagacctatgactacaggaagggagaactttattactccctggatgatgaaacagaacagaaggcggcccagtaagcagagagaggattatatggatatgcgggagctctccggtaaaggctgatggtccggagagcctctctttctttagggacaggagaagaaatgtctggaaatataagggaatatctatttattattatcgttctttttgctaatattatagaaggaattacaggatttgccggaaccatgcttgcaatgcctgcatctatgatgctgattggggctgaggaggcaaaagttattctaaacatggttgcactcatggtaagcagtacgattgcagttaaaacttataaaaaaatcaacagaaaagagctggtaaaaattacctcgctcatgatgttggggatggtcatcggtctgtatctgtttgctgttcttcctgttaagcttctgtcagtctgttatggtgttctcattattgctgttgcagtgaacgggctggcatcaaaaaaaagaatggagctgccggctgggatattgatcataattgtgttggcggcagggattattcacggtctgtttctttccggaggggcactgcttgtagtctatgttactgcggtaataaaggagaaaggtgtaatccgcgctacgcttgcgccagtatggttaatgctgaataccataattttgcttcaggatatctggtttggaagaattacatttcataccctgcgccttaccggaatgtgtatgattcctgttattcttgcactggttctgggaaattatctgcataataagataaaacaggaacggtttgtgcacttgacctatttgttattgatcatttcgggggtcagcctggttatctgatagaatttattctcaaaataaaatttgctatgacaggagaggtggtaatgaaatttttatttgcttcagactcattcaaaggaacgctgacttcagaacagattatcgctcttctgactggagctgcaaaaaaagtatttccagactgcgagactgtgggaattcctgtggccgatggaggggaaggtacaattgacgccgtcatatccgtactccatggatcagttcatgaggttaatgcacacggtccattaatggaagaggtggtcagctattatggagagtcgggagatggggcggcggtcattgagatggcagtgtcttcgggtctgcccatggtaccagtaaataaaagagatccccgggtgacgacctcgtatggaaccggtgaactgattaagaccgcccttgaccgcggctgccgtgacattacgattgcgatcggcggcagcgccaccaacgacggaggtatgggcgccatgcgtgcgctggggatacgatttctggatgagaacggagaggaactttccggatgcggaaacgacctggcccgggtggcggacattgatatcagaggacttcacggtgcagtgaaggatgcgaagtttaccatcatgtgcgacgtaaacaacccattaacgggtcctgacggagcgacctatacctttggaatgcaaaaaggcggcactccgaagatcttagacgaactggaacagggaatgattcattatgcggccctgatccgggagaaaatggggatcgatgtggaccagataccaggctccggcgcggccggggggctgggagcggcattcagcgtatttctcaaagcggagatgaagtcgggaattgagacggtgctggatctgattcattttgatgaactactggaaggggtggatctggtcataaccggtgagggaagaatcgactggcagtctgcctttggaaaggttcccagcggaatcggcaatcgctgccgcaagaagggaatcccggctatagccattgtcggcggcatgggcgataaggcggagatgatattcgatcatgggattgacagcattatcactaccattaacggggccatggggctcgatgaggcgctggaacgggcggaagagctgtacgccggtgcggcggagcgggcattccggatgattaaggcgggaatgaagcttcaggacagatcatagtacggtaaaataaaaggaattgcggccggggctaggaagtgccccggccattttgggttttctgggagtttgacaagtcagactctttgctgcgaagttttagtctatacaaataatttacaaaccatttacaacaataaggtatttactcagttaatttcctgctaacataagtatgaaaaaaacttttaaggaggaaatgatgagtgtgaaactaaaaaggttaacagctcttttactgagcgcatgtctggcagcgggcaatataacgactgcatttggcgcgcctgtacagcaggatccggaaccaggggcgagggtacggacgagcaggctgatatccacagaagaaacggtatggagatatctggacgataatacggatccggcggcagcggatgacacgaaggaggaaacgccggggagccccagcaacgcatcaccttctgacgcatcgccgtccaatgcgtcggcaaaatatggattttatcgttttgctgcgggcaaaaacaaagcatcgtcgaagaccggcagactggtctggaccagtgcggattacgatgattccggctggaaagaggcgagaggaagctttggggcgaagaaaggtgagattgcagatctgggagacggcctgataccctatactctgttggcccagtatatagaagggccggatgtggcggaagatacggatattccggcctatttcttccgtaccacaatcgaactggaagacatcgacagcatcagtgccttaaacggcgagatcttctatgatgacgcggccataatctacatcaatggcgaggaagttcacagggccggtgttccggaaggcggttacacacagaatctggagtatggagggacaaatgcgggaacgccgattaacaataagttccagatcacagacttatccatgttaaaagaggggagcaacaccgtatcggtagaacttcatcagggcagagccaacagctcggatatctattttgatttctgctctctggaaatagggacgcctgcctcggaatcggatgaattcatcacgacagagggcacggtttggaattacctggagaacaacaccgatccggcggaaggaagtgaggaccggactgtatggacgtatccggagtttgcggatgaacagtggaagtccggaaagggaagcttcggagccaagaaaggcgcgattgcggaccttggaggcggatatattccggatacgctgttaaagcactacattgacgatacaaaaacggcggtgcccgcatattttttccgaacagacatctatctcaacgatgtctccgatctggaagcgctggaggcggaaatcgcctatgatgatgcggtgatcgtgtacatcaatggaaagaatgtctatgaggggcaggtaccggaggggggctatgacaagaacctggcatacggttcggccaatgggttgtcagctccaagccatgatactattacaatcaatgacgtttctatgctgagagatggggtaaatacaattgcggtagagcttcatcaggacagggcgggcagttctgacatttactttgatttcatttccctgaaagctgcacagccgaagccatttaaggcgatttctctgggagtgtggaatgatgagacacagacggctgttacctggtattcctcaatcggggaagacggcaaagtgagaatcgcagagaaggcggacatggacggggattcgtttccggaacaggctttccagtttgcagcggaaagagcggaggcaaatgacgccggattctacagcttccaggcagtcatgacagggctggagccggataccgattatgtttaccaggtcggcgccggggaaacctggtccgatatttatgaatttacaacccgggattatgagaatggatttaactttctgcttgcaggcgatccgcagattggcgcgggaagcacagatacggatacagaagggtggcagaataccctgaaaacggccatgaaggcatttccggagaccagcttcttaatcagtgcgggagatcaggtcaacacggccagcaatgaggcgcagtatgcgggatacttaagcccgaaggaactgctgtctctgccgacagcagtaaatgtaggaaatcatgacgcgggaagcagcgcctacagccagcatttccaggtgccgaatgtcagcagtatgggcatgaccgagaagaccgggaaattcggaggagactactggtatacatataacaatgtgctctttatgtctcttaactccaataatatgagtacggcggaacaccgggagtttatgaaagcagttctcgatgagaatggggctgattcggactggacggtggtaacattccatcattcaatctacagcacggccagccatgagtcggacaatgatattatccagaggcgggcagagctctctccggtatttacggaactgggaattgatgtggtgctgatgggccatgaccatgtctataccagaagttacatgatgaacggaacggatccgatcattcctgaggatggaacagtgccggaaagtgtaacggacccggcggaaggagaagtgctttatgtgacggccaactctgccagcggcagtaagtattattcgatccataataaagatttcccttatgcggcagtgatgaatcaggagagcactccgaatatcacaaacgtggaggtgacggataagtcttttgcgattactacttaccgtactaaggatatgtctgtagtggatacctttgcaatttataaggatggctaccagcctccggaatctgttattaaatcggtttctctcggagtaggtgcggacgagtcagagactatggttacctggtattctgattcaaagctgccgggaaaggtacagcttgtaaagaagagtgatctggccaacggtgtatttccggagacagcggcagagtttgcagcagagaaggagagtgctaatgaggaagggtttttcacgaatcaggcagtgatccgcggtttggaatccgctacagaatatgcttaccgggttggagacggaactgcctggtcagatgtgtatgacttaacggttcaggattatgagaatggatttaatttcctgcttgcaggcgatccgcagatcggggcaggaagcacggatacggatattaaaggctggcagaacaccatggagacggccatgaaggcatttccggagaccagcttcttaatcagtgcgggagatcaggtcaacacggcaagcaatgagacgcagtatgccggatacttaagtccgaaggagctgctgtctctgccggcagcggttaacgtgggaaatcatgatgcgggaagcagcgcctacagccagcatttccaggtaccgaatgtcagcagcctgggaatgacagagaagaccggaaaattcggaggagactactggtatacgtataacaatgtgctctttatgtctctcaattccaacaatatgagtacggcggagcacagagcgttcatgaagcaggtgcttgacgagaacggagccgatgcggactggacggtggtaacattccatcattcgatctacagcacggccagccacgagtcggacaatgatattatccagaggcgggcggaactctctcctgtatttacggagctgggaatcgatgtggtgctgatgggccatgaccatgtctataccagaagctatatgatgaatgggaatgatccggtggttcctgcggatggtacagtgccggagagtgtgaccgacccggcggaaggggaagtgctttatgtgacggccaactccgccagcggcagtaagtattattcaatccataataaagatttcccttatgcggcggtgatgaatcaggaaagcactccaaatatcacaaacgtagaggtgacggacaattcttttgcgattacaacctatcgcacgacggatatgtcggaagtagaccattttacaatttacaggacagaagctccgaagccgcagcctgatgtgacgggcgatacagtagcagagattctggaaagtctggatcaggctctggaacaggcggagacagagggagagaggcaggaaattctaaagaaagcggcagaggcggccgaagcactctcctatgatcctaatacaatggatgaatccgaaatggatgaaatcaaaaaactggaagatatggttctggcaggctacagcgaactggcagctgaaaccgatgtgcaatccaaaaaggtaaccggtgtaacggtggaaggtgcggtgctcagtgttccgttaaaggcgggtgtcaaagcggtgtctgtactgaaggttagcgatatggaactgccggaggcgctgggatttgagacggaagatgttatcgcactggatattcggctggacattataagtgatgatccggaggtgtcaggcgggaatatccagccgaaggttccggttaggattaccattgacgcgccggaggacattgatctaaacaggctggtgctgatgcattacaccaatggagcatatgaagacgtgaaatttacagtaaaagatggagcgatcagttttgttgttaatgcgttgagcccgtttgtacttgcggaaaaagcggaggcggataaaccggatgatggcggggatggttctgatgacggatcttcggataatgggccttcggacaatgggccttcggacagtgggtcttcggacaatgggtcttcagataatgggtcttccggtaatggatcttccagcagtgtgcaggggtcatggattaaagaccagactggctggtggtatcagtatcagaataagacgtatccggtcaatacctgggtgtccatacagggaatctggtatcattttgaccaggccggctatatgcagaccggatggattcaggtgaatggcgtatggtactatctacagccgtcaggggccatggtggcttcagactgggtattgtatcaggataaatggtattactttaaccaggatggggcgatggccactgcaccggttcactataaagggacagagtaccggttcgacgaatctggtgcgtgtattaacccgtaatatttgttaaaagcagacttccggatcggccagccggtccgggagttttatgattggtgcgcccggcggcgcacgtttctaaccggtgcaagtccggaatccgcccggtggtgggaaggatatagccgaaggcaagggtgtccatcgtgaggtggaatctgaaggaagctggatatggggaacatactaacccatgggcaaatctctggtctgacgaacagaaatcacatcaggccatgcgtgagggtaaggctgccaaacaagtcgaagcccaataaccacacggaatcatgtatggtaaatgtggcagatagatggagagaaagaaacgtgtggtacccggggaggtctgtgcggaatgtcctgaaagggataaccactatcgtgaggtagtgctgaacgtacagaagtcagcagaggtcatagtagtcgagagacgaaggaccgaatcaacaggagtctttagtacaaccgggaaaggaggaaagaacattgggtacagaaaacagagatagctgctcacaaagagacagcgcggaacgtgaagggtatgtgagagcgcaccgttctttccgccggatatggaaggaaagagacagtgcacagccggaactcttagagaagatactgaataaggacaacttaaacagagcttttaagagagtaaaggcgaataagggagcgccgggaatcgacggaatgaccgtagaggaaacaggtgactgcctaagggaaaatcaaaaggaactgatagagagaatcaaaaggggaaaatacacccccgacccagtaagacgagtagagattcccaagccagagggaggaatgcgaaagctgggcattccaaccgtgaaagaccgtatcttccagcaagccataggacagcagttaatgccagtctatgaggcgctgttctcggagaacagctatgggtatcggccgggaagaagcgccagggacgccattttaaaggtaaaagagtatgcagaacagggatacacccatgccgttgcattggacctgtcgaaatactttgatactctgaaccaagaaatgctattaaatatcctgcgcagagatgtaaaggatgaaagggttatccaatggataaagagatacctaaagagtggtgtcatggaaaacggtgtagtcatggagacagaggaaggatcgccgcaaggaggaaatctatccccgctgctggcaaatgtctatctgaacgagttcgaccaggagtacgagaaacgaggagtggcttttgtacgttacgcagatgatatagtattgttagctaaaagtgagagagccgcaaagagacttctggaaacaagcacgaaatatctggaagggacgctgaaattgcaggtgaaccagaagaaaagccgtgtagtaagtgtatttgcaatccgaaattttaagttccttggcttcacattgggaaagaacggaaagggcatttatgtccgggttcatgggaagtcatggaagaaaatgaagtcaaaactgaaagaccttagttcccgaaggtctgttcagagcatacgcccatcgttagaaaagataaaggtgtatatgcggggctggctgaattattatggagtagcagatatgaagaaccgaatagagggactgaaccaatggctatatcacagaatccgaatgtgtatatggaaacaatggaagaaaccgaaaacgaaggtaaagaacctgctgaaaatgggagtgccgaaagaattggcatggaaggcagggaacagccgaagaggctattggtttaccacacaaacggtagcggtaaatatggcaatgacaaaagaaagactgataaacagtggctattatgatttagccacagcctatcagtccgtgcacgtcaaccgttgaaaccgccgtgtaccgaacggtatgcacggtggtgtgagaggacgggagttaatcactccctcctactcgatttccggctgacgcggaaacagggaggaaataagtgatggactggataaagaagaagcgtatggagattggcctggccgctgcagtagtattgatgattgcggccatttgtatttataataaggcaaaccctattacttataccatgtatgaaaatgggaccatcaattacgtaaaggcaagggtgctggaagtgacggatcagcagctggagccggtggaggaagcagagggacgctggctgggaatccaggaactgaaggtggagcttcttaacaagggccattccggggaaatcattactgtaaccaattacctgagtacgacccataatgtttatgccaaaaaggggcagtcattaattatcaaggcggattgccctgagggggtggaaccgttttattctgtctataattacgacagaactacaggacttatgatgaccggcattgtctttctggcgtgtatggtgctggtagggcggggaaaaggagtaaaaagtattcttagcctggcatttaccatgttttttatcatagcgtttctgcttcccatgatatacaggggctattcccccgtacttttgagcattcttacgattcttgtctctacggctgtctccatgctgcttctgaacgggtacagcgcgaagacactgacggctatcgcctctaccatgacgggagtgctggtggcagcaggggcgtttgcggtcataactgcggttctgcatctcgacggctataacgaaagtcaggcggaggagcttttgctgatttccgaaaatacagggctgaaaatccggtatattcttttcgcaggaatcctgatcgcctctctgggagcggttatggatatgtgtatgtccattgcggcctctctttttgagatgaaaaatcagaatccttccatggattttaaagcgattgtcaaagccgggtacgccattggaagagatatgatcggcaccatgtgcgcgactctggtcctcgcatttaccgggacggcccttaccatgatgctggtactgatctcatacggtgttcagccggagcagctgatgaattcggattatattgcgattgaggcggctcacagtctgtcaggcagtctggctgttatcctgtgcgttccggtgacttcattcttatccgcgtatgtgctggaacgaaataacagaactaaataaaaataattatcattatcactattgcaaagagaggaagactctgctatactgtaaccagatggaaatggctggaaatatcacggccgttaccattgagtaaatcatgcaaaggcagattgtcattgaactataaaacaggatattgcattttccatatgacagggtgcctttgcggcactctgttttccggttcatgaggctgcacagtcatgccatgccggacggcagcataaaataaacctggttagaggaggagtttatcatgataaatattcagaaggcggccattatcggctgcggatttgtaggaacatcaattgcattttcccttgtacagaaggggattttttcggaactggttctgattgacgccaatgagaaaaaggcggaaggggaggcgatggatctaagccatggacttccgtttacgaagcctatggagatcagggccggaagctatgaggatatcgccgactgtgccatgatcatcatcacggcaggtgcgaatcagaagcctggagagacacggctcgacctggtccataaaaatgtggagatttacaagagcattataccgaagattgtggagaagaaccaggaggcgacgcttctcatcgtctctaatccggtggatatcatgacgtatgtggcgcttaagctttccggttatccccgccataaagtgatcggctccggaaccgttctggatacggccaggctgaaatacttgttgagccgtcatctcgacgtggacagcagaagtattcatgcatttatcatcggggagcacggcgacagtgagctggctgtgtggagtgcggctaacgtatcagggatcccgctgaatcatttttgtgaactgaggggatatttcgatcatatggagtccatggaccgcatttaccaaagcgtccgggacagcgcatatgaaattatagagaaaaagggggccacctactacggtgtggctatggcggtctgcagaatcgctgagtctgtgatccggaatgaacattccatcatgccgatatcggtttacttagacgggctttatggacttcacgatatttgcttaagtattccgacggtagtcggccaggaaggagcggaaaaggtgctggatattccgctggacttaatggagatgggaaaactggtgtattcggcagaagagttaaagaagattattggagaattggagctgtagtgtttgcctgcaaatgaatcttagttcacaaatctgaatgaaatgtggaaaacagcttttcatctttaaaataatgtagatagaatttgtccagacaaaatccggacatagcgaacgcacctgtatttggcgtgtacgttatgcccggatttttttatggcaggcagaaaacaagacggtcatggaatatacaggaaaccccgccgtttttatggcataacatctcccaaaatctaatttggcagcttttctttattctgttgcagatggtgcaatctcaggattcaattttaagtgtctcgtaagctggaaatattaacgttaatcatagtgatatttacggtacttacatatctggataatcaccagaatagaaaatgagctatcctctctggccagaggatagcccggtaacttaaaattactgtttgcttgatcggcaatcatcggtttcttgttagcccttgattacttttggttacattatacactgggtacttgtatttttcaaatacccttttaaataaaatattacaattccttgaaatattcttatatcgttatctgctcaacctcatcccctccgaggaataccacagcctcaaacgcccgaagcttcatatgcacctcgcaggccggagcatcttcataattcccaatcagccggatcccgttttcaggaaggcactcttttggaaggtcaatgacagccggatctgagaaaaagttaagaaccaccaggagcttctgcccctgatagcgccgtgtgtaggcataaatggacggatgttcttcgcataccggattgtagtctccatagacaactactttatgatttctgcggatacggatcagatcctgatagtaatgatagatactttccctgtcacggatggccgcttccgcgtttatctccgtgtagtttggattgacgggaatccatgggactgcgtcggtgaatccggcattcggggaggcatcccactgcataggcgtccgggcattgtcgcgccctttggcgtagatcgcttccataacgtgttccggatcctcgtgaaataccgtgactgcctcggcataatggttgagcgtgtcgatgtctttgtattggtcgatggagtcaaaccggatgttggtcatacccagctcctcgccctgatagatataaggagttccctggagtgtatggagaaatgtggccagcatcttggcactttccacgcggtattttccatcatctccaaagcggcttaccattcgtgcctgatcatggttatttaagtacagactgttccagcagccatccgccaggctggtctgccatttcccgaatacggctttcagttcagacagcttccattggcggatcttccatttgtcttcaccgaccgcatcgaggtacatgtgctcgaaggtgaagaccatgtttaattcatggcggtcttcgtgagtatagaggcgcgcctggtccgtggtgacggagaccatctcgccgactgtgatgaaatcccgctggctcaggatgcgccggttcatttcctgaagatattcgtggacgtgcgggccgttggcaaagtaaggtgtagccagataggggccatcctcgggcatatccggaagctccgcgaccttggagatgtagttgattacatccatacggaagccgtcgattcctttatccgtccagaactgcatgatgcggtacacctcttcccgcacaaacggattatcccagttcagatcaggctgtttttttgtatacaggtgcagaaaatactgatcaccctccggttccttttcccaagcagaaaatccgaagtgactgcaccagttgttaggcggcagaccgcccggtttcccatcccgaaagaagtaataatcccggtaggggccgtttttgtcctttaacgcagcctggaaccagggatgctcgtcagaggtatggttgaccaccagatccatcatcagctttagtcctctctcgtgcattgccttaagcagctggtcaaattcctccatggtcccaaactcttccatgatttcgcagtagtcactgatgtcatatccattatcgtcattgggagaacggtagatgggggaaagccagatcacgttcacgcccagctcttttaaataatccagtttccggataattcctcccaggtctccgattccatccccgttggaatccataaagcttctcggataaatctgatagacaaccgcctctttccaccaggtttctttcattgaaatcccctccttttaacgctattgtagcatgagatgactgattccacaaacgttttcattcatatttggaaaagaagtaaatattatatataaaatatttgacttttacgtgcaatattgcaataatagaatcagattagctccgcaaacgttttggagaggtgaggtgctttaatggaaaaaatagaattgggagaatggagcgtgtcagtgtcccggtgggaccgggcgtggcagccccagatggaatcgctgttctgccagggaaacgggtatctgggggtacgatacgcggtggatgagccggttcccggacagaaacgcgatacgtttatcgcagggacgtatgattcctgttttggagaggtttctgaacttccgaatcttccggatgtgatgggaaaggagattaccattgacggggagctgctccagctgagcgaaagaaatcatgaggattactgcgtcatgcttcatctggataacggactggcagaaaggcgctttacctataaaacggaacagggaaaacgggtaaaggtaaagatggagcgctttgtgtcgttaaagaaccgccacctgctgatgcagagactgtctttaattttggaggaaccggcggaactggagatcaggaccggaatcaacggacaggtgagtaatagcggagcccagcattttacggaaggtacgaggcactgcattccgggagagcgggaggaactggtatttcaggcgtgggattcgggggtgcgctttgccgctgcctgcgctccgaggctgagtgcaggatcataccgcgcttccattgacatggaccggcgcaggattgggacgctctatcagatttccgcaaaaaaaggggaggagatcatacttgaaaatgcggccgctttttatacttccagagatatcgagtattgggacggtgaaagcccttttgcagatacacctttcaaagaaaacgcatgtgggaaacacaagagcccttccatagtggaagatgccaacgcactggcggccgaagccgccaatgcaggattcggctattcgctgaacgagagcggcgaggcgtggcaaaaatactgggacttacatgatatccggattgacagcgacgatgtattcgattcctgcgcggccagatttgccctttaccacctgcggatcatgacgccggtgcatgacgagcggatgaatattggcgccaaagggctgtccggggaggcctataagtgccatacgttctgggatacggagatgtttcttttctcttcctggctgtacacagagccggaagtggccagacggctgctccgttaccgttatctcacgctgccgaaggcgaaggaaaaggcggctaaatatggctgtgagggcgcattatttccatgggagagcgcctggattacagacggagaggtgacgccgtcagaaggcgcgcccgatgtggtgacgggaaagccgattcctatctataccggcatccaggagatccatgtcaatgcagatattgcgtatgcggtccaccggtattttgaggcgacagatgatcaggcattcatggaagaatgcggctttgagatgattctggaaaccgcgctttattgggcttcccgcgcagagtggaacgaagaaagaatacagtatgatataaacggcgtgatcgggccggatgaatacagcgagcatgtatccaataatgcatacacgaattatatggcgtcatggaatatccatgaagcactccggattctggaaaggctcagacagaccggaagagaagaccttttagcggcgctggaacaaaagacaggggctgtcaccagggaggaatggatgcgggaacgggcagagaagctgacgcttccacaaccggattccagaggaatcattcctcaggacgaggcgtttttaagtcttccggaattggatttaacgccctttcgaaagggtggaaaaaagatactggaacattacaatgtagaacagctctgcggatatcaggtgttaaaacaggcggacgtagtaatgctgctgtcctcaatgccggatctgtttcctgaggatattattcttaaaaattaccggtactacgaagaacgatgtgtacatgattcctccttaagctttaatgtgcacagcatggcggcagcccgccttggaatggaagaggaaagctttcggttgttccggaaggcggccgaagtggatttaaacagtggactgacctcggcagagggaattcatgcggcggcgatgggaggaatctggcagtgcattgttctgggctttgccggcgtatcggtaaaggacgggcgtctgtctgtagagccccatctgccgaaatcctggcggagcgtgtcattttcgttcgtctggaaaggcgaaaggatggaactgacggtggatcataaggaggtgcggtatggtaaaactggtggatgtagcaagggcctgcggtctgtcggtgtcacagacgagccgggcgcttaacggcaggcaggatgtcagcgaggagacgaaacggcgcgtgagtcagacggccgcagccatgggttacgtgaaaaatctcacggcacagacactgtctgcgaagacgccgatgcaactggcggtggtggtaaccggggtcagtgagcagacggagaattcctcctttttctttggcattatgcagggagtgaattcatttgccaatcagaatggatatgagaccgtggtatatatgatggagaaaagtccggagtgctttgagacgtactgcaggcagaggggcgcgggcggaatgatcctgatgaacgcggattacgatgaaccggcggttaagaaggtggctgaagggaattttccctgtgtctttatagatattccgtatacaggggagagaaagggatgcgtcatcgtcaacaacgcctattactcgagactagctgtggaacacatggtgaaacggggcagaaaacgcattgccatgattaccggcagcgggcattccatcgtggaaaaggagcgggaagagggatatatgcaggcactccgtcaggcggggcttacggttaagccggaatggattgtaaagggggatttccgctatgatatggctcatgagcaggcggtccggctcatggaaaaggaaccgaaaattgacggattcttttgtgccagcgatttaatggctctgggagtcatcaatgccctgcgcggacagcatatcaagattccgaagcaggtttccgtgtttggattcgacggactgttaagcagtgagtatgccaggcccaagctgtcaacgatacgtcagaatcagaaatacaaggggtttctggccgccagaatgctggcggatattctgggaaatgaagcgtatgaaccgaccgtggttgtgccctgcgaagtatgcctccgggaatcggtatagagaggtgggaggatgaactggtataaacacattccgatgcagagaaagattctggctgcctgtctcgtggtaatcctggttccattgaccatactggtcagtctcattctgagaagaagcatggacgaggagattgacagaagtacggtaaatatgactcaggcaaacgagatgatcgatgacaggctggaaaccattgtgaaccatttgaagaccacatccgccatgtatctggtctatccggatattatacagtttgtaaagaatgattttaatatggaccggccggaatacattaccactttaagggaactgagaaaaaatgtaatgtccgcgaaaatcaatccctacgtctccagcattacctatttatccaacgggaacaacgcctacagcggtgccggatataatgagacttatatgaagcggattgaaagctttgccgggaccatgaaggcggaaaagataaaaaatatgttgtccccggtctatgagacagtaatcaaccagcagagtgtgaagacgatcacctacggcttttcgctggtggatacgtatacgtttgaaccggtggggtatgcctttatcaacctggatttaaaacagttcgggcagagtttcatggtctttacagaagatggaagcatggataccatggcggtgcagggggattacgtcatttatcagggaccgcgcgtgacggatgccatggcagccggtgtaaggcaggcgctttctgagaaaaaggaagagtttgcagccaataaaaaccaggtgatggacttgagtctttccggggaagactggcggctggtggctacatataatgaagcgctggatttaaccatcatcagtatggcggcggggcgggtgctgaagcttcatatgatgcagggaatggcatcctatatcatcattgtcgtgattatgaccgcagtctttatcggcgtcagtatcctgttgagtgtaaaactgacgcggcctatccgggtgctggaggagggcatgcatcaggtagaaaatgggaaactggtccctatcacgcaggagctgaaccgccaggatgatttgggccggctgattcacggttttaacaacatgacggcaaggctgaaggaaagtattttgagggagtatgaatcaaagaatttacagaaaaaggcgcagatcatgatgctggagagccagattaatcctcattttctgtataatacgttaaatgtgatcaattccattgccatactggaggacgtaccggagatatccgaactggcgaccgggctgggggatatgttccgttataacatcagcggaggaagcctggtgaccgtgatggatgagatcacgcagatcgagcgttacaccaatattcagaagctgtgtatggcaggacagatcgaagctgtttttgatgtcccggaagaggtaagagggaagaaaatccttaagttcctgcttcagccgctggttgagaattgttttgaacacggtttttcccgggataagagggatggccggattgagatttcagcttcctcacaggaaggtgtcgtaacgctgacggtagaggacaacggctcaggaatgtcgggagcccggcttaagcagctgaaggaaaagtgccgggagcagggatctctgtgcctggataaagaagagacagactccatcggactgctgaatgtgaattttcgtctgaagaattattatggagaagagtatggtttgatcctggagagtgaagagggacggggaacaaagattaccatcaggatacctgagggtgaaaaatagtcataggaagcaggtgaggtcatgaggtttgcagttgcggatgatgttcttttggccagaaaggctgtggaaaaattaatactggaatgggaccgggacagtacagtctgctgctcctgtgacaatggggatgaggttttaaaggttctggaagatcagaaggtggatgtgctggttacggatatccgtatgccgggactgaatggaatcgctttatccgaagtggtgcgccagcgttttccatcggtggatgtggttttggtaagcggttacgctacctttgattacgccagggccgcccttcacaacggagtgcgggattatctcttaaaaccgctgaaaagagaagatctgtttcataccctggatgcgataaagaaagcgcgcgcggaggaaaaaaggcaggaagacctgctccgtgaggtacaaaaacgtgccggaagctttttgctgctccggtatttatccggggaagagcgccctgaggatgtgctgcccagggagatgacagggctaaaaaacggctgctttttcgcggctcagattatggtgaaaggcgtgaagtttgaggagctgtcgatacggcttcgtgatctgtcctttagcagagacttgatatttgaggacatcctgcactctggtgcgggagttattgtttcctgcggggaagaacgtgctgtggcggtatatgataagaaaatccgggcattgggcacattggcggaacaggagaggaaggaggggcatccggctgctgtaggggtcagtatgctgctcaccggaccggattccataagggaggcttattctcaggcgagaagggcctgctgtctgcggctccaggacccggaacggggattataccggtttgataccgacaggggaaaagaactgctctcaaaggaagacctgcatttaatcagaaatcacctgaatgcaaaacgggtaaaggaagcaaaagagttctgcttaaaaaagctgatccagccggatatgacgacggttctgcagttggaacagtcatatcaggcgctgctgggcatctgtttcactatggatatggaagcgatttaccggcctctctgggactttgatgacatgaacggacttctggattatatctgcagtatggcgtgctgcagcggggaaacggaccgaaccgtaaatgaaggggatatcatcgatgagattcaggcattcctggaagataattattattgcgagatctctttaaacgaactggccgccacgaagtattttatgaaccccaactatttgagccgtctctttaaggcacggaccggaatgggattttctaaatatctgttgggactgcgcatgaaaaaggcggaagaacttttagagaacggagatatgaatatcaatgaggtggcgctcatggtgggatataccagtccctcatattttattcagaactttaagaaatatttcggccgaactcctggaacacagagaaataagcctgagctgcgttaatgtaaaaatataaaaaagaacgtgtaatataaatgtaaaattaatgcataataacgaaaaagtaatataatttatatgttctgatgtcagttttgcaatatgattcgtaaaaataaacactataatatgggtataagatacaagtgacttatacccatatttttcgcatgataaggaggatgtctatgaaaaaagtattgagtgcagcaatggcggcagtaatggtagtgtccatggcaggatgcggatcagccggcaaaaccgcggagaccacgacagcggcaccggcggcagccacagagaaaacggaggagacaacggcagccgacacgaaagaggccgcatcgtcaggagaggtgacaacgattgagttcttccagatgaaggacgaaggaaccgactattacacagcgctgatcaaggaatttgaggcacagaacccggatatcaagatcgagtataccaatgttccggacgcagagacggttctgatgacgagaatggcttctgaccaggttccggatgtatttacccatttcccgctggatgcttccttccgggagcaggtaaaggccggttacatgatggatttaaccggggaaacaatgcttgaaaatgtggcggatgatattctggatatcagcctcatcgacggcaaatcgtattctgttccggtatccttaaacatgctgggcgtttactacaacaaagatttatttgataaggcaggagttgagattcccacaaccattgaagacttatacaaggtctgtgatacgttaaaagcagccgacatcacaccgtttacgttcccggataaggatgtatggacagtccgccagttctgtgaccgtgccagcgttaccatgctggaagatccggtaggactgtttgaagacattgcagcaggaaagacgacagctgctgattccagggaactccgccagatgggcgagactatcgtaaagctgcgccagtacggccaggaggataacctgggaaccggccaggagcaggccatcgcagattttgcaaacggcaaggcagccatgttcttctcagggacctttgcgtacccggagattgtaaagagtaatccggatcttccgtttgccatgttccgttacccgtcatttaatggaagcagcatcgaccgtctgggtgtcaacattgatacggcattcagtatctccgcatcgacaaaatatccggaagcggcaaaacgtttcgtagagtactgtaccagccctgaaaatgcgcagcagttctccgattacgatggaactccgtcggcgatcaagggtgtcaacttcaataagagtgagtttgagtccatgtttaaggattatatccagaccggtaagaccatgagtgttccatccaacagctggccgccgtcattcggtggtgagtacggcaatatctgccaggaattgattgatactaaggatgtagaccagtggcttgacaacttaaatcagttgattatggatacctataataactaagattttacgagagggtgagaatcttgcatgcgctgatttcaccctctttctatcagaagaaaagaatcgttcagaaagggtgatggaccgtgaaaaacaaaccaaaacggccgaaggcgggccgggctgcctatatggcatttacactgccggcaattattttatatacggtctttttcgtgttttcagtaatctatggaatctactacagttttacgaactggaacggatatgcgaaggagtataaatttgtcggtatcaacaactacacaaggctgttttcagaccgggttttcaaacgtgcgctggtctttacggttgaatacagtgcaattcttgtggtgggagttatcacgattgcgctgattctggcggttattctgtgttcaaagataaagcagcagacctttttccgggctgccttctttttcccggctacgctgagtctcgtgaccataggcctggtttttaatgagatctattaccgggtaattccgctgatcggaaagagtttcaatattggttttctgagcaaaaatattttgtccagctcctccacggccatgtggggcattctcattgtccatatctggagaagtgtgtccatccccatggtgctgctgattgcgggaatgcagaatatctccggtgatttgtacgaggcggctgccatcgatggagccaatggaattcagcgcttcttccgcatcacgctgcctcttctgatgccggtattaagcgtctgtatcatcctggtgacaaaagaaggtctgacggtctttgattatatcacagtcatgaccagcggcgggccggcgggatctacgcagtccatagcgttcctgatctatgaaaatgccttcatgaaccagaaattcagttatgcgatcacccagtctgtcgttatctttgttctggtgtgcgtcgtatcgtatttccagttcaggacgacgaggaaggaggactgaccatgaatgaaaaaaagaaaagccggctgcggccctccggtatccttaagtatctgttcctggtcctgggctgtctggtgatagccgcgcccctgtatgtgacgattattactgcatttaagacgagagaggaatcgacggttaatttcttctcctttcccagtcagttctatttgggaaattttcgcgaaattattgaaaaacagaactatttccgttatttaggaaataccgttattattacggtctgttccctgatcttaatggcgcttgtcattccctcgctgtcttacgcgctgtcacggaacatgagacggtcaaaattctaccgtttctcctatatctatctggtcatcggcctcttcgtgcccttccaggtagttatgattccgttggtgaagatcgccagttcctttcacatgtccaatatctggggactgattgtcttaaacctggtgtttgcactgcgcgacggcgtgttcctttttgtagcttatatggacagcgtgccgcgggaactggaggagagtgcgtttatcgacggagccggagtggttcagacgtatatccggattgtgtttcctctggtaaagcccatgactgcgacaatcatgattttaaatgggctttccgtatggaacgacttcatgcttccgctgcttctgctaaataaatccaaggacagctggacactgcagctgtttcagtataattttaagaccacgtattcctttgactataatctggcctttgcgtcatttctgctttccatgctgccggtaatggttgtctatgtgtttgcacagaaatatattattcaggggctgaccacgggcgcggtcaaaggctgagtgcgaaaggagaccgatatggaaatcaaatatcttggtacagccgccgcagaagggtggccggccgtgttttgtacctgcgaggcttgtaaaagggcgagaaagctgggaggaaaaaacatcaggacccgttctcaggctgttgtagacaatacagtgctgatcgaccttccgcccgatacatatcttcacgtccttcgggagggcatggagattgacacgattgaatcggtgttgattacccattcccatcaggaccatttctatcccatggagctgctgatgcggggcgagccgtacgcacaccggccaggtgcgccggttctgacggtttatggaaatgataaggtggaagcggcataccggctggcaatggaaatgaacgacagtcctacgcttcacgctcagctggatttcaagcgggtaagacccttcgaaccggtcggtcttcccggcggatatgtggtgacgccgctggctgccaaccatgcaaaagacgaaaactgtctcgtataccttctggaaaaggatggcaaacgcctgttttatggtcatgattcgggaaactatccggaagagacgtgggattatctgagaggaaaaatgatcggccttgccagcttcgactgtaccaatatagaggcacctgatggaaattaccacatggggctgcctgacaaccgttatgtaaaagcacgcatgattcgtgagggatgcgccggagagaacacagtgtttgtgatcaatcatttctcccacaatggaaagctgatgcacgaagagatcgtggactgtgtccgcgaggacggattcgtggtggcatatgatggtatgacggtgggattctgatcatggaaatgggggcgtgtttaaggagaaagcagaaggaagtgtttctgttctgctggaccggttatttcctgacgtatttcggacggctgaatttatccgtggcaatgaacgccatggcgctggaatttgccagcggcgccgcggtgatcggcctgaccgggagtgtgtttttctgggtctatgcggtgggaaagctggtcaacggttatgcgggggattatctggacaacaggcatcaggtgtttttcggactgatggtgtctggagctgcaaatgtggctatcgggttcgtccacaacatatggatcatcatccttttatgggcggtgaacggattcgcgcagagcgccatctggtgtaatatgatcagtctgattgcccactggttttacgaagaacagcacgcgggagccgcggtgtggctgtccacctccatggtgggaggaacgctggccggatgggggatctgcggctttattatccgggcggcatcctggcagtgggtatttttaatacctggcttcgccctgattctgtttgcatttttgtggaagacgtatgtaaaaaatacggcggtggaagccggatttacggattttcagagcgttcgggtggtgaaaccgtccgcggcatttctggaacatgcggactcctcgtcaggcatcggaaaccggcttgggaagtttatactggcttcaggtctgatctggattatactcgcctgtctggcgcagggggtgatcaaggatggaatcgggctgtggggaccgaccatgatacaggatatctatggcgtggacgccggcacggcctcattcctgctgttgtttataccggtgatgaattttatgggcatcaccctggtgggaatgattcagagaaaacggcttctggaggaagaaatgctggtggtgatcatgatggtactttccgtgtttatcctggcttccctccgcgtctttatggggaaatcgctgactgccggggtacttttattaggcggcgtcagcgccgtgatgtacggcgtgaatacgattttgctgggagtatttccgcttcacttcgcaagggccaatcgggccagcttcgtatcagggctcctggatttctgctcctatgtggccgccggtctgtcctcggtgttttctgggctggttatccagctggggctggggtggaacagcgtgtttctggtgtggatggcgcttacggtgatggggattggggcgttgggggtgtttgggtggaagtataaggcgcagaccgggagatagaatggaaacggaataagaggggaataaaaagtcataaactaaatgagtcagactttttattcccctcttttccagtgcgattattcgattctggcggtaccacggatctcttcgagggatgagattcccatttgcccggccagcgcttctaaatccttcaacaggcgatgcataaagtctggtctggaaagattggcggagccaacctgtaccgcataggctcctgccataatgtattcgatcacatcctctgcacatgaaataccaccgattccaatgacgggtatatctacggccgttgccgctctgcggcacatcaggattcccaccggtttaaaggccgggccggaaaatccgccggagccgcctccgccgcagcggtatgttccggtccggatatcaatacaggacccgtttaagctgctgtagctggttatggcatcggcgcctccctcctgacaggccaccgatatttcctctacaggaatatcccctccgggcaccttagcgatcagccatttgtgtggggccgccgcacggacacgggctacaagatcttttaattcatccgggttcttccagtagggggttcctggtccgtagggacagttcaagttgatttcaatgcccatgatccggtccatctgttcaatagaggcggccagttcttccatttgatatttatcgacggctttcatgtcaataataagtggtgtggtttcgcagggaagatgtggcagtatctctttttcgaattcaaaaatactcatgttgtttttagatagagcgctgataaatccattattggtcttacatattttttttgccatggttggtgatccgctgtctatgaacatggagtttggcatcatggcgcccagttcattcaaatcaaagtatcttgcgtgttcgattaagtttcccagcgtagccgcagcgggcataagcggattttttaagtggatatctcctatggaagatgggattgttacatttaaattcataatcagtggtccctcctatttaaaagtctgaaaacatttccggtctttttcaaaatcgatcatgttaaatggcagatacggtccgttgcagcatacagggatgcccatctggatatcggggctgtgtaagtagcaggacttacaggcgccgatcccgcatccgatccgggtactggcaaataccgttgtacgttcctttaaggaatcatcagcgcagttcataatggattcgagcaccggtacgttgagagccatatatacggcatcggggccgtccgtcagatgtttcagcgcctgggatccatcggatacgaagtgggtaacggaaggaagcagttctttgggaacagcgctttcagaaccaatcaggatcaaagttggtgaggcgcagaaatggatgagcggagccagtaaatgaatcgtagcaggttctgccacaaacacggcgtttgtgccgggggtacagccaattccgttagctccccatatggcagtcccagcgccggtagcgagaggaaagagtgaagagttctttgcagcgatcacctttagaccacggtcagttccttcgtaaatcatgtatggataagaccagtgaaaaccgtccccctgattctggatcataacaaactgcccaggcttataagtaaaatccgggtattccagttcaagtaagtgaagcgggcggccgtcattggccgtcatcacatgcacggataaaaccgtggaatcgagtacgggtaggtaatcagccggcttccatacgccatcttttaccatctcctcctgaagcggacgggccagggataagtaccgatcccattcgggagccctgttgtcttcctctgtatagggcaggtcaattaagccgagcaaattctgatgctttaaaacgctcacggtaataagatcggataagttattaaatccagcaccgctggtagaaatatagtcgggacaatgatattttgactgtctgtaatactgctttagttccggatccgaaatctcttcctgcgtgtctgcaaatatctcatcataaaagagccacacaattttacctgcttcagtcacaatctgaagtcttccggtcacacccggctccagctctttagacagaccgtaatacctagccgggctgggaaccgacatgcgggcagctatcttttcagcaagaggcagcatggaacgcttaatactgttggaggcgccggctaccagatcaaagtctccggtcagacggtttgcagctaccatctgtttttccacacttgtgattccattgaccagaacgacccctgtgacggcggtacgctctttggaagcctggaagaaactgtagtcagacaggcgcttgtccacattttgaaaatgtctcatatagtaggtggggctgcactgctcattgaattctaccatgacgatgcgcccgtcatctaccaccacttcgaggacgcctaagtgcccgagatcgccgttaaagcaagaagagaatctggcttcttccctatagtagcagcccttgattaatccttttggtggctgtacgctccaggacaggcgatctaaaatagatactgttttttcccgttgtttcattaaaaaatcctcctttttttcttgagtatttctcgtttgtattgagcataatccagaaaaaattgaaattctataactgaactgacttgaattataaatattctgacatatagggcgatattatgttataatgtcataaaagtagaaaattaagtcaaaaaagttatagaatagtggccttccatctgcttatactgaatatacaacgaaagaaaggaaggggaaacgatatgaaaaaaagaaccctgaagagaatcgccagctttacacttagcagtatgatgaccgtgagcctgctttccggatgcggcggtgggaaacaggcagagagccagccggcagcaggcgaggcagcaatcgcgcagacgaagggagaggaaaaggaagaaccatatgtggttaccatgctgactcagggggagcagcaggaggatcttccgagaattatggagaaggtaaatgagattctggtcagagatctgaatatgaagctgaatcttttggtagcgccgtatggcagcataaatcagcagagacagctgatgctgaccagcggggaacccctggatctcgtttacctggatgcttcctcggcaattggtttcatgaataatggccagattatagatttgagtgatcttattgataagtatggaaccaatattaagaaatactggggggatgaggcgaagtctgccaacataggtggttttgtgttcggcgttccaaatttgaacgaagtcggtaatattccggcaatcggaatgagaaaagacatggtagaaaagtataatattgatgtagagagcattaaatctcttgaggatctggagccggtgcttgccatgattaaggaaaaagagccgactatgacgcccgttcatatctgtgcggaccagccgccgatttcacgccagctcagcgtgattgatcctctgatcgacggaatcgccgttctggataacagcggacagaataccactacaattataccggttacccagagtgaggcctataaggagaagtgtgagctgttccataaatggtaccaggccggatacatcaatcaggatgcggcaactactacggtccagtttgaatctgcgtttaaggcgggcagcacgttttccgcaatcatggtctggcatcccatgtctcccaaacagtttggcggcgtagatatggcttatgcgtttttaggggaacacagagcattatcgggagctaccagcaacgcagattacggaatcgccactaattcccagaacccggataaagccatgcagcttctggattacttatatggaagtgaagaggttgcacagctgttaaactggggtgaagaagggaaagactgggtatacgtcgacaaagaacagaatgtggtcagctggccggaaggtgtggactccaataatgcaacgtatcatgcgcagctgtcctgggctcttcccaatcagtttatggccagcagctgggaaggcgtatgggatccagatgtatttgagcagatgttaaagtttaataaagaggggaagaaatcgaagggatttggctttgcctataatacagagtccgtggagacagagcttacggcactgaaaaatgtgcaggagaaataccgtatttcactggaaaccggcgctgtggatccagctgaatatcttcctcagtacgaagaagccttaaagcaggcgggactggataagctgatcgaggagaaacagaaacagtttgacgagtggcttgcggctcaataggaagataccatggatgaaaaagtgagaaaaagaaagttccggtggaaaaaatggattcctatatttgttatgatgtcaccagggctgatttatctgtttatcaataattatatccccatattcgggctggtaattgcctttaaaaaggtggatttccgtgagggtatcatgaatagcccatgggcggggctttcaaattttacctatttatttaagacaccggatgcctttattattacacgaaacacactgctgtacaatgtggcattcattgcgattaataccagcctgagcctgacatttgcgatttttattaacgatatgaaaaataagtattgcaagaagatctatcagtcagcggtgctgcttccttacctgatgtccgttgttatcatcggttatatcgtctatgcactgttaagcccggacaagggaatgattaacaacagtatattaaaaccaatggggaaatcccctgtttcctggtatatggagccgaagtactggccatttatcctgattctggtaaatgcctggaagggagtgggatataactgcctggtatttattgcaggcatggccggaatctcaccggggtattacgaagcggctcagttggacggggcgacaaagtggcagcagatcaaatacataacactgccatgtatgaagactacaattattactctggtactgttgaatatcggaagaattttttactcagatttcgggctgttttaccagatcccaatgaattcgggcgccttgtttgacgtgacgaatacgattgatacgtatgtatacagaagcctgcttcaactgggaaatatcggcatggcatcagccgcgggcttctatcagtctctggttgggtttacgctgattttaatctgcaactttattgtgagaaaaatagaccgggacagcgcattattttagggggagggaaatacatgagatcaaaagaccagaaagtgtttaacttaatttcccataccgttatgattcttgttaccgtcatggcggtactcccctttgtgctcgtgtttctctcctccataacagaggagaatacgctggtactgaatggatactccttttttccggagaaattcagtctgtatgcctatgaatacattgtaatgaagggaaaaaagatattcagggcgtatgcggttaccttgtttgttacggtggttggtacaagtatcaacgtgatgatctcagccatgctggcatatccactttccttaaaggatctgccggggaaacggatctttaccttttacgtggtatttacactgctgtttaacggtgggctggtaccgacgtatttgatgtatacctcggcttttaacgtgaagaatactattttcgccctgattgttcccaatctcctgatgcacacgatgaatgtgcttttgatgaggacgtattacagcaccagtattcctgcggaactgtttgaggcatcggaaattgatggagcgagtcagtttaagatatttggcagtattattctgccgctgggaaaaccaatagcggtaaccatggcgctgttttcaggcctcagctattggaatgactggaccaatggactttattacctgactggatatgatggagaaaaactctatagtattcagaatttcctgaataaagtggtgacagatattcagtatttaaactccagccaggttggctcaaattcagatattctggctaaacttccaacggtttctgtccggatggcaattgcatttgtggccatgattccgattttggtattgtttccatttctgcaaaaatatttttccaagggtattgcgatgggggctgtcaaaggctgagaggttagaagatgatgcgatgcgtcagagggaggactttctatgaggacagaaaagaggaccgggaattcaatatccagccgtttaaggcggctgatgacgattctcgtgcctctttctgccctttatatcggtatcagcgtggtcagcacttattactttaagaagcagattgtgagttatgcagagacatttgtggacttctatatcgataagattgagaccacagttacaaacatcaaccggcgtatgagcatgctgatcctgggggaaggagagacggagatcgaactgaattcctatatcaacagtattaaaacaactgataacatcgccttccggaattactttattggaaaactgcgggatgcctttcgcatgtactccatggagtatggaagcgagtatcagttttttgcctttttcccggaagggaagcagtatgttggggccaatgcgaatgataaactggggcaggaggtctgggagcagtaccgggatgatatcacacataagctggagagggagacactgattcccaattccgggagccagtactggcagtttgtggagggaagcggcggctgcaattatattataaaattttacagcatcagggaagtctatgttgggtgctggatccggccggccgaccttatcgcgccgctggaaaatgcggtaaaggacggaaaaacgacagcgcttctctttgaccagaataaccgatgcattgcaggggaacgtaccatggagccggatacgatcacgatcgaacggcggttcagcaatctgccgttttctgtgcgtctgaccgttcatgattacggtctgtttcaaaagacatttctgatgcagatggggctcgtctttctggcgctggccatgctttttgttacactgtgcagtatttattttttgtataataaagtgttaaaacctatcaaaaagttttccaataatctggagcggttaagccggggcaagacggggctggaggagataagcagcagtgagctgtcagaactggagcaggccaatgcagaattccggcaattactgcagaagatcagcatgctgcaggaggaggtgtacgaaggggaaataaagaaacagctgatgtatatggagtacttaaagcttcagattgaaccgcatttttatttgaactgcctaaactttatctacaatacaatcgatttgggcaaatacacccaggccagcaggatgtctatcatgacagccgaatatatgaggtatttatttaataatggccgggattttgtgtgcatctgggaagaactggagcatatcggccattacttagaaattcagaagctgagatttgagcacgcgtttgattactatctggagcaggaggaggagacgagggaggccagaataccgccgctggtgatccagacgtttgtagagaattgtataaagtatgctgtcgacttggattccgttttacagattacggttaccgtattttcggaggaaatgaacggaaatccctataccaatatctgtattacagacagcgggccgggattttcgacgcagatactggagcagctggcggaccagaagaaatatatggaggaggaaacagggcatatcggcatatcgaacacgattaaacgtctgtactatacttacggtgacagggcaagtatcagtttctataatggaccggtaaagggcgcggttgtcgatattcatattccatataccgtaaaagcggctttagaaaagggggatgagccggatgaatctgctgattgtggatgatgatctccatgtgattgaggggatcaaacgtaatttggactgggagctgcttcctatcgaccacgctttccaggcgctgggtgttccggcggcgaagaagtcgctgtctgccaatcagatcgatgtcatgatctgcgacattgagatgccccaggagacagggcttgacctgttggaatggatcagggaggagggatatccggtacaggcgatttttctcaccagctatgccaggtttgagtatgcacagagggcgattaagcttgaaagtctggaatatatactaaaacccgtagactacggtcagttggaaaaggcagtagtcctggcggcagagcggtccttaaagagcaggcagaatgaggtgtttaaagagagcagccggtactgggagcagaaccgtcagaatgttgtggagtatttctggactggcgtgctggcaaggaacgctccctcagacgaggaggagttaaactgcaaaatagaggaatgcggcctcgattacattcgcggaaaggtgtttcttccaattgtaatacagatggtctgcgacgtagcagaatcctatgcaggactggcggatgcggtagatgctttgtgtacgaattgtctggaagataatacagatgatggcgtggaggcatatgaatttcatgcaaaaatatcagatcacacgtattttcttatgctgagagccaggatgaattcggatcccgatgcattgaggcgtgacgtggaacgctttatggatttatttatggaaggtatggggaaggcggaattgaatgtgctctgcggagtgggtatgtggagtactgcaaaccttgtttatgaagacgtgaactgtatttataccatgatgtatgaatcgcctcgaaataaaaagaaggttatgtaccttcaggagtaccagcctgtcagcatgatgtatgaggtcccggatcttaaaaactggtgggacatgatgaaatatggacagacaggagaactgaaggacgcggtggagcgttacctggatattctggccggacagcagaagctcagttccagaaatttgcagcagctgggactggatctcacccagatggtatattcctggctgggatctatgaatatatatgcccacatgctgtttgacaatgaggaaaacaataagatctacggtagagcagcactctcctcccataatatgctgcagtatctggagtaccttctgtccaaggcaatggaatataaagatgtggtagaacgtccccatacgattgtagatacgatcagggactatatggatcatcattttcaggaaaacttatcgcgggatgatttgagccgtctggtatttttaaatcctgattatttgtcccgcttgtttaagaaggagatggggctgtccatcagcagttatctgatacaaaaacggattgatctggcgaaagaactgctctctacgaccagaacgccggtgagtgttatatcatcgcaggcaggctacgataattttgcttattttaccaaggtgtttaaggagaagactggtatgtcacccaatgaatataggaagaagtgtcaaagtgctgaccggaggaataagagataaaagagaaaaggggagagcagagagggagatccggaaatgaaaaaagcgaagatgcgcgaagtgaatttctatgcgtatgagacatactgcatggttcggctggaggaaagaccggaggctggcacgctcctggccggctgccgcgatcttgcacttcaagtggagcagacattaaacatgtatgacgaagattccgagctgtcggtgatgtgccgggattaccggccgggacagccgtatgaggtatccgcacttttatatgattttctggatatcagtttaaacatggcgagacttagcaaaggagcctttgaccccacggttggagcattagttaagaaatggagaatcggttcaggggaggagcggataatcgacgaaaaggaactgaccagtcttataaacaggaccggataccatcatatcaggctgcttccgggtaaacgagccgcgatgatagatatcgaaggagttactgtagatccgggtgccgttggaaaggggctggcaattgattatatcgtacactatttaaaaaacaatcacgtggagcaggcgtgtcttgatttcggtggtaatttgtatgttatggggaatacatacagaatcggtgtgcgccagccggaagatccggaaaaaatgatggcagttgtgcctgtaaaggaccgggccgtttcaacatcttcctggtatgaacactattttgaatgcaatggcagagtatatgggcacctgatcgatccggcttccggtaaaccggtggaatctgaatttaccagtgtgacggtaatctgtgacaaagccgtttatgcagatatgctttcgacagcactgtatgttctgggagaggagaacggggagacggtaatacgttcgctgcgggaagagaaaggggtttgcgtggactatctggctgagcgggcaggggatggcaaagttgtcagctattctgatgctttaaaataacatcattgttttttaaaggcggcagctgtcccttgaaattatccgggacagctgtttgaatgtcttgattaagaaataaatgattaaaagatgataagggcaattttttatataaaatgtctattatttttcataatgtactttacaatctgtataaaagatgataagatacaaatgtgtaaacgattacatattatgataatgcacaacaacttttttatacagcaactattgattttaaaagaatttataaatttaaatatctttaagtgattgcaaattttttttgaagatatgtgtaaacgattacacattaccaaataatggacgcatagcgtgactgcaggagaaatggggtgtgaaatgagtcttacgataaaggatattgctgaaaaagcaggtgtatccgtagctacggtatcgagagtgatcaacggatccggctacgtgagcgaaaagaacaaaaaaaatatcgaggaaattatccaggaatcgaattactgtccgaatgcggcggcaagaagcctgatcacccaggcgtctgatatgatcggcctggtgatgccggagcgggttaatccattcttcgtaaaggtatatgacggtgtaacccgaaaggcggatgaggagaatattacggttcttttttataaaacgggtgatgatgagaagaagcagggagaaatcttaaagcagctgaaggctcagaatgtaaaagggattctgataactccaagtctctatcagacctccgccaccagaaagatgttagaagcagtggaacgggccgggattcccgtggtcctcatcgaccgtgatacagagggcggggattttgatgcggtatttattgataacaagggggctatttataaggctacagaacagctgatccaggcggggcatacgaagattgcggccgtcaccagccctgatttttccagagtgggtgcgagacggcaggacggttttctggaatgcatgaagaagcatgaactggaggtctgcccggactgggtgatcgagggagaactgagtgttgagagcggatatgaagcctgtaagcgcctgatggagatggagaacagtcccaccgcgattgtggcgttttccagctcggaattgatcggatgtgtgaaatacttaaacgaaaccggataccggatcggcagggatgtctgcctttttggcttcgatgatatcggtacatttccggatttcggacttcaactgtccacaatcgagcgtcctatgagggagatgggggagatggcatttgaactgttgtgggaacggattcataacgcaggaaagaacaaaaggagccgtgagatcatccttccaaccaatataaagttagctgagaatcaaaaataaaatagatatctactttactacaagggggaaaacaacaatgaaacatgacaatcgctacagctacaaaccacagtacgatccgtttgagaatgttatgacgaggaacggactgcacgctgatgaggtgatttctgcactgcagaaaagcattcgccacgcagatgaggataccgccatccggtgcggatatgagatgtatgttaccagtatggaactggagaactatctctggagacgcctttctgttatcagtgtggaagacatcggattcggggagccgactgctcccattctgatccagacccttaagaacatgagagaggagtttccatattctttaagcggcagcagggcattgttcctgttccaggcgatccgttatctgtgtaaatgtaaaaaggaacgctccagtgatacgattaagacaatcgtaatcgaggagtataagagaggggagtacgccaagcttcccacagagtatgatatctatgactggcatacaaaaaagggaagagagggaggaagaacgtatctggattttctggagcattttacagatgttacaccatttatggatcagtacgatccggaattaaaggagatcttaaagcagtataccagggagaacatcgaactgggtgaagagtaaacaggggaaccggtaaaaacaaaaggagaagaacagggaggtttcagaatgagtaaattaagacgtattgcggcattgggacttacagcggtattactggggggctgtgtaccacagaaggtggcggcgccggagaaggcagaggagacaaaggcagaagagacgaaggcagaagaaggccaggcaaagaacgagggtacaaacgggacggaggcggcgacggaagcagagacggccgcggccatcgcgacggagattacgggaccggtggagataaccatatggcatcagtattctgaccagtatgaggtgtggttccagaaggtagcggacgaattccatgcgaaaaatccggacattacggttaagcttcaatatcagcctgctgatcagtacgaggcaaaggttatggcggcggcaaaagccgacgatctgcccagtatggtacactctgcggcggccaatatgaccagctatatcaatgagggtgcgctggtgaatctggatgattacatttatgattctgcgatgggatatgaaaacttcgatgaagatattaactcaggactgaatcagatgtatgtgccgtggggcaataaacgctatgccatgcctctgttcctgggggggaatgttttcttttacaataagaccatgtttgaggagcttggaatagaagcgccaaagacctggtctgaggtagaggcggtagcgaccgcggtcagcgataagatcggcaagcccggttttggatttcagattttagtggatggttatatggaggttctgacccaggccggaggagaagtcattgacctggataataagaccgtcggcttcgattctgagacagccagagagaaaatcacgtggtacaaagatttgattgataaaaaagttgcacggttagtaggagatgacaaacactttacgaatccatttgctaacggggatgtcggatgctacgttgcattatccgggaactacggatatcttgctaccgcagttggagacaagttcgaactgggagcggcaccgcttcctcaggaaggccccaagaagtttgtcagcctgtctgagccggtatttgccattgcgaagaccagtccggaagaggaactggccagctggctgttcttaaaatacttactgagcccggaagtaaatgcggagtgcggaacggtatttggcgcacttccggcatccactgcggcaatgaaccagagcgtataccaggatttcctgaaagtaaatcctgtggcagctgcggtttatgagcagagagactgctacggatatatgccgaccattgcgggctggtatgaacttcgaacaagcctggataaggcgttggaggaaattatgctggatatcagtgacatggatacagcacttgcagaggccaggaagtcggcagaagcggcaatccgtaaatagtccaatcagttgaaaaggtgagccatgaagattaaattacagaatatcagaaagagatttggggaaacggtggcccttgatgatttatccctggaattttgcgatgggaaactgaccacgcttttggggccaagcggatgcggaaagagtaccctgcttaatttaatatcgggaattctgccgcctacttcaggatcgatttttttcggagacagggatgtaacatctctgtctccggataagagaaatatcggcctggtatttcagaattatgcgctgtatccccacatgacagtgggggagaatattgcattcccgttggaaattaaaaaagtttcaaaaaaagaacgactggagcgggcggaggagtttgccaaactgcttcgaattgaagattattttacccgtaaaccatcccagctttcaggggggcagcagcagcgtgtagctattgccagagccctggcaaaggaaccggagattttacttcttgacgaaccgttgtctaacttagatgccagacttcgcctggaaatgcgggaggagatccggcgtcttcagctggagacggggattactaccatttttgtaacacatgaccaggaggaagcgctcagtatttcagatcgtattctgcttctgaaaaagggccgggttcagcaatacgggctgcctcaggagctgtatgatgaaccgtgcaatccctttgtggcggactttctgggaaatccgccgataaatctgtacgacggcatggtcgatggagaccgcgtggtactgcaggaggatcatacgggattctttattgccggggtgaaaggtatccaatcaggaagaaaggtgaagctgggaatccggagcgaggcatttgaggccgcggcggagggggtctatgagacacctgcaaccgtaaaaaacgtatttttaaatggaaaggaaaccctgtatcttctggaaattggaggaaaagaattcagaagtacgctggaaagcggacagacctataaaattggaggaaagatatcggttcgtttgaaaaagaagggggttcatatctatgattctgaaacagaggaaaagattggttaaagtgaaaagtgatgaaaaaatcacagtcaggacatttacggaacccctcatctatctgcttccatttattcttgtagtgagtgtgtttatggtttttccgattatcacggtcttcctaaatgcatttctgaaaaattatgattatttggccaacacttataccggaatggggatggggaattttgcggcgcttttttccgataaagagtttttactgtctctgaaaaatacattcctttacgtagcatttgtcgtaccagtgtctacggtgattgctttgactgtgtccattcttttaaaccagaagctgaaaggaagctcattctttcagttcgtatattttttgccgatggttacggcaacgattgccgtcggaattgtttggaaatggatgtatcattacgattacggaattatcaattacgtactggggataattgggatagaaccggtcaaatggatggagaatccgaggatggctctggcagcgctgattatctatgggatctggacaaaactcccgtttacaatcattctgttcctgtccggtcttcagaccattggcgaacagtattatacggcggcaaaagtggatggggcgaaacctgcaaagattctgttccgcattacgcttccgcttttatcgcctacgattgcgctggtattgattatcaacattatcaatacttcgaaggtgtttaatgaagtctttgcactgttcaacggaaagccggggcctggatactccctttatactgtggtgttctacatatatgagaatttttatcataagatgaatgtttccattgcctgtgcggctgctctggtattatttttaattgtgtttatcatgaccatgctgcagatgacgattcagaaaaaatgggtcagcaggtaaaaaggagaattgagatgaaaaatagacatctaattgtaaagatcatttcctacgtgatcctgtcggccggtgcggtaatgatggttctgccgttttactggatgatcattactgcgtttaaaacgccggagcaggtgacgcagatgccgccgatctggtggccgccgtcatttttgctggataattttaagtatgtgctgagttcgggggagtttgcaaggtatattataaattcactgtttgtcacagtatcatctgtgatactcacgactacggtcagtattttgactgcctttgcattttcaagactcaaatttccagggagagatattattttttcgctgtttctgggatttatgatggtaccgtttgaattgcttgccatcaccaattacgttaccattgtgaagcttcatcagatcgatacgtacaaggcgttgatcgttccgtataccgctaacatactctatatctttatattaagaaacttctttctggagattccgggctcgctttacaacgcagcgagggtagatggggcatccaactggaaatttctatggagaatcatggttccaatcgccaaaccggcgatcatcacaatcattcttcttaacagtattgacagctggaactcattcttatggcccatgctggtgacgaatgagtcaaggatgagaactgtgactgtaggattgacttcatttgtgcagtctgcgggaatccgttatgaaaggctgatggcggcagcgtttattgtagtaatccccatggttgtactgtttttctttgcgagaaaatatattgtaaccgcggtagcgcaggggggaatcaagggatagagatggaggacaacatgaatattgcagaaaagattgatcacaccatactgcgcgcagacgcgagagaggctgaagtaaaaagatactgccgggaagctgttcaataccattttgcatcggtatgcgtcaatacatgccacgttccgctggtggctgaaatgctgaaggaaagtgacgtaaaggtatgctgcgttgtgggatttccacttggggcaatgagtacccgcgccaaggcctgtgaggcgcggattgcagtggaagacggggcggaagaggttgacatggttgtcaatatcggtgctgtaaaagacggaaattacgatcgtgtggaggaggatatccgtgcagtcgtggaagccagcggcggtgctgtggtgaaggtaatactggaaacatgtctgctgaccaaagaagagatcgtggaaacatgccgctgtgctgtgaaggccggtgcgggatttgtaaaaacttcaactggattttcgaccggaggtgctactgtagaagcggtttatctgatgagagagacagtgggagattcggcaaaggtgaaggccagtggtggaatccgtacctgtgggcaggcgaaggccatgatagaagcaggagccgacagaatcggtgcgggaaatggcgtcatactgctggaagggtaatcggtgcggagaggagttattctgccggatcggtaattagataaaaacaggagattgtatatgggaagaaaaacactggttttcggaagttttgtcgtggatcttatggcccgtacgccgcatcttcctgtcccgggagaaacggttaagggaagcgaattcaagatgggtcctgggggaaagggatttaaccaggctgtagcgacctttaaagcaggggcagaggtcactctggcaaccaaactgggaatggattctttttctgaaattgcgctgaacaccatggaaaaattggggatggataccagacgaatctttcggactgaacggaaggacacggggtgtgcactgatcctggtgggggaagacagcagccagaatgagattgtggtagtgccgggagccagtctcaccataacggagaaggaagtggactcgttaaaagaattgattcaggaatgtgaatttgttctgatgcagcttgaaacgaatctggatgcagtggagcgggttgcagaatacgcggcgcggagtgggacaaaagtgctcttaaacccggctcccgcggctgatttgccagaaggcctgtggggacggatcgatgtgattactcctaacgaggtagaggcggagtactataccgggatccctgttcactctgaggcagatgcggcgaaggcagctgactggtttcatagccggggaatcgcagatgtgatcattacgatggcagatcagggggcatatctgtcgtcttcttccgggatacgggagtttgttccagcattttctgtagatgccgtggacactaccggcgcgggggacgcgttttgcggaggactgttggcggctttagcggaaggtaaagaaaggaaagaggctgtagtgtttgccaacgcgacagcggcactttcggtacaaaagattggaacggcgccgtccatgccggatcgaaaggagatagaaacgtttttagcaacgagagtgactaactgacatagaaacagtaaaagatacaaccccaaaagagtgcaatgaaagtacaattaagactttcattgcactcttttatcatggcatctctcagaccactaccaggaaaacaacggtgttttcccatcaagtgccatccagctgatgctgtgcttttttacatggagaaggctgcataataagtcgatctgattatactttacaacactgttcgagtgggtccccacccaataggtctttccgtcactgcccgtcacttcgacgcttcttctcaaatagccatagccctcttccgcccttgtacggtcatccgtgaaccagtccgtgccgcttataagaagctcttcctcatggccgggatagttgtcgagaacaaactgaaccgtctttaccatggcgtgggcggtgctgttgacccgttcgaccggcccgttgttcaatttaatgaatttggctttgccgttgggtgttttttgtgccgggctgtctgcatctgaagatggctgccggttaccgcctgtcacttcgcggtaacttacaaggtcgatcttttcgtcgtcatccaggttatcgtttatgatctgcgcaaagcggttcgcgtctgcctcgttacgggtcaggatgtacagttcgtcttttttaaatgtattagagtccagaaccggatagttgcccgactgctgtgctgcttcgccgcacaattccgcaaaaagttccattaagtcctttaatttatcccggatcagttcgaaacaatctgtaaactgggagaaatcgcttcggtatccgttaaagagctgaaccatatatgtggtaaagtaccattttccgttttgcagaacagcagcttttaagggattatctgtgatgattttctttgcgttttttccgtaaaaatcagccactctcactgcaaaatataccgcgccgtaatattttgcaaaaatgcctgcttccagttcgtcctccgcttccagccattcaggcacgaaaatggttttatcctgaaaactgtattcgcccccggtctcatttctggtactcagcagaaaattggtacccttgctgcgcgcgtctcccgggtaaccggcgcatgctttccgggctctcgcaaaatcgacgaggtcgaccgtgcgtctggcgatgtttccttccccgcgcttaaccagcctgaaataccgtttcccattgatctgttcccgctccagaaaagcggccagctttaccacaaacggggatgcaaaagcaatatcttccgccttaatgggcttctgccggtttaaagccacgctgatctcgtttacctcccgggttgaatctgcttcggattcggcggtctgtgcagagtgcgagatatgtatgatccgaagcagtaccttggcatttttagacttccggatcctctcttcaagttttgcggcttcctctgcttcaccatttttttggagctcctttaaatcgtattccatttcataaaggcactgggcagaggcggtaatggtctgggctccgttgatgacggagaaatgcagctctccgtattcggatatatgttccagaaggacctcctccacgcggtccagtttaaaatcggaccgctctaccagaatggtaatgccgttattcttaaaccagaattcgccggggctgtttctcagcgtctccttgatagcccggtcaacacccagctgttcgttcagaccgtaccggacattgcgcttaaacagcttgtctccgattctgttgtagatctcaaccagctgatacagatggacggaggtcacatagccgcggttagacacctctgtcctatcctcgttttcccagttgatatggcatttcataggaggcatctgaataaactcaaaccggtttacactggtcagcttaatgtcctgttcatggtagctgttgtcgagaatatagagaaaatttacggtgcctttccagggcttcatctctttcctgatatttttcttcatcgccttaccttccgcagacagaaaaagtctttccagaaaaacccggcttttcatattgtccacgaggcagatgatatagatatttttttccgcggattccggcagctttgccagaattcgggcctgctcttccagagactgcagcaggcccccgctgtcctctgtaaacttgagaaaaagaaaattttcactgctgtcaatgcccatttggacggaagaggtgacttcccatttctccgcacgaaccaggagattcagcgccttatgagcctcctcgctgtcccaccaggtctcgtcacagtcgatatcacggttgcttaaaatatttctgatatattccttataattttcgattctcctggctctcatccgattttcgctcatgatcatttgtcctttccatactgattagcagctggccccctgaaaatttatggacgccgtgctgatttaactctttggaaaattccagaattaactggttataccggtttacaatggtattcagttcatcttttgataagtatactttctgtatggcctcttccagattctgggtaaagtccagcagaccgatccggtagctgttaatcatattttccacgtagaccagaatttcatccgtatccaaatccttccggttatctaaaatatagtcaaaatagtaatccagctccttttccagcattctgacggcatacatcagttcattgctgcagcagaatttctctgtgttcagtttccggcttttattgctgatttcatctaccagattgacaatctccggataaatacttccggtatggattccgaaaaattcctttaactcttttcggatcaggggtttggcttccttcggaattcggatgccatacgtcatccatgccggtaaatcggcggcatcgttgccctgaaacagtatgaaagcgccctgctgtgccacgatccggttattcagttttgtgtggtcaatgaatttgtgatttttctcaaatataattttatcccggtgccactctctgtcccggttgatgatggcatcgtaattggcattggtgttctccgcgctggggctgaatatctcgtcgatgaaaaatacgaataccattccgtcctcgtgatccagcgaatcaacgtctttgcggtagtacggcgtgactgcaaaatacagggcagtcaggcagttataggacacatccagaagccggctgggaaattccccgtgctgggcgtcaatcgcgttgtccagataccgcttctcacccgtcagccggttttgcctcatggcgtcaaagaggctcttttcaaaaaaaggattgccatccatgacccctctacggaagatgttggcgcggcaggaggtcgtataaatctgaggctctccgcggtatacataactgtaattttcgccttttcgggattcgatatattcctttattttggaaatataatcggatacattttcaataggcttttcagagatttctttgactcgtttatctttgggaagaacataagcgctgttttcattcaatggctttccctctctttccataaagattccctggcgcccggttactgcctgccggatatgggattgatgcagatatgcgtgccggggaaatcatgatgattttattataacttatcctgaaggggcatacaacggggaatctgcgcaagttttgggcgggcggcatgaaaaagataaaaatagccatagtaatagtgttgtgatggatgagggagcggggagcgcaggagtgggaaatgagatccagccagttccagtcctgcatagaatcagccagcagttttgctgataaaagtcttgaattaactgaagtcaataaagtataatgttcatgagcattgcctcctttgtataaggttggtttggcgattgacattataccaaaaaagggaggtcaatgctctttttatttcaatcttctataaaatcaaggctttttataaaacatgaggtagtctttgacactaccatcagaagaaagaggaatagatatgagaaaacgagtgaaaggttgccttacagtattatgcctggcatcattgatgttatccggatgtagcggtcaaagagaacgagtgtctgagattaaggagacggaatcttcttccatggcaatggctgaggattctgttgccggacgtgacggagcactgcaaagtacagagaaggggcagactccggaagatgagcagaatatagaggatgcagtcagaacggcaggaaaggcagagacaggcggtgttagagcggaagatgattattacaattatgtaaaccaaaaacttttggcaggaaaacaaatccctgaggattctgaaagctggagttatttttatgaattaggacaggagtcttatcgtaatttaagtgaactgcttgatgaagttatcaatcagcgctcaaatttagccgagggatcaccagaacagaaaattgtcgacttatatcagactgcaatggatatggaagggagaaaaagggccggatttggtgccttacagccatatctcgacagtattcgcggcgcagctgatattcaggaatatatagaagcggtgggagcggtaaacaatgacctgggattttccagcctgattgccctggcttattttgaagatatgaaaaattcccaaaattacggctgttatctgggcagtgcggatctgggacctggaaaagagactctggaagataaaacacagtcagttttattagaagcatatagaaattatataaaaaatatcatggaatccacaggcatcagccggaaaaaagcggaagagacagcctcagacatttataaattccagactgatttagcagccgcaacgctcccattgtctgaccagaatgatccggaaaaaacttataatcccctgtccctggaggaactccgtacattatactccaatattgatattgaagcctacttaaaagcggccggggcagatggttttcattcctgggtggtaaatgatcccggacaggctaaaaaaattaacagctatttgacagaagatcatcttcctctgttaaaggagtactccattttttgtctgataaaagatttcagtccctttctgaccccggaaatacgagacagtacgatcgcatggaacaatacgcaaaagggcgttcaagggaaaaaaacggataaaaagctggccgctgaacttgtccagaacacatttggatttgaattcggcaggctttatacagaaaagtatttttcggaggatgacaagaaggctgtagaaacgctggttcaccagattttgtctgcctataaagaacggatcaatggtctggaatggatgggagagacaacaaaagaaaaagctatccggaaactggatcatatgacccttaaaatcggctatccggacaactggccggattattacgaaaatgcagtgattcttccagaaggccgaggcagtctgattgacaatatggtaacggtataccgttcgctcagatcttttgaaaaagaagaaataaagaagccggtagaccgggggcagtggggaatgacacctcagactgtcaatgcgtattacaacccattaaacaatgaaatcgtttttccagcggcaatccttcagcctccattttacgatccggaggccggccgtgctgcaaatttaggcggaatcggtatggtaattgcccatgaaatcagccatgcatttgattcctccggctcctgttacgatgaaaatggaaattataatatgtggtggacagaagaagatttaaagaaatttcaggaactgacactccgagtgacagagtactacaatgaccaggaggcggtaaaaggacgttacgtaaatgggcaacaaacgttaaacgaaaatattgccgatctgggggcactggcctgtgtgacctctattgcaggagatgatacggaagcgctggattctcttttcaggcagtatgcccgtatctgggcgtctaaatatacggaggaaagtatgattcacaggctgaatacggatgttcattctccggcaaaggtgagagtgaatgcagttttgagttctacggaagcattttataaggtttaccctgatttaaaagaaggagacggcatgtatgtggcgcctgagaaacgggtgaaaatctggtaagctctgagggtgggatggatcttgcgtttgctctgtttttatgctatagtaagaacactgatttgccttgtgacacaggcaaaatagcaaatatatggtgtgttcgaaaccttccacacctaaaacaaaactaaaggagaactgaatatgttacaaaaatcttcaagcagaacctattttatggtttatgcggcggcgattgctgccatctacaccgtacttacgatggtgtttgcaccgataagtttcggtccggttcaattccgaatatcggaagcgctttgtatcctgccatttttcaccccggccgcagttccaggcctgtttatcggctgcctgctgtctaatttactgtgcggcgccgcagcactggacatcatttttggaagtctggctacgctgattggtgcgttgggttcctggatgctccgcaaaaacaagtgggcagtctgccttcctcccattctggcgaatacgattgtgattccgtgggtattgcgttttgcgtatggctcggaagatatgattctgtatgcaatgataaccgtagggattggtgagattctggctattggtgttctgggaaatctattaatggggattctttataaatacagacagattatgtttggaaagaaaaaccttgcataatcacgattgaaatacagcctgctggtggaatgcctttgcctgatagacagacaaaagggaaagacggaaaccagcaggctgtttttttgattagtttcttctataataattgtattataaataattgtattataattagtattataagagctgtgctgatgtaattgaatcatatttgaataactattaaaaaatggccgcaaatatgtgcgaattctcagtaaaagccaggaagcgcagtattttaaatcataactgttgtttcatttataaaaatatgactgcggtcatgacaaatgtttttgttactttagcgctcatcacaagccttcataaataattttaacaaatccaaagcatatctttttttcttatggctgcaatttcccagaatttcgataactgcctgttgctctgtatccaggtctgcgaattcggtagaatcctcgttatttccgtagattaagtaatccagcgaaatattgaggcaggctgcaatgctaagcattgtatcaatggacataccgcaggtaccgcgttcaatatcctgacagtatttataagcacggccgattttttccgcaagctcttcctgggttaatcccataatcatccgtctgtttctgattctttcccctgcagcaattcgattatatcctgccaattcataagcctcactttccagaaattaccgtatataaaattattatatggttcattaaggttgacaacacctgttttgagggtataataatagtaagttttaaacgtatatcatgcacctgtttctaacgcgaacagatgatgaagtgccaaaaatcgacattctgttgagaatggattagatggtactaaaagggtgaggataaaaaatgtataaaaaagctaacctgggctggctgaaacactgggattttatgatcctggatttaatttgtctgcaagtggcatttataagcgcttattttattcgacatggggttcatttggcatatgagaataagctgtatcggaatatggcctttgtactcttcttaattcaagtctgcgtcactttctttggcgagagcttcaaaaatgttttgaagagaggatattacaaggagtttacagctacgtttaagcacgtatgccagattattttaattgcagtattttatttatttgcaacgcagaccggcgagggatattccagaattacgctggttctgaccggtattatatatgcggttatcagttacatagccagaattctctggaaaaaatatttaaaaactaaaggtgttttaggcaaagggaaccggtcgttgttaattataacatcagaagaaatgatggatacagtgattgatactattcgtaacaacaattatgaaggctttcagattaagggaattagccttcttgatgcggaccgggtaggagagaggatcaatgatgtgccggtagtggcaactttggagaatgtggaagaatatgtctgcagagaatgggtggatgaggtatttcttgatttgcccaaagaggttccgcttccaagagatctgatcaatgattttattgagatgggaatcaccattcatttaaaactgattgagatggcaaagctggaaggtgaggttcagcgggtagagcggttgggaagctacaccgttttaacgagcagtattaatatggcttcctggaagcaggcgctttataagcgggcgatggacattgccggcggcctgattggatgtatcattactggaattttgtatttgattgtggcaccatgcatttacataaaatcaccgggacctgtctttttttcacagatcagggtaggtaaaaacggtaagaaattcaagctttataagttccgcagcatgtatatggatgcggagaagcgcaagaaagagctgatggcacagaatcgtgtgaaagatggaatgatgttcaagctggatcacgatcccaggattattgggggtgataaagggatcggaggttttatcagaaagtattcgatcgatgagttccctcagttctggaatgtgctgaaaggcgatatgagcctggtaggtacgagaccgccgaccatcgatgaatgggacaagtatgaactgcaccaccgcgtaaggctggccataaagcccggaataaccggaatgtggcaggtgagcgggagaagtgatattacggactttgaagaggttgtgaggttggataaggagtatattaccaagtggagtttggggctggatgtgaagattgtgatgagaactgtgggggtggtgtttgggaagagtggggcgatgtaggggattagatagataagtgtaataagttttagaatatgaactgtaaataataacaattatttgttggttacttaatgattgtcagcaatcaaaacaaatgaaaatatatgggtaaggaaacaaacaaatgaacaaaacaaacaatattttttcggagaataataccgcagatagaccgactaaagtaaagatagttatagccacacataagaaatatgatatgccaaacgatatcatgtatataccccttcatgttggtgcagaaggaaagaaagatgcatgcggcaatgatctggacttaggatatttaaaagataatactggggacaatatttcattgttgaatcccggtttttgtgaacttaccggactttactgggcctggaaaaatcttgaggcagattatattggcctagtacattaccgaagacattttagtataaaaaaaacaaagtatccatttgatggtattttaacatataacgaaatcaaaccaatgcttggcaaaattaaaatatttgttccagataagcgtaaatattacatagaatcactatacagccattatgcacatacacattattcaattcaactggacgaaacaaaaaaaatattagaagaaaaatatccggaatacattaaaagctatgatactgtaataaatcgttcttatggatacatgttcaatatgatgattatggaaaaaaatctgctcgaaaaatactgtatctggctgtttgatatattatttgaactaaaaaaaaggtttgaaatgccagaattatccgattaccagcaaagatactatggacgaattagtgaaattgctttcaatgtgtggttagattatcaaataagaaaacataatatcaggagaaatgaaattaaagaaatacacagtattcatttagagcgtgttaattggaagactaaaggaatcgcatttatgcaagcaaaattgtttgggaaaaaatatgaaggaagtttttaaacaatagcgaaaggagttccgaataatgcgagaaatcaacattgatgaattgaaaaaaattgaatacgatatgcttgttgattttgcgaaattctgtgataaaaataatcttatttattttctctccagcggtacccttttaggggcggtaagacatcatgattttattccttgggatgatgatattgacgtaatgcttcctagaaaagattatgaaaaatttgtgacatcttataaaaataaagattattttgttgatgatttgcttattaacaattcttgctggggaagatgtggaaaattaaagtgcagaaataccatacttgaatctaatttaaaagagaactataaagaaaaagtttttatagaatatttccaattgatggaatatgtgataataaactgattcaaaaaatcaaattatcaataatacaactgtttattaattttcatatgtctacaattacgaaatgtaaaccgacaaaaagatatgcagataaaaatgcagggattttaaattggaaaacgggtgtaagaactttattaaaatattttcttattttaacaataggtaatacaagacctcagttttggactcggataataaatggctggctgaaaaaaactgattttaattcagctagatatgcgggattttttgcaggcgggtattatgggactaaagaattgatgccaaaaaaaatattcgataaaagaatacctatgaaatttggtaaatatgatttctggatacctgaggaatatgattattatttaacaaacctttatggaaattatatgaaattgccaccaattgaaaaaagacaacctcatcacgcatttaaggcatattggttggattaaaaagagggtatatgaaagatttaagagaacatcaattatatgctattgaagcattggaataccttacacaaatactggatcgaaataatatcaaatattttttgcttgcgggttcctgtttaggtgcggtaagacataaaggttttataccatgggatgatgatattgacataggaatttttaatgaggactatgatagatttgaaacagtacttattcaagagttaccaaaacagtttacttggattaatgcaaaaaccgataatttgtacccacgtttctttgggaaaatattaaatggtacgacacctagcgttgatgtatttcgtcttgttaaaatgcctcaaaataaatataaacaaaaacaaaagtggattttaaaaaatatattagtaaagctttatagcagaaaatgtcattggaaatttgaaagtgaaaatacggtagtttactatttttcgtatattctttcattgttgttttcaaaagctgctttattaaaaatatgcaggtggaatgaaaatagatttgcaagcgaacataactatgattatgtaaacatgtacagctattatgggctaaaaagagaattaatttcatacaaattaacattaagtattagcaaagtagaatttgagggcaaaaaatatacaacatttagtgatacagatacatatctaacaaacttatatggagattacatgacaccaccctctccggacaaaagaaaacctgaacacattgccaataaattcgtataaaaatggagattgatatgaaatttgtaatcaagatcgataaatgcattacagcagcaattatatgcttctttattttattaaaaccaagatattttgattttatatcagttttggacaatttatttgatatgggcattatcctaataacattgtctttatttataatttactactgtagctttactaaaaaatcaaaagttatcaatttagtcgttatttatcatatttatctaatattaattactctttttaataaaggggatattaaatccattattaaagatgcctgcatatttatcggtctctcgatccttgtggatataatgattaaaaatcgaccatgcgatttgattaaagtgctcttggctatattagaaatagaagtaatagttaatttattgacgattattcttgttccagaggggctttatgaaacaatttattttaaaaataatttctttctgggatatgataatcaaaacattaacatagttctcccatgcctaatatttgcttatctgcatcatgcatatacttgtagtgttttcactcgaattaatttattatttgttattattgttactgggattactgaaattatgatctggtcaggagcctctttggtaatattagtaatagttaatgtagttatgctattcaacttatgcgacaatgttcgattttttaacgcaaaaaattatttgataataaatattgaagcttttattttaatggttttattaaagcttcaaagaatattcgaatttctgatagttggaatactgggcaaaaatcttacgctttcaggaagaatctatatatgggatagaactattacactcattcttcagaatcctttatttggttatggtgttgaatacaatgaaggacgtgcatccaaatatgcacttcgtacattgtatcatacaagttcaaaattagcatcatttgcaggattgcatgcacataatcgtttccttgaaacaacttatagaggtggaattattcttttagttatatatatatttattttattcgttgcttttaaatcactaaagagaaatgaaaaaaccaactgtgctaaagttattgcaattggcttatttgcatatttaatggggatgttaacagagttttatcggctatcttacttgttttttccaatgatggtcatagctgaacgtgcatctgttttagattataaattaaattggagtaaaataaatgaaacaaattctaagaaagtttaaccgactgtccctccctgcaaaggcttcactagcacttgtattttctcaattagtacaaaaagggctttcaataatcactgaaccaatttatacaagattacttaatacttcagaatatggaactgtatcattgttcctttcctggcatgaaatactagtcatatttactagtctatgcttatccaagggcgtttttaataatggaatgatggactacaaaaatgatagggatgtatttactctttctctttatacattatcttgcatttcaacaatttttataggtattcctgttattttattttcaacttttatttataactttatggatttatccatagaactcattttatatatgtttattttactgttttttgaacagacgcttgcgttgtggacagtaagacaacgattcgaatataaatatatggcagttactgttcttactatagtacttacagtactagcaccattatcaggaattgtaggagtacttgtttcagaaaataaagtttttgcgagaataatttgcgaaaagaatatattcattatcagttatattggagtacttattttaataatcaaaaaggcaaaaggtaaaattaatttattatattggaaatatgctcttaagtttaatatacccttaattcctcattatctatctcttcatatattaaatcatatggacagaatccagattgcttttgttataggaaaatcagctgctggaatatatagtatagcatatagtggtgctgcagcaattaaaatattttggcaggcaattaatgcttccctgattccatggacatatgaaaaatgtagtaaaaaagatttcaaaaagttaaaagatttaactgaaatattaatattgggttttggattactttgcgtatttttcatgtttttagctcccgaggtaatgaaaatattagcaccggtaagctatcatgaaggaatttatgtgatcccttccgtagtggctggtgtctatttttctgtaatgtattatgtttttgcaaatatagtgtattactataaaaagcctaaatatgtaatgatcgggagttgttgttcagcggttattaatgttattcttaatgctatttttattccaatatttgggtatttggctgctggctataccactatgtttgcatatggttttcaagcattcattgattactatgcacttagaaaagtaattggcaaagatatttatgataaaaagtttctactcatgacatctagttttgttgtatttgtagcaatcctattaaattatatatatgataaaacttttattcggttagggttagtaggtgcaatattattatacacaatttattatttcagtaaaaacaaagatatattttcaatgtttttccaaaaaaaataaattaatcaaaatatactatatataaggagaaaataatatgaaagcattaatcttgaattcgggcttgggaagccgaatgggtattatggcttctgagcagcctaaatgtatgacgaaaatttccaatagcgagacaattttaagcaggcagcttaaacaacttgttgatgcaggtattgatgaagttgtaatgactactggtctatttgatggggttctcgtcaattactgtcagagtcttgatttacctgttcatattacatttgtcaaaaatccgttctatcaaaatacaaactatatctactcaatttactgcgcaagagaatatctggatgatgatattattctgatgcatggtgatctggtatttgaaaatgcagtgtttgatacggttttgagcagtgtaaaaagctgcattgttgtgagttctacaaaggaattacccgagaaggattttaaggctgtcatccgtaacggacatgtcgaaaaaattggaatagaatattttcatcatgcaatggcggcacagccgttatatcgtttgagaaaaaatgattggaaaatttggcttaataatattattaaattttgtgaaagtgataatgtaaaatgctatgcagaaaacgcattcaacgaggtgtcgaatacttgtatgatttatcctttggacatcaaggacatgctctgtggtgaaattgatgatctggaagaccttgcggttgtatctaacaagctaaaagagattgaatccagaacagtttatatgtgtttttccgctgatatgctacatagtggacatattgcaataattaaaaaagcacaacgcttgggtaaattgatgattggcgttctttctgatgaggccgttgtcagctataagcgatatccgctgctcccttttacagagcgaaaagcaatgttcgaaaatattgcaggtgtttacaaagtagtggaacaaaaaacgcttagttataaagataatctaaaaaaatatcaaccaacttatgtagtacatggggatgactggtgtaatggtttccagaagtttgtccgtgatgaagtggtctctgtactcgcttcatatggaggaattttgatagaatatccatactcaaacgacaaaaaatatcagtcattggaatatagagcaagggaagatctatctttgccagatatccgccgggcgaggttaaaaaaggcaatcgcaatgaaaggaactgtatctgccattgaggcacacagcggtattacaggattgattgcggaaaaaacagtagtatatcagaacggagaagctcatcaattcgatgcaatgtgggtaagttctctgtgtgattccactgccaagggcaaaccagacattgaacttgttgatatgacttctcgttttcgaacgattgacgacattatggaggttacaacgaaaccaattatatttgatggagatacggggggattaacagaacactttgtatatacggttaaaaccttagagcgtatgggtgtatcaatgattattattgaggataaaacaggactaaaaaagaactctctgtttggtactgctgtagcccaaacacaggattctatcgaaaatttttgtgctaagattaccgccgggaaaaaagcacagaaaacacaggatttcatgatttgcgccagaattgagagtttgattttagagaaagggatggaagatgctttgacaagagcaattgcatttactaaagctggagccgacgcaattatgattcatagcagaaagaaagatcctgcagaaatttttgagtttgttgataaattccgcaaagaggatagcattaccccaattgttgttgtgccaacttcctttaacaccgttacagaggaagaatttaaggcaaagggtataaatgtagttatttatgcaaaccaattaaccagaaccggtttcccagccatgcaaaatgccgccagaacaattttggaaaatcatcgtgccaaggaatgtgatgatatgtgtatgtcgatcaaagacattattacactgataccggatgaagtataaattctggaaaggaacacgataaatggaacaaaagattatattgactgattcaagttataccggattaatagaatatatacagcaatacaagttgaaaaaaattcttttggtttgtgaaaaaatcattaatttattacaaataggaaattttttaatcagtaatgcgggaaaaataggatttgatatcatacttttttccgattttcaacctaatcccagttatgaatcagtagtaaaaggggtcaagttatttcatcaaaaacactgtgattgtatttttgcaatcggtggcggcagcgccatggatgtggcaaaatgtattaagctttattccaatatgaatcctaataaaaattatttacatcagaaaattataccaaatgacgtaaaactacttgtagctcctacaacggcaggaacaggaagcgaggctaccagatttgcagttatctattataatggagaaaaacaatctgtaacaaacgacagctgcattccttcagccgtatttattgatgcatctgctttgaagacgctgccagaatatcagagaaaagcaactatgctggatgccttttgtcatgcaatagagtctttctggtccgttaattcaaccgaagaaagcaagctcttttcaaaagaagcaatcactatgattctttctaatatggatgggtacttgaagaataaatgggagcagaatgcggctatgctctgtgctgcaaatctggcaggtaaagccatcaatattacgcaaacgacagccggccatgcgatgtgctataaactgacaagtatgtatgggattgcacatggtcatgcagcggctttatgtgtcagaatcctctggcgttatatgattgataacactgctctgtgtacggacccacgtggaaaagagtatctggaaaatgtatttgcagagattgcagatgctatgggatgcatggatgctagagaggcggcagaaaagttttataatatttatgatgaattaggcctaaaaattcctgatcacagggccacggatttcgatatacttatatcttctgtaaatccggtacggttaaaaaataatcctattgctctaacggcggatgctattgaattattgtattggcaaattcttagaaaggaaaaataaaattatgaaagcaaataaattagcagaaatactcggggctgatttttatacaggtgtgccggattctcagctgaaagctttatgcaattatttaatggatacttatggaatagatccaaaacatcatataattgcagcaaatgagggaaattgtaccgctttagccgcaggatatcacttagccaccggaaaaataccggtagtatatatgcagaatagcggtgagggcaatataataaatccggtggcatctctattaaatgataaagtatacgcaattcctgttatcttcattgtgggatggcgtggagagccaggaacctacgatgaaccacagcatatctatcagggtgaagtaacaattaaactacttgaagatatgggcattaaacctttcattatttttaaagatacaaccaatgaagaagtgaaatccactatggaatattttggagaaattttgaagtccggtaaaagtgtagcatttgttgtttgtaaagactcaatctcatatgatggaaaaacaaaatacagtaataataataaaatgtcacgcgaagaagttatacggcatattaccaaaataacaggcgaagatccagttatatctacaactggaaaagcaagtcgtgagctatttgagatccgaaaacaggatgatcagagtcacaaatatgacttcctgacagtaggatcaatggggcacagttcctccattgcactaggaattgcagtcaataaacctgatacaaaaatatggtgcatagatggtgatggtgctgttttgatgcatatgggttctatggcggttctagggaactacaagcctgcaaatatggttcatataattataaacaatggggcacatgaaactgtcggcggaatgccgacggttgcgggatctattgatttagtaggaatagcaaaaagctgtggatatccctatgcggtatgcgttgataattttgaaaagctagacgatgaattaaatatggcaaaagagcgcaatgtaatgagcatgattgaagtaaaatgctcaattgcgtcaagggataacttaggcaggcccacaacaacagcatttgaaaacaagcaaaattttatgaactatttaaatttgttataaatagttagaagatgtctgaattgttagcgtatttcaaacaagagtcggatgtccagatatttttctggacaaactgaactagtggaggcacggaaatcgtaaagacggataatttaaaaactcacgtatatattgaatatttgctgccagagagagtttcaagttttgtataaacaaggtaaattgatcgtaagatatgtcattagtaactatgggcagaaggcagctttttggcttctgcctttgtctttattataatgcagaattcgggcatgtcaataagggctgactgtaccagccccggtttctacgattctgtttagtattgcgagagtctttccttgataaaaagtaagcgccaagtgttaaggtatcccaacacgaccgccctggcatcaatacttgatgtcagggtagtgagcgttttactctgattttttgttacattctatcctcgccttctcactccacggcgcaagatctttgagttctgcatcggtggtgtccgttccagggcggctgtcgagcaggtattttagatagttgtatgggtgaagccagtgggcttttgccatctctgccatggtataaactatcatactcgcatttgcaccatcctggctgtcactgaacagccagttcttacggcccaatgtcaccgggcggtggggattctcactggcgttgttactcaggctgcagcgtccgtcttcgaggtaagtcatcaaagtgtcttttcgattttggatataggttactgcacgatccatgcggctccccttttctggatgctgcccatcgagccagcgcatgaaaccttccacaaccggctttgcatccttctggcggcgtttatacacctgtgcataggacagtccttttgccttatagcttcgttcgtattcaaacagcttgttacagtaaagaactccctgtactgccggatgactgtagtctttctcttggccgctcgggatggcttccatcaggtatctccgtatgtgtgcgtaacagcagcagcggcgtatcttcttcaaccggttataaccactgtaaccatccaccataacataggaaccttcatcgatcccatccagaaagtccgctgcatttcccccggctctggtttctgtataatgatacaggataatgggagggagccggtcctctccggaacgcatcagccagatataagacttgttctgtggccgccggccaggttctttcaggacctggatcggtgtttcatcagccatcaggaagtgtctctttaacagttcccggtgaaagtaatcatatatgggcttcagatagttctgggagcaggtgatgatccaattcgccatggtcgttctgttgatactgactccaagaagttcaaatcccttcttctgccggtacagaggaagcgcatctgcatacttttcatacatgatatgtgataccagggatgcagaagcatatccgcctgggataagtgccgggctcccttcgtctttcatgaaccgcggatcctccgtgtctttacaggctggacacccacaagtggtggcaatgtacacgatacgctccagttttgccctggtataacggagttctgtccgtatctcttcatggccggtcgggatcatgccggctccgcactcagggcactgcttctcttcttcggacaacgtatttacttcttcatagtggattggaagatttgcgaacatctcatcatagtccgctttgggcttacgttcctgcttgctggtctttacttcgatgaactccggctcgctccggcaatggttcctcccctgaaccggatccggagaaaaggcttaactggccgggcagatcactgcgccgttcactggaactgccaaataacttctgcttgaagtattcaagctgcgcctgcaggtttgaaatgatccggtctttttcatcgtcctttgcattacgctcttcgagcatcttctgcaaagatatgatcaggtcattctgggtacggatcgtcatatttaattgtaagattgtatccttcagctccctgaactggatatcctttgcaccggatgccatgagtgtccgctcctttgttttattactggtattttaccagaaaacgaagaaaaaagcgaatcagtcctggctgcgctttcgtcataatgacggtggataaacgatccggatatcagataaaagctggataaaccaggatatttaccgccatgaatcccttgaaataccatgagttccgatgaaacagttatcacgcagaggttatcccgatctggcgaaaaaacaaagcggttatccacacgtccagtcgaaatgccgccggaaatttcggcagtttcacgatgttttttttactggtccggattgctttgggctgctcgatgtccagtccgctgagtaaccagtccaactgacgccaggtgatttcctgggcttcggaacttttccgtggccagcggtaccggccctgtgtgacgctcagccttttataaaggagaacatatccatctggttcgtggagcaggatcttaatccggtcacatcgtttcccacagaacaggaacagggaggactggtctgggtccatagaaagtttatcccggataatgctgcagagaccatcgatggacttgcgcatatcagttgcgccacacacgatatagatgttgtccgccatggagatatcgcctagcatatcgtgcctcttacaaggcttaggacacgatccagtatggcagaatccgcaccattggcaatacggatcgtcgcactgccaagcgacatctctatgcttgcagatatttctggaattctgtatggatcctctaacgctggctggactggaaacatggattccggcctttctgcctttggattgaaatttaaacggactacatcctgggcaggcgatggtgctgctttggaaatggattcaggaatctcacggcatgctttctttctgagtctgctgacccagttgtaaaaggtcccgggatgaatcccatgttccttgcatcactgaaaatcagtgagaccgctgctcctgcattccatgatcagctggtattgcttgtcagctggtactctggcattgtaattggacattttttaacacctccacaaatatgtagtgaagtgctcgcatctgacaatgggatttattgtattccagagtaaaatgcttgcatctagctatctactattatggagtatttggtagtaaagcgccagcctccctaatacttggcgcttacgaaaagcggatcacagagttggaaaaagaaaaccttcttctgcaggaaaaggctactttcctgacccgcaaactttatggcagatccacagagcaaacatcctctctcggcattgagggacagatgtctctttttgatgaagcggaatcttcagccgactcattcgcagtggaacctgatctcaaggatgctgcctcttatcgccgccggaaattcaaaggtcagcgtgaggagcttctcaaagacatccctcatgaaaaaaactatgtactcttgctgaggaagaccgcttctgtgagaaatgcggaacacctctggtttctgtcggtgaagaattcgtacgtacagaaatagaattcattccggcaaaagtccgggtgatcgattattaccgtgaaactttcgaatgcaggaactgccggaaagaagggacgggctttatgaagaaatcccccatgccctatcctgtcattcagcattcctatgcgtccccgtctacggtagcctgggttatctatcagaagtatgagcttgacgtacctctttatcgtcaggaaaaggaatgggcagaccttggagttcctttaagccgcgccaccatgtcatactggatccttgccagttaccgcgattggctttctcctgtcgtcgggcttctgaaggaaaagctgctggagcagaattaccttcatatagacgaaacgcctgttcaggtacttttagaaccgggcagaaaaaatacgactgactcctacatgtaggtgtaccgttctataaaaagcagcagtcatccaattcggatgtttgattaccagcctggccgaagcgggacattcccccagaagttcctgaaaggctatacgggatatattcatacggatgcctataagggatatgaaaaaataaaggggatcacccgatgcttctgctggacacatcttcgcagatattttgtagattcactccccaaagatgtcaatagcccgcaggcaaccataccagcacaggcaatccggtatatcaaccgtctatttgagctggaaaaaaatctggaggtgttatccccggaaggaagaaaagaagagcgtttgatacaggaaaaacctgtattagaggcgttttggtcgtgggcagaaacagcatctgccgggatccttccaaaatcgaaattgggggaagcctttacctatgcattcaatcaaaaaaccggtttgatgaattatcttttggatggaaactgttccatctcaaaccatctggcggaaaacagcatccgcccatttaccatagggcgcaaaaactggctgttttcaagaagtcccaaaggagcagacgccagtgccggaatctatacactgatagaaacagccagggtaaatggattgaattcgcgaaaatatatccagtatatccttggagatatccaggatctgcattcctacagtatccggaatacttggaggactacctcccatggaatccagtcattcaaaaaatgtgtcgataaccgctaactgcaagaatagcagaaagttaacggtttttctatacactgtcttatttgacgcttacacaacaccgtccgtttgggcggttttctttttgccgggtaccggctatgaatcacttatgttatctttcagatacgtgctttatcatttccctaagtgctgccttctgtggtgattttttttccctttccataaaataaactccaaactgagcaattttatcttatatcagtttgaaggtttacacaatctttgggatactcctgacaaaagagatgacgaatgagcaactggcagagctggcaccctggagcgaaaaactccactctatcaaaaatcgcatacgaattatagtaaaaaactccaacccgcaaaagactggagttatgttatatcccaccgtattattatttgtcagttacagttttactgtattgcaagtgccgaaaataagtcgtttccagctattcgattttgcagtattccgcgctggacgcacgggttttcaggacatccggatcgctttttgctggtcgatatcaatgcccaacatcatccagtcgaactccttccatgtaaggctgcgaacatcaggtcgatcccttgaccagcgatagtgcccttgtgcagtcagccgcttgtagatcaaggcgatactgtccggctctttcatgattgctttgatccggtcacatctgcggtagcagaacaaaaagagcatggcggttattcatggaaaactgcacctgtatgcttgcacataatccatcgattgacttgcacatattgatcctgccgcagataatgtagactacgtgcaagccggagatatcggcaaacatggttgccctttcagcagacggaatacagctactagaaggccgaaatccgctgaattactgatctttacggtaatcctgctgctcataagctcgatcgtatgtgtattgtcaaggtgcgctacagcccttggcatatctgtttaggctgtagtggcctccggatccgggtctatgttgaaccggacgaaatcctgatggggtgtgaaatccagggcatatgtgctgtcagacagtgccgttgataccaggctacctttcaaagtctggtgacagcattataaaagctgttcacacaatacgttgtcgggcatgccgctctggtggcaatctgacggatgaaatggtatttatccatgatgattttaggattcggaaagaaggtttgtttttgatatcattacctattagtcgtgcgtagtaattataaaagctcaatacgacttattttgtttcctaaacttattgactgatttttgcttgtcagaaccatatgttccctattttcaacgcattagtttcactacaccagaatcattacaccccataccttttaatttaacgtttccaagtattccataaagttctgtttgttctctaatgatgtcgtagtcggcctccccagatcatctcttgcgccgatggcacttttcacttctatgaaactaagcatatttcttttctttgcagcttccagttctgaatctaacgatttacttgtacttactgataccgcatagggataaccacaggattttgctattgttaccatgtcgatgccacctgctactgtcggcatacctccaaccgtttcatgtgcttcgttattaatgactatatggatcatattattgggtctgttattccctattacagccattgctcccatatgcataagaacagctccatcaccatccacacaccatatttttgtatttggcttgttaagtgcaattccaagtgcaatagaagaactgtgtcccatggaaccaaccgtcaaaaaatcatacttatggttttgaccattggcttcccggacttcaaacagttcccggctggccttccctgtagtggagataatcggatcttctccactgacctttacaatgtgttgtataattgtttcacgcagcatagtgttattatttttatactccgtttttccatcataggaaatagctcctttttttaccacaaaagcaacgcttttgccggctcccagatcatccttaaagtcttccattgctactttaagatcctcttctgtcgtttgagagctgattataaatggcttaatgctcatatcttccagaagttttatggtaacctttccctgatagacatgctgcggttcatcatgaattctcggctctcctctccatcccacaataaaaatgaccggaatcgcatagaccatatcatttaagagagaagcaacgggattaacaatattgccttccccactgttttgcatgtatactactggaattttaccggtagcgatatgatagccagctgctaatgcagtacaattcccttcatttgcagctatcatatgatgcctggggtcaatcccataggtattaataagataattgcagagtgcttttagctgggaatccggaacccctgtataaaaatccgctccaataatatttactaagctttcaactttcatttttgttttacctcctggtctatgatacccgaatttctagccctgataagtcaaaatttatatccggaatctacactgcgtatccgaaaagatctgatgatacagtctgtccagatcgtcttcactcaactcaatcggattgtttttcagtctgaccggattaacagaagatttgaggacctcataatcgttcctgtctttgctgtcaggagcttctaattctaaggcctttaaaatatcctgaaatgcccttaccgatgtatttgtatcgctataccccatcgcgtttgcaatttcttcgaaaatgcctgcaagataatcgtttcctctgggatcaatacaatactccaaatgtgtcagcataaaaggccaaagtctggatacacataatgctgcggcatggccatgcgcgattccatataagctcgtaagtttataacacatcgcatgaccggcagtcgtctgtgtaaggttgatcgctttgccggccagatgagcggctttaagcatttgtgtattacctgtttcatcatttcctatatataaatccttgttttccataataagctgtattgcccgtctggaatactgccggctttcttctgaagaatttaccgaccagtaagattcgatcgcatggcaaaacgcatccatcatggtagattttttctgatatatcggcagcgttttcagtacgcttgcatccatcagcactgctgaaggaatacagctgtaatcagatatcgattgtttttctccatcaaaatatataacggcataacgtgtggcttcactgccggttccggctgttgtaggcacggcaagcagcttcattgaatttggcacgatcgtttgctcaaggtagttttgtgctgggtccataggaaagaaaagcttgatacacttggcaacatccattgcgcttccaccccccactgccagaatgaggtcagcgccaaattcacaaaataatctcacaccatcaacaacggactcatacaatggattcggagtaatgtctgaaaatttaataacttcaatgccggttctctgcgttaaggagtcaaaataccttccgatttttaaaaacggcagcgaaccatcacagactaaaaaaattctttttacttcatttattttcagataattgtcaagttcttcataattgcctctcgccgtcaaaatctgttgctttaacatgatggaatctcctttgtccacgatcaaacatccgctggtatcagcgtaataatgtctttaataggcatacatatgtcatcacactcttttgcacgatggttctctaaaatcgtacgggccgcttgctgcatggcgggaaaaccgcttctggtcagctgatttgcatagataacgatatttacaccacgttgtttgaactcttcctctgtaacggcattaaaagaagtaggcacaacaacaagcggcgttgtttgattttttgaccgaaagtttgcgatgaactcaaaaatttcagttggatcttttttccggctatggatcatgattgcatcggctcctgcccctatatatgcaaaggcccgctctagcgcatcatccatgctctgatccaaaatcagactttcaatacgtgcgcaaatcataaaatcctttgtcttctgtgcattctttcccgccttaattttagcacagaaattctgtatggaatcctgtgtttgctttacttccgtaccaaaaagcgaatttcttttaagtccggtcttatcttctataataatcatagaaacacccatacgttctaaagtcttaactgtatagacgaaatgctctgtcattccgccagtatcgccgtcaaaaataatgggttttgtggtaacctccataatatcatcaatggtgcgcaaacgggaagtcatgtcaaccaattctatatccggcttgccttttgcagtagagtcacacagggaactcacccacattgcatcaaattgatgcgcttctccattctggtataccactgttttttcagcaattaatccagttatgccactatgcgcctcaatggcggttaccgttcctttcatttgaatggatttctttaaacgaatacggcggatatcaggaagagataagtccgcgcgcgcccggttttccagaatctgatatttctcatcattggaatacggaaactcaaccagcttgccgccatattccgccagagcagaaacgacttcatcacgcaccggcttttgaaagccggaaacccaatcatccccatgaactacataggtcggtttatattttttgatattttctttgtagcttaatgttttttgtccaacaactttatagacacctaaaatattctcaaatatagtctttctttcattaaaaggtaatagtggaaaccgtttatagctgacgactgcctcatccgataaaacccctataatcagttttccaaagtgctgcgcctttttaataattgcaatatggccgctatgtagcatatccgtggaaaagcagatgtaaaccgtacggttttccacttctctcagtttactggaaactacagccaaatcttccggattatcgatttcattgcaaagcaggttctcaatatctatcggagcgatcctgcagtgatcagaaacttcattaaatgcctgttcggcgtaacagcttacattcttttgtttacagaatacatcaatatgattcagccatattttccagtcatttttaagaagcttgtacaatggctgggctgcgacagcctcattaaagaattccgtaccgatctgtaacacccgattttcccttaccacagctttgaaatccttttccgggagcgggatcgtggagcttacagccacacagcttttcgggctttccaaaattgcatcaaaaactaaattttcaaaaaccagatcgccatgcatcatgataatatcatcatccagatattcccttgcgcaataaatggaataaatatagtttgtttcctgatacagcgggtttttcacaaaagtataatgaagtggtaattctaagctctgacaataatttatgagagtggtatcaaacattcctgtcgttatgaccacctcttcgatgcccgcattcgcaatctgtttcaactgacggctgataattgtctccctggaagatatttctgacatacatttcgggtgttccgaagtcagactgcccatacgttttcctagtcctgaatttaaaattaatgctttcatgttgttttctcctctcgttataacctatagtatatacgttagtcaatgagaacatcccacagcgagtaacacaataccatcattagctactgcctccatttctactatataaccatttctctatccttatatatcatcctgttctagtatcttctgaacttattaattaatcatatttctaaccatttttatcttatgttccactggcaaatgaactgtttaatatccttaagatacaatacaaccaaagctaacattaatattacaatcaaaatacatcggataagtatttgactattaaataaatacgaaaaaagtgcacctgtaaaaaataatgttattgttaaacatgtttttattggattttctactactttgtaatatctttctcctataaacgatttcacaaatagcattactattgatgatatagcaacggcaaaagatgccccaagatttccaaacctcggtacccaaaaataacagaagactaagttagatattaacgctacggaagttgtgacaatattccaataagtcttcttctttatattgataccaatgccgacggtttctccaatggtatagtaaattggtgaacatagaaggaaaccataaaatgcctgactcatacgatatttatttcccaataaacaatatattatgtcttgagttgccaaaagaccaagcccgcaaaatacaatagcaaatgttattacaagatgcatggactgaattaaacgttgttgacttttataattttcaaacacaaaaggtccccaaaatacattaatcccggcctgaatcaatgtaataatactcacaagtgtcaaacatcccgtatacacccctacaaaaccagcatcaaaatacgcatttaaaaatattttaggtaatgatgtattaacattagcgagaaacattacaggaattgttggaagtgcatatataaatattgcgtttttagtctctttaggtatatgagatatacttataaatatctgttttctatttaatatcaggcaaatactcatcagtactccgaccataaatatcaaaacccatagcgagtaataaacatcttttgtaacaagtagacttaaatagcataattttatactcaatgattctaatactactaacacggtataactcattacatttccatacattctgggcctagtcttgctgattgcaataaagccagtaataaatatatatagtgccattaacacccatatatgattgctttgttctcccattattgactcagtaaaatttttgttaaaaatcaaacatataatggcagcaattcccgctccgcaagtggagcacttaaccgcaaacgcaaataaattatctttagttatcccttctaaattatctgcaaaaaatctcatatatgcttgatgcatccccaaggttgaggcatatacaagcatggtgcaaaatgtcacaaataagtctatttttcctaaatctgaaggttcaataacacgtgtaataacaggcattagaataaaattgattattgcatttatccatgccgacatagaaaaaccaactaataattttaatatttttttaacaggagtttgattcattatccctacttttcctttccagataccaaaatattaaatagttggttacaggccgtacccttatcttggcacccagttctatcaaaataagattcaatacgtttttcagatgtttcattttcataagaattaatcagtttaattaaatcttcgttattcactgcgtaaggataaacccactgatctatagggtggcttttaggtatgttataactatactgctctaaatccggcgtatataggaaccctggccttttttgtaatgcgaaatcccacattgtagatgaataatctgtaatcaaataatccgcaactaaaattaattcctgcatatccggataatcagatacattaatacattcatcagataaattcgtaggcattgtgtcatggtgcgcccgaaacagcatgacatgttttttgttaaattttttattaaatgcttgtatgacccttgctacatcaagaatttcaaatccatatccgttaatatctgtttgctttttgtcacttcctctgtacgtaggtgcatatagtatcagtccaacttcatcatccagagataacctttttttaatactttttatcagggtctcattatgtttaaaaaaaatatcattcctcggatatccaatagcaattattttatttctatctaaagcagatcttttttctacataatcagcctctaataaacttgtaacaagataataatcttcttcttttgcacaaatatttaaaattttacgtcctgctgtcgattgtaaatatgacatatcgcctactttgtaaacactatgcccatgatgtgtatagacataagcttgtccttttctatatggaaaatattttgtgtaatcactagaattaacaagaatatatttacatgacatcagcaaataaatgtgttttaatgatccaaaatctacgcgttttattccgtttttgacttttacatcactatcttttttaagagcaaaatatacttcatatccgctcttagtaagcatatattcggcaaaatactttggattacacgaatatcttcgtcctgcaaatgaagtcaatataatactattttcttttaatggaacaatccataatattcttagtaataatcttaataataatatcaaataatatttaaacatttcttatccccttcctattcctacgtaatcccaggcatattcctaaagcgattccagatgtataatcggttagatagctgccactaatcgtcgacttaaataaaaacgttataacatacgcgtaaaataaaatttttatataaccgttatcattcttaataacttggttccaagtcctgataagcaaaaataataatccgataacaattatggatccgaaaattgcaccatattggtataaaatttctaaaaataagttgtgagggtaggataccttatcaaccgaaactcccaacgcaattgataaagcgattcgatccgcaaacaagccatgtggaagtattgtaatacctcttacaataatttcctgaatggtatttctcccaccgccagtccataattctcccgatgcaataatcgataatgttctagaatatccaaatttgtttaacatataaatagctatactttgtaagttactagctattccaaacgctgaaatagaggtaaccactattattataatttttttcatggttaactttgaagaaaacaaaaaatagagggcaactgctacaataccagtagctaatgctcctcttgcaccccaaaaagagattggtatcaatgaaataactcctgttataaaatatacaggatttttaaattcgtacccatatattgtgtatacgacacatggaattatcaaacagtatgaaaaccccatataattttcattagtaccaacagatataaatagtattatatatagccatacaagtggtaagtatcgtaattgtattcgaatagctctttcgtaatcagttaaataagtgaataaaaaggcacctgttaggactcgcatcaaaaaaacaataatatcatccattaaaaattgtcctatttcaggatgcgccattaagctagttgctaaaactaataggataaagcccaaaatagaaataagttttttcttaactcctttataacaaactgaaaatataacataggcagctgacattgcataaatcatattgcgaataaaatcgatggaattcgccagatttggaactatttttagcgatagcatccgtaaaatatctactattaatgatgaatttaaaaataggcctaaaaacaaataaaatcctgggacttcgtcgtatttagatgctttctttaatctaattttaattttcataaagctcacatcccttccccgataggcgtaattgtttttttagctatttcaagataagaaaatttattgcggccttttgattcagcggcaattttcatttctatatataagttatgatcataatataccttggaaatattgtttctaattgtttcaacatctgcattttccatccatagacagtttccaccaatatcaatatgagtcattcctctacgatatttgaatatacccggtattccgcatgcaacagcctgttcccacaaaacagagtgtcctcctggaaaacaagctatatcagaagcaaaaaaatatctatatattaagtcggactttacccagcccacatttaagacatgtatactgtttatacatgctttcttatatgtctccacaaaattcgcagctggtttcccaaaaactatgagtttaacatggataggcatatcctttaacgcatcaattagctcaactatttttttatcgctgtcaatcttaccaccagtaattataacgaagtcatcttcatttatattcaatttatctcgtatttcatttcttattttttccctttcattgtaaggaatgtttgtgtcatctatccccatcggtaaaaattgtattttttcttctggaacaccatatacatgatttagaaactcgcaccttattggcagagtaccccaaaaaatttctacataaggatttattcgtgaacacaaatatttatatatacctttatgtaaaacatgatacgatagccagtttcttccactattaaagtaatcgttatgattatcaaccataattcttacagccggagttaacttggcatattttatgatttgtaatagtgataacgaattaacttcatggataaaaatgagatctggttttactttttttaaagtattaaatacatttctatgaatatgaagtttattttctataaaatatggaattttaacaggttgcaatctgattatatccactccattattcattgtatatttgcctggagctacctcatatctttccattccagctcgatctatgatagtccctgtaataacgacaacatcatgacccaactttttttgcatatagggaagaatattttcctggtaagccatatcatctacatactcaaatgacaggcaacaatgagcaatcttcattaataatctattcctttctccaacaataacaactttgcatcatattttttaactgcaatgggatatacaatgacactttccagctttgctacattacaaatcacaaaatagccatattgcattaacctgcagggccaaaaatcttttttcatttcaatcaccttttttattgataaatcactgaactccaggcttattagttttgcgtattcacttttaattccagggcttctgtggtaatcaatccaggaacgccatcccataattctctcatcattttcaactgtcgtagaaaaaaagcctctgacaccatctgacatcccgcttagacagctaccacttaactcagcaactttcgctaccgacactgtcttatcagcaatccttttacacaccattatatagttatcttttaatgcggtatctgtagcataaacaaaaatatttttattaattggaaaaagttccactgatctatattcttggcttccgactaataatggcaaaacagtattaaagtcatcttcagtaacccatattccagattcattatctaaatcacccgttaaaatataaacacaattattgcaataatccggaacaatattatgtatatgtcttatttttccaataggaaaactatactttttcctccattccgcagttctactatctcttgcatagatttcaacactaaaacgttcgtttgttttccctatatattcaccatacaatatgcaatctgtaaaacctttcataccagctattttagtaaaggaatacggattgttcatgttttttctaaaagtatgttcttttacgattttaccgttttccaaatttatattataaatagcaccaagccttgagaccagtatatttgtgtctgacaattctacggctgcctttacctcataccgtagcagtctttcaaaaaaacgggtttttgataatatctttccaataggtttcaatggcagagtgcaaatattttttacttgtcctttttctaaattcattgaacatattttgtttttatgataagaaataataagttctccatgaacgatcaaaggtttatgtcttttagcaattattctcatgtccaccccaatattctttttctaagacatctgcaatccttttgcatgcaaatccatccccatatggattgcttgcctttgccatcttattatactcttcccggctttccagaagaaatttaaagttttggtatatattctcttcattggttcccactaatttcaaggttcctgctacaataccttcaggccgttctgtcgtatcgcgcataaccagtacgggttttcctaatgaaggggcctcttcctgaattccaccagagtcagttaaaatcaagtaacttctatttaaaaagttgtgaaaatcaatcacatctaatggttcaataatgcgaacacgatcgccattacctaaaatacgatcagcaatttctcttactactgggttcatatgaatagggtatatagctttaacatctgtatgcgtatccatcacccgtttaattgctttaaacatatttttcattggctcaccaagattctcacgacgatgtgcagtaatcataattagtctgctatcagaagcccattctagcacaggatgagtataatcatccctgacagtagtttttaaagcatcaatagctgtatttcccgttacatagattgtctctgctttttttccttcctttaaaaggttattctttgcaaattcagttggtgcaaaatgaaactgactgataataccgacggcttggcgattaaattcttcaggataagggctatgaatatcaaaagtacgtaatccagcctctatgtgccccactggaatctgtaaataaaagcaagcaagtgctgtagcaaaagtagtactagtatctccatgaacgagaactacctctggactttcattttcaagtacctctttaattctgattagaatactggtagttacgtcaaataaggtctggcggtccttcatgattgaaagatcataatctggtatcacatcaaacgtagacaagaccatatccaacatttgtctatgttgtccagttacgcatacaactgtctgtatattttttctggtttttaattcattcactaatggacacattttaattgcttccggccgtgtcccaaacaccagcattacttttttcatattatgtaactcctctgttaggaacctataatctccaaaattttattccagattctttgagtttgttaagatcatataaccccttaacatcgataaaaactcgttcctcatcaggaacatttttgtacatattctttattgtatctaagcttaacaacttaaattcatgatgtgcaacagctacaattatacagtcaacgtcagaaacctcactgagcttcgtcaattcaagattgtattcttttttagcatcttgctcattggcccatggatccacaataagtggagaaatcccataactatttagttttttaacaatgtcttctaccttgctatttcggatatcagggcaattctctttaaatgtcaatcccaaaataactacttttgattttttgggggcttgacctgcctcaatcataagccttactgctgcatctgcgatatacccgcccatactgtcattgactatccttccgttaagtatgatctggctatggtatcccatcttttctgcttcataagtaaaatagtaaggatcaacacctatacaatgtccacctactaatcccgggcgaaagccaagagcattccattttgtattcattccatcaacaacttcatttgtgtcaatatccattcgatcaaacaccattgccagttcattcataaatgcaatattaatatcccgctgactattttcaacaaccttaatagcctctgctgtccttagatttgatacagggaatgttcctgcttctatgacaaagtcataaatgcttttaatttcatacaaagattccgaatccataccagaaacaattttacgtatattctcaagacgatgaaccttatcaccaggattaattcgttccggactatagcctattttaaaatcttccccgcatttcatcccggattctttttctaaaattgtagcacaaatatcctcggtacagcctggataaacagtagattcataaacaataatactgtcctttgtcagatttctgccaattattttggaggcgttaatgacagggcttaaatcaggggtatgatcagtattaactggtgttggcacggcaacaataataaattttgcttcttgtatttttttttcatccgaagtaaattcaactgctgtatttttaattacatcatctccaacctcttttgtagggtcaattccttttttatacagatcaattttagcctcattcaaatcaaatcctataaccttaatccctttgttagcaaacgctaccgccatcggcattcctacatagcccaaccctactaatgccaactttttattaccattaataagttctttatataaagacatttttattcctccagttattcataatcagtccaattcaatatggttttcccatccaaaagcagcgttaaaagcaaagcaatcatttttattaatattaccaagctttttattccaattaggattgttgcttcctacagatatgttatcaggaattacttcattatttaaagtataattagttaatccaaatccattattaatagaagggatttttttgtaatcaaatcccattaatctactcattacaacatcacctaacagaggactaaaagcgataccaaccattccgcataccttaggttccggcgacattgggccatttttttcacccgcaactatcgcgtctatgatagaaatacacttacgttttggcttattatgcataattccattctcatctgaatatacaagtatcttattcaaatctaatattgccctccacaaagtatcattaccataccaatgaccatttcgaactacttctaaaggtttacccacaaacggagtaactatttttttggcaaaagctattaaataaccgactactgggatatcttttcttaatatatccattgctatccctcttatttttttatcagtagttgtcttcgcattaacaaaagggtaagcgtccccatctgtttcaggagtccctagcgtatgatgtggaatacagtttttttctcctatgataccaattgcatttttcaagcagcatgtcatcccgccaattttatgggtttttaactttggcatattgatataaacatcacttaaaagtacagatttagatactatatatgagttgttttttgaattgtgataagtttttgcgtgttcttggttataatctgcgccgtaataatctttattccttttgttgcagaaagaactgctgtttcctaaatccaccttgacatatccgttaggatctccatcttgcttcttacgtttgacaattactccattacaagattttttttcttctgtcctaatatcaacacattctatacatacttctgtttgtttttgtacttcttgtattattctcagcaaatttgtatttttcaaaatcattttaaagttggaatcttcttgtggggcatccagtacaaaaatatgccctgaattatctaaacgcaaaattaccgcttcaagaacggccttaataagcaaaggatttgtaataacgtgctcccatttacttgtttttaaactacattgtctaactaggtttggttttataactacatgatctccaggtttcacttctgatactgcatctaatatcaaacgtttcagcgaatcatctatattttgatatccttgtttttcctgttgctggtaaacaaatacatcgtacctattcaaatccattcatcgatcttctttcatatgctcgacgttattcgagcttaatatgttgctctactatttgatattttccattttggggaacagaaaggtggtctacaatcttcaaagtaaattctatcttatgattcgttttactttctaatagttcctttatttttatttgatcttcttcgagatatagattagatacttgtattaacatttcaacttttccaatttcatattgaacgagtttgtacctaattatcttatcaaacgcatcggagtggatatttaaagctgtgagtgatacataagctttgtcaatatttaccagcatatcctgatgccatctcccagttattttttgaagtcttttatagcatctaccgcatttacacgtaggcgtctggctccatgatgccatatctcctgttttatatcttattagtggcatgtcattatttaaaaagccagtcgctactatttctccaaattgtgaagcagcgccttgttcgtcaattatctcacaatatccatacaaaggttcaacgtggtattctgtactgtattcacattcaccagcaataactaacctttcagaatgaccataaaaagaaaatacttttgtattaaatattttttctacatattccttttgttcatctatgacattttcgctagtcgctaaaatagctttaaaatggtgttttatatttatattgttctgatctatgtattttgctaacatcaaaattgccgacatatagccatgtataaactcaggtctatatttttctactgcttgacaataaacatccatagtttcttcacgcatgtcaaatatattgcaactaagttctcttcttaaaggatcataataatagttctgtttctcgcctgcaggatgcagcttttttcctctcaataccagtctactggaatttggccgatatccaactctttcccaaatttgaatcgtatatgcccactcttgcatcgttatattgtccggttggaaaaaacctaagggggttcctgtagagccagatgtcgttacataaatcagttttttctttttcgagtcatttgctatcaatttgtcagaatatttttttacgatatctctgtcgataaatggtaacttatttatatctttaactccatgaatcgaactgatattaactccataagtatcataatactcccggtaaaacggaacttgctcataggcatgtctaactgtaaatacaaagtgttcatctactaacttatccagatctgcctgtgccaaatattctacttcttgaattttttttaatgttccagaaaacacattaccatatcttactctttctggaatcatgtaatagactatgccaccagcctttaataaccaatccggaagctgataatagcatgtcttagctatattaaataaagacatttataatccctcattatgttaacttaaatatggtatactcctggaagtttaataatattatgacagtcaagcactactttattagagagcttatttaagttttcttttatctcatcatgtttcaccattattactaccatgtctatattttcgagaaagctatcaagatcgtaatattgattggaaaccacttctttagtgataaaaggatcatacacttttaatcctgttgcaagatgacgctcttgactttccaggagctgaagggtaggcgactccctcatatcatccacattttccttatatgtaagtccataaagccctacccgattagtatctatcatacctttttctttcataatttcgtatattctattaagaacaaagtctggcatcccatcattggtcctcatagattcatcaatgacctttgcaagactagggtaatcaccaaccaaaaaccatgggtctacagatatgcaatgacctccaacgccgggacctggttgtaaaatattgactctaggatgcatattacatattttgataatctcataaacatccatattatcgtgacggcatatttttgccaactcgttcgcaaatgcgatattcacagcgcggtacgtattttcaacaaccttagtcatctctgcagttttaatatccgtaacaacaatttcgccctgacagaattgcgcataaagggccttaattctttcaccaatagcttggtcatctgcgccaattgttctattattatggagtagctcgtataccatattccccggaataatacgttcaggtgcatgtaccagatagatatctttattaagtttgaaaccatttttttcaataacaggccttatttgtttatcaattgtaccaggagacactgttgattcaattactacagttgctccgtttggacaaacattcattatactttttatggctgctattacgtaataggcatctatttttttactaaacttatcatatggtgtaggaacagatacaatatatgtgtcagtaacttggtactctgtactaaattctattcctgcgctaactgcgtctgcaaaaagtttatccagaccattttcttgaaatgtggtttttccagcatttaaagtattaattaattcattactatagtccgtgcctataactttgactccgtgagaagccaacatcagcgctgtaggtaatcctatataacctaaaccaattacattgaccatttcttctctccctcatattgatgtattaaaatatatattagtcacaatcttttcttctaaattaaatgtactatttatttctaaacaaatggagttctctttcataccaaagtttgaggctactttacatctggcgatttctattgcatttgaactcgttatcttataaatcttatctataataacttcattttcatctaaccgtactacttcacgacctggagtaagatggtatctaacgactgcctcatgtttcccctttccctttagatagtcagaaatctttattcttccattaatcttatcaatctctaactttctgatatgagaaacaggcttatctagtatattttcatatccatcatgtaatgcggtaaattcatcatctgtatcactgcaccttgaattaatcaatattccatgggaccttatagccactcgaaatgccgaccagatttccgaactatttctaccatctatttctaccgtgttatgtgctttcgtacttctacaataatttcgttcattgccaggttcgtaggtaaataccccactatctgcaaatatctgcgtttcttcggtagcccataatacacttaaggaatctgcatgcgcatgccccaagttttcatcaggtccacaatttccgacatcaaaataaattgaatgttttatgccattatactcaaacaggtcatgtacataacctgtgtctttatatatagttacgggattccaatctggttttctcgttaaaacttttatttcctcccatctactgctatagaaaccaatttttcctttaggcgcagcatcattgaaaatgaccttgctggttccgagaaaatcagctgcaccaaacggatagtcatatgacgcatcattaactaatggaatatgtccgtcgctgcttatcattccattaagaaatgtatatgcattacatagaacatctgcaaatctgctatcaagaatctcttttctccataccattaaaacagttgcttcaaacagctgctgtaaagactctacgtggtaagatatgctcctttcataatgacctccgtccggaaggaactgtaacgccgcttccttaattaacagtttttttccgtacttataaaagacgggattatttaaaaatgcccctgcatacattaacgcttttccttcactaagcagatgattagcgcctaattgatattcaacagaactttttaattctttagcttgactccatattgaacttgtatatttacctgtacttttttgcacttgatgtgcattttctgatatgaatccaatccaattcattaatctttcggcaattacatatggattccatttatctcccgtaatataatcactattttgttgaatccaatcctcgattagatcgaagcctttatttaagtatttaatttgtcctgtctgtttaaatgcatcagataaggataataaatatttaaaatcattgattctaaaacatttcaaacgatacgtaacaccagtgcaatcccaatcaatcttattgtcaaatgaaatagtctgtcctgatacagtaggaaatacgccatttaaaataccatcggcttcttctaaaaaaccagttttgggtatcccctttttatatatgtatggaattttagtaatcactattttagttgttctaatttttgtttttcgcttaaaaggccttcttgcaatgtaatacagtcgatatatccactgtcgaggagtcatgtatttcactgtattccaaatgcgttctgcattacttattgtactcacaattattcccttacctgctccataatttccatataatctttcgcgagtttccttcttgaataatgttcttttacagttttttttccattctgccccataatttgaattttcctattccagtcacgatcactgaagaaatcatcaagagtttttaaatcttcctctaaagtaccagttagtgttagtcccgcttgataattattaataatatccgctgcttcacccgctggaccaatatacataactgcaattcctcgccccataacttgaaatagcttggaaggtatagtatatttaaaatcatctgttttttgtaatgtaataacagataattctgttaacttgtaatatttttctaactcttgtgaactcattcctgaaaattgccttataaaatcatatttttgcagccttatatgttcttctattctatttttttgagcgccctctccaattaaaagatattcaaaattatcacagtgctttttaatcttttgtgcgtaatcaaaggtccctattatgttttgcgaaagtcctaatgtcccgaaatagctaagcacaaacttgttttctaattctcttttagtattctcttccgtaatgtcaacaccatttgatattacaaaaattttttgaggatcaataccatccttttggagaacatttttgaatccattagttacgacaattacacttttcgccttgcgacagagaaagagttccagcgctttcattcctttaacggccaaactatttgctgagtgccccgtggcctgtagctgtttataggatatatctctaatttctagtacgaaagtagttttgtatatcttagcgccaccccacgccagcaaagcagtaaaaataactcctgatgtacccagtattacatcccagttctttccaatttttcttttattgaaaagtaaattaacgattccaaagaacagaaaactaattgcattttcaagccttctaaacgttgtagtattaggtttagcaacaagtttgcttcgtattactctaactccattaattgtttcatcattcattaaccgaggagtataaccatcaaaaatctttcccgcaggatagttaggataaccagtgaatacggttacatcatgtcccatttctgtccagaacttagaattatcaattgctctgaaagcaggcgctatagattctggggcataaaactgcgaaaaatataacagtttcattataattctcctatctaagtattatttgttataattaagttacaaactatttttatgcttctatattttcgcttgaacatcgatgtctttctgaaggaggctcaataatcgtgcccctgtttggtataagcgtattcaaaatatgttcgtatgttgtaataagtcgatataaatattaagttttatataagaccaaataaccatatttcccattccaaatagccataaattctttgatcaagataagtaaaggcttgcatatataatataaataccttgaataagaatacatatattagcctcgaataaattgacaaaaatttagaagttgtggtagagaacactttataaataatcactatcgtcataccattttgttaataagtattttgagtatattatttatgactagccagtcggaatagtttttccagttattaagcagttcaataaaattattaatactaaagaaataaaagcagaaactaattttttcaaagtaagcaggccaagatcccgcaataaatccagaaaattgagtctttatttgtaatagactttaaaaaatatgactttccggtaatgctagtaatataaacagtgttataagcatgattatatgaaaactaatgtttacctgtctcaaggcatttatatcccttttaaccaacaaataattgttattatttggactagacactttatcgccctatcaatttatgcaataatcaaagcatcaaagatgaatttatcaatgctaaactttgggagggaaaaaatatgtcaataaattgcagaggtccaggacaaattacagaaatgctaactactgttcactattcagaatgaaatagaactcgaaacacaccatacacttacaatgagggggaaccgaacaatgaactacaattacgaacaacaaaaaatatacctgacagattttataaactctttatctctcgaaagaaacctgtcaggaaaaaccatatatgcatataaaagtgatttattatgtatgtttacatggttgaatgaaaataagtatgaatcaataaatccgcattcaatctctgactattttctttatttgcaaaataataagaaattatctccacgatccattcgcagaaagtatgtttcgattaaacaattctttcactatataaatgttgaaaaaggtgtgaatgaaatttttatgaaattttcgtccagaaagtttcagttaccaaaatcactgccgcgtaccttatcaaagatggaagtaaatcagctgattgctactgtttcaaaagaatacaaatcagcttcaactgatttttaccggagactttgcttgagagatatgtgtataattgaaatactgttttgcctggggttgaggattggagaagtggcagcattaaatatagaagattatgattctggtgaggcttcctttttgattcatggtaaagggaataaagaacggatgctttttatatcatcaataaccgtaaatcaaaagctccagaaatggattagaacgaggcaagagtttaatcttcaggacgatgcattatttgttaacaaatatggaaaacgattaagtatttacagtatagaaaatcttttttataaatatagagaattggcacatataaattctgaagcaactcctcattacttacggcatagtttcgcaacccagctactaaataatggagcagatatcagagcggttcaagatattctggggcatagcagtattgttacaactcagatttatacagaggtatcattaaaaagaaaaaaagaagtgctgttaaattataatgggagaaattttattaatttaccagaagatagtatgatagaagagtggctaaaatagttattaaaaataagaatatgatataatactgcaatcaataaaaaattatgttatagtagaggacaaaatgtattttgcaaaaaatactggaatctatttatagaacaaaaaataatggtctaatagaatataaattttttcggtagcgataaatcatatatttatttggatataaaatagtgaatacatgatactaattataaatggtttagaaatttttattgaaaggcagttaatatgtttgatttacttgataaagctatgtggagctacataataaaggatataggaaaagaattagaatatctcccatacgccctgtttttgggtataattgtgtattttgtgtttaaaattattttgcgtaaaaatagtaaacctctctataatttttataaagtaatatttttagtctatttatttgcgctggtacatattacattgtttgaacgtgaaccgggttcacggacagcaattagccttaccttatttgaaacactgggaggttccagaaataatgcatatgttgtcgaaaatgtacttttgtttatcccatatggttttttacttgcgattctttttcgtccaatgcgtaatttcgtgttatgtcttgcggtaggcgcaatgagcagcttgacaattgaaacagttcaattacttacccaaagaggatactttcaagtggacgatattctcatgaacagtattggaactgtgattggctgtgctgtttttttgataacagctggaagttatcgcgtctgtaaatggattattacaaagtattgtgagtctgcaaaaatttaatctgttgatcatcatcggataatttgtcgtaggttgtcgaaacgtggactgagcaatagaggattatgattagaattataaggcaacagattataaagcaaatagaaccatatagtagaaaagacataagcaacacgtatttagctccttttagattaccatatttacaagttgtataactacctaatatataatataggtcacgttatattggtttatacaagatttaaataatttgctataaaatccacattaaataacagacaaggcaattagctatataatatgaataaaatagcagggttgctaaatattaaagaacctgtttttttatgaatacaatttaaaataattgttcgtaatatatgctaaaaacatattatatagacatgttttaagccgaaaaagcttgcaaaatatggaaaggtgagttaatatagtttcaacgggttacatattccggaaaaacaattttaggaaaaggatttttgaaaggagaatgcaattatgagaatgaagaagcttgctgttatggcattagcaacagctctctccgtaggttcagtcatgacagcctcagctgcatggttacaggagggaagcaactggagataccagaatgataacggtacattccagacaggaacatggtttagagatgttgacggaagatggtatcatttcgacaataacggaattatgcagaagggctggttccaggatgctgacggaaaatggtatttcctggcatacaatggcgttatgcaggttggcttgatcaaggttgacaatcaggtttactacatgaatgcaagtggtgacttattccttggtgatatgactattaatggtacaacttataactttggcctctatggtacaacaaacggacagccaaatgtaccttcaacagctacttatggtggtaatggaaatcagtctctgccaggcggtggaagcagctccaatgggggtggtagcactgcaactccggcagaaaaagttgagggtgcagtaaatgaagtgaaaaatgcagctaaagaatctattaaaggcgctgagagtgtaattgctggtattgaagtttcagatccagtaacgaagggcgatgctgctgtagttgaggttaaagttgacgttatagatattaaagatacggatgatgctgaattagtaaaaggttctattgcaagtgtagttgacactactatttcggagttggacggagctgagaaagtggcagtttctattcctggaattagcaaatcctttaccgttgatgagttaaggggagacaagttagatgatttgttagataactatgttacacctgatttttacaaagatcataagaatagttccgtgacagttactgtaccagtaaatggcgttaatgtaacttacactatttctttagcaaaataatcaatttccaaccatttatagggtggctcccaaaggaaccgccctatttttcagtgcaccttacagcaaaatacaaaacaaaaaccaatatacacaacacattacacaaccatttttcaacccatgcaacaaaaccaatgtggagcaaattatgaaaaataaaacaagggctgcagaccactgtagtctgttatcactgctgttctctacatttctaattgtcatatttttctgtatccctgcttacgccggcagtattaacggcaacgagcagtcgatcgtttccgttatcaacggccagttcgagcaggacggtgttatctacaaggttcgtcaggaatatataaattctgccataagttatttacagcaggatgatgtggatctgacagcggagcaggcacagtcggtgatatccgagatctattctaacgtacagactggtgtcgacagtgggtatttagaggcaatcgggcagacggcacctccggagacagaatcgcagccaacggcgccggctcaggaccctaattccggtactgaaggaaaagacaaagccggagataagaacacagatgtccaggagacagacgaaaccgcagaagctggaaatcagccgggagagagtacggaaagcggagaaccagccggtgatgatcagaatggtggggacggaaccggcgatccgagcggaacaggctctgatgagccacaggcagcaacgcccccgactccggaagtaatctcgattctggagcttgtggacaaggcaccgcctcagtcttacgagtatttatcaaaggatacggatgccctgatggcgcgcatccatataccttatcagacattatggtatatccttatcatattggcagtagtcatagcgattataacagccatatcatttttgaagaagctttttgtacaccatcataacaggaagctcagaaagtattttagattcatactggcagcggaaataggtgtgctgtccgccgtttgttttacggcagtaagcgtctggatcggggcgtttcaggacagtgctgttttgaataaacttgcggatacgggatattaccgaacgatttttgaggaactgcggcgcgatacttccatttcgttcgcacttctggatatcccggataacgttatggatggcgctattacatatgagcgcgtcgttctggcggcaaggcagcaggtagagagtgatttaagccggggcgcctatcaggcagatacgtccatgctgacggatcggctggaggcggatatcagatcgtatttggaaggaaagtcagttaccatgacagagcaggcccagacaggtctggatgaactgatgaaccgcctggatcagaagtactcctctctgcttaaatggccatttgcagcatggtggatagaaatgaaaacagaatttttttcttttgcaaaaatagctctgccgttttcactgcttcttgccattctttcacaggcccttatcattggcctgaaccattataaataccgcggtgttatactgggcgggaaaggccttatggccggcggactgctgactgcggcggcctttggcgtcggaatggtcatgatcggtcagaaactgtcgacgatgacaccggattacatggaactttttttcaaaatatacggtaacgggttgtgcagaaccggaatgattacgggagtgataggagtccttctcggaattattgtcctggttgcagtgcatacctggaaagacagcaaataacaaagtcaacaaaaaacaaagtcagtaagcaaccagtaattattacaaaaagaaagggaacggtaagaaggatggatttatacgacattcactgccatttaattcccggagtagacgatgggtcacaaacaatggaagaaagcctggaggccatgaaactggaatatgaggaaggcgtgcgccatattatctgtacctctcatttttcagcggattgcgaggccggctacacttctaaactgcaggagtcctttgagaagttgaaattgcgcttaaaggagaccacatacggagccgaaatgaggctgcatctggggaatgagctaatgtattccgaaagccttctggagtgccttgacgaaggccgtgcatggacgatggcgggaagtcattacattctggtggagtttttgccgtcggttcgttatgaagagctgtacagggggctgcgaaagttggcctccggcggttatacgcctatactggctcacatggagcgttaccgttgcctgtataaggagaatgaccggctcgatgaattgagagatctgggcatttgccttcaggtaaatggagcaagcctgtttggcggagtgtttgattctgccagcgcggtagtacgcaagctctgcaaatctgggcggatccattttctgggaacagattcccatggcactcattatcgtaaaccgcagataaaaaaagcggcggcgtggatacatgacaattgtcctgcgtcggttgcagaagggattttatgcgggaatccgatggcggtactggaggataaattattttgatttaggagaaaattatgggaaccaatcaggatgacgagattgaaattgatttaaaggaactattttacgtaatcaaacggaaactgtggattatccttctgaccggcattgtgggtgccgtcggcttcggactttttaccgcaatggtgatgaagcccgtctatacgtcctctacgatgctctatatcgtgaataagacgactacgctgacctccctgacggatttacagctgggaacgcagctgactaaggattacaaggtgctggtaaccagccggcccgttacggctcaggttatcactaacctggacttaaatttaagccatgaacagttagtaagaaaaattaaggtggataaccctaccgatacccgtatcctcaccatctcggtggaggatacagacccttacatggccaaatccatcgcagatgagttcgcgtcggtagcatctgcccgcatggccgagattatggattccgcgccgccgaacattgtagaggaggcgtacctgccaacacagaagacaaaaccaagcataacgaagaataccatgatcggcggcctggcaggcgtgttcctggcaggagcgattatactcgtgctgttcgtgatgaatgatgcaattaagacacctgaggatgtggagaggtacctgggactcaatacgctcgctacaataccggtatttgagggagagacaggcacgaaaaagaagaaatccaaacggaagaagagcgggaggtaagcaggatgcagaaagttttattgcgtaaacacgaaaagctggatttcagggcaaacgaggcgtttaaaacgctgcgtaccaacatcctgttttccggacatgatacaagagtcattacactgaccagctcgacacccaatgaaggaaaatcttcactttcattccagctggcgatatctttcgcggaagcggataaccgtgtcctgtttatcgacgctgatattcgtaaatctgtgcttgtgggccgctataaggcggagggcaataaatttggcctgacccactacttatccggacagaaaacgattgacgatgtcatctgcaatacggatattaacaacatggatatgatctttgccggtcctgtttctccgaatccgacagagcttttgagcggcgatttatttgctgaactgattcagaaggcccgggaggagtatgactatgtaatcattgacgctccgcctctgggcagcgttatcgatgcggctctgattgccagacacgtggacggtaccattattgtcgttgagagcggtgcaatcagctataagatggtacagcacgtaaaggagcagctggaaaagggcgaatgccgtattctgggtgttgtcttaaataaggtggacttagaccgcgactcctactatggaaactactacggtaagtattatggcaagtattacggcaaatattatgggaactacggagaagaaacgaaaaaacaggacaaaaaataacataaaaatattcttaaaattacccgcagacaacagagactgcgggtgatttttttgtttatccctcgaaaacgtagcttttctgccgctttttcgatataataataagaaagagttgactttaccgcagaaaagcagtaaaagtaagtggaataaaattaaaaacataataaggatggaaaaaacgatgtatcagattgattttcataaaccggagaatatacattttatagggatcggcggcatcagcatgagcgggctggccgaaatactgatcgatgagggatttactgtttccggctccgattctcatgaatcagagcttacggatcatttagccgcaaagggagccaggattgcgtatggtcagagggcggaaaatattgttgatgggattgatgtagtcgtttacactgcggcagtccatccggacaatccggaatttgcagcggccatggaaaaagggctgccgatgctgagccgtgcggaactactggggcagatgatgaaaaactatgagaacgcggtcgcagtatccggaacccatggaaagaccactacaacctccatgatcactgagatccttctggctgctgatgcagacccgacaatctccgtaggcggtatcttaaactccatcggaggcaatatccgggtgggcggaccggagctttttgtgacggaggcctgcgaatataccaacagcttcctgtcattttttccgaccattgaggtgattttaaatgtggaggccgatcatctcgatttcttcaaggatttagacgatatccgccgctccttccgcctgtttgcagagaagctgccgaaggacggcattctggtcattaacagcgatataacggattatgaaaagattacggaggggctgccctgccgtgtcatcacattcggcaaagaggagagcagcaaataccgtgcggaacaaatccgattcgatgaactggcaagaccggtcttcgacctgagtgtggatggagaaacagtggataccgtagctttgggggttcccggtgaacataatgtgtataactccctggcggccattgctgtatgtatggaactggggatatctctggagatgataaagaagggactgtggaaattcacgggtacaaaccgccgctttgagaagaagggagaactgggaggcatcaccattatcgatgattatgcccatcatccgcaggaaatcagcgcctctctggcgacagcgctgaattatccgcaccggaagctgtgggtcgtattccagccccatacgtatacgcggacaaaggcctttcttgacgaatttgcagaggccctgtccatggctgacgaagtaatcttagcagatatctacgccgcccgcgaaaccgacaatttaggcatcagttccaaagatattgtcgacagaatcgaggcgaagggggtaaaagcccattatattccgtcctttgatgaaatagaaacatttattttggaaaactgtatacacggtgatttgttgataactatgggggccggagacattgtaaaagtgggagaaaagctgttaggtaattagttatccacattatccacatagttttcaacattttatgtaaagaagctatgtggattttttaattaacataaattattgacttacaattttagaaataacggatttatgcggcattcgacacaaatccccataatttttaagattatgtatacctggtttccacattatccacattatccacaattactttggtggataactccccctatttctttttaaggggacttatggtatactatgagcacttggtgaggcagttcacgtacagggtacaggatgaaaagtgaggttatggcggtggattttaaaagcagttttaaagtgagtgcgacgttggtagccaacgagtttattgatacatatatggcatcggccaatggggagtatatcaaggagtatctttttgtgcttcgccatgagggggaagcggtgacggtctccatgatcgcggatgccattaaccacacggaatcagatgtaacacgtgcgttgtcttactggaaaaagctgggggttctggaggcgtctgtggataaagtccccgtcgatggccctgatgtggataaatggcctgcggcggctcagacggcctgcgccggcggcatgattacggaaagtatggaatctccgctgaatggagtgtttccggaggcctgtgtggctgtacagtcctcttatgactacgtggagagaccggtaaagggaagcggcaccggtactgttgtgtacggagaagcggctgtcccggagaagagggaggccgtccttactgccccggaacctgcctcggcgcaggccccggttaaaaagacagagccaaggcctgtttattccccggagcagatcagcggtctggcgggggatgaagacttttcccagctcctatatattgcccagaaatacatgaataaagtcttcacgcagcgggagtgtgaggtgtttgcctatctctatgacggtctgcacatgacggcggagcttctggaatacgtggtggagtactgcgtgcagggaggccacaccagtatccgctatatcgagactgtggcaatcaactggcacgagtccgggcttaagacggtggaggatgccaaggcatatgcttcttcctttacccgggattcctttgcggtgatgaaggccttcggtttaaatgacagaaagccgggcgatgcagagcgtgagatgattgaccgctggtttaagacctacgggtttaccagggagcttgtcctggaggcctgtaaccgcactctgacggccacacacacgcccagcttcaaatatgcggacaagatcctttcgggctggaaaaaggccggtgtgtgctccttagaggacgtgaaacggctggatgagcagcatgcggggcgcacaaagggcaagggaagcggcaatggagccggcacccaggagtacaggggaggcgggaacggccgcggacgaagtaccaaccagtttcagaactttcctcagagagagatcgattatgatgctctggtgctgcagcagttaacagaaaattaaggagggagccatgtcgctcagcaattctcagtatgatgccatcatgcgtacttatcagcagcagcagctgcaaaaccgccatgagcaggaaaacagaatagcggaagtttataaaaagatacctgccataaaagaactggacgactccataagctcctgtgcggtaaagagcgccagaaggctgctggacggtgatcagggggcgttaaaggaactgagggcggagattgcggatttgagggaacagaagagcgttctgcttcgtgcatacggattttcgcctgactatatggagatgcattataagtgcccggactgccaggacaccggctactcggagggcaggaagtgccactgcttccggcaggccgagatgaaatatctttatgcccagtccaacattgaagagattgtaacacttgaaaatttttctactttttcttttgaatattttgatgactcgtcggtactgcccgtcctgggaagaacggtgaggcagtatatgaaacaggtagtggaaacgtgccaccggtttgtggacgacttttccacggaacacggcaatctgctgtttacggggcctacaggggttggaaagacctttctgaccaactgcattgccagagagctgatcgaccgctattattccgtgatctatttatcggccaatgatctgttcgaggtattttcaaaaaaccgctttgagtatcaggcggaggaagagataaaaggcatgtaccagtacattctggactgtgatttactgatcatcgatgacctggggacggagctcaacaacagctttacctcgtcccagctgttttactgcatcaatgagcggctgaattcatcgaagtccacgattatttccacgaatcatccgctgaatgaactgagggaccgttacaccgagcgcgtgacttcccgcctgatcagcaaatatacgattattccgctctatggtgacgatattcgcctgcgaaagaaagcaaaacgcgctgattaacttgactatttcggcgcataatgatataaaagaaccgttgtaagacaaatggatacgttggaggagaagaaatgttatacgaagagaagacgattgagacgattccggtgggcccgctgggattaattccgcttaagagctgtacggagctgggagccaaagtaaacgattatctggtggactggagacgggagcgtgaaagcgagcacaagtctacgattgcattttccggatatcagagagagtcctatatcatcggggccagcacaccgcgtttcggtacgggagaggcgaagggaacgctttccgagtcagtccgcggagacgatttatacattatggtcgacgtgtgtaactacagtctgacctattccctttgcgggatgacaaaccacatgtctcccgatgaccattttcaggatttaaaacgaatcatcgcggcagcggccggcaaagcccgccgtattaatgtgattatgccgttcttatatgagagcagacagcacaagagatccagcagagaatccctggactgcgcactggcacttcaggagctgaccaatatgggtgttgagaacatcattacctttgacgctcacgacccgagagtacagaatgcgattccgctaaagggatttgagacggttcagccgatttatcagtttatcaaatatcttctgagagaagagaaggaactgcagattgacagcgaccatatgatggtgatcagcccggatgaaggcggcatgggacgtgctgtatactttgccaatgtgcttggtcttgacatgggtatgttctataagcgccgcgactatacacagattgtcaatggacgcaatccgatcgtagcgcatgaattcctgggcagcagcgtggaagggaaagatgtaattattgtggacgacatgatctcttccggcgagagcatgcaggatgtggcgaaggagctgaaacggcgtaaagcgagaaaagtctttatctgctccaccttcggtttattcaccaacggcctggccaaatttgacgaatactatgagaatggaaccatcgacaggattctgacgacgaatctggtatatcagacaccggatctgctgtccagaccgtattatatcaatgtggatatgagcaagtatatcgcactgatcatcgataatctgaatcatgacgcttccttgagcgagctgctcaatcctacgtcgagaattaacaggctccttgaccgttaccgtgcgggtgacaggtaggagatcgatggaacgattgtcgaaacggaacgtctgtctggtaggactgacattattctccatgttttttggggcgggaaatcttatttttccgccctttttaggcgctatggcagggacgaatacctggacagccatggcaggctttgcggtgacggccattggatttccgattctgggcgtgattgcagtggcgaaggccggcggacttaccggtctggcgggccgggtccatcccgggtttgcgtctgtttttacgctcctgatctatttgtccatcggaccgtgtctggcaattcccagaaccgccagtacctcgtttgaaatggctgtaatcccgtttctgcatggccgcgtttctgtggggagggctcagcttctgtattcgtgcctgttctttgccattgcatttctggtggctttaaagccggataagctgacagaccggcttgggaaagtgttgactccgtgtctgctgactctgatagcgattctgtttttcggctgcatcttaaagccggcttcggtgtctggttatggggggccgtctgagatgtatcagaagaatccgcttgtgaagggatttctggaaggatacttaacgatggataccatagcggctctgaattttggaattattatttctctcaatatcagcgctctgggagtgaaggcggaagcctccatcataaaagaaacgataaaggccggagtgattgccggcggcatcctggttctggtatacgccgcactggctcatatcggtgcggtcgcgggaggcgcctttggttcttttgaaaacggtgcgcagaccctgaatcagatggtgcgtttcctgtttggcaaggcagggctgattatgctggcggctattttctttatcgcctgtctcaatacctgtataggtctgattagctgctgcagccggtatttctgtacgcttctgccccggatcggataccggatgtgggcgtttatctttgctgttgtcagcctgatcatagccaatgccggactgaaccggattttggagatatccgtaccagtgctaaatgcaatctaccctgcggctatcgtactgattctcctctcgtttcttttccctgacgggaagcggtggcggttggtttacgtctgttccatcgttctgaccggaattacgagcgtagcaatggcactgtatcaaatcggcataacgcctctgggacgcgtgctgctcctgcttcccctgcacagcctgaatctggaatggatcagcccggcggcggtggggattgtaattggagtattggttcgtttcagagcgaacaaaagaaaactgctttttgagtaaaaccatggggctggatcccagtggttattctcaaaaagcagttttttgttttgcccggcagttctattacgaattactaaatacatcaaaactaaactggtgcgtttctccggatattgattcaatacttagttctatggggacgtcatactggtcatagacaatattttcgatcaccagcagcgctgtaccttccgggacctcaagggaggctaccagctgtggggaagcgctgcgggccatgatggaccttctggaatgggcggcaaaaccctgtctgcacatcaaatctccaccagatgataagggatcagattcgcggtcagcatctgcgcctccctctgatggcatgtaaagataattatctgcccttcacaggccttcacgagccatctcagggccgtcctcagcctgtcatcgtcatagaggacaaagctgtcatcaaagatcagcggcatctccccgtggtccccgatgatcagcctggcggcagccagtctcagcgccaagtatacctggtccatggttccgctgctgacctgctctaacggaaccagcttggtcttcgtattgagaaacacattcaggttctcatccacacttaaactggtataaatcccccctgtgatccctgcgatcaggtccgatgcggtcttatttagatagagaccgaaggaatcccggatggaagaggagagcgtcgtcatagtctctaacgccagatcaatggcggccagttcctcgcggattctgtcattttctgccaggatatgcttcaggccttctgcctgggtcttgcaggcggagaggtgctccagcttcttctccagctcccactgtgtcttctgctgtttctcaatgacttccccgcaggtctcctgcctcccctgaagttccgtgatctcggcagccttctgctcaatcgcggtttccgacttggcaatggcggaactcagccgtgtaaattcggccattctggcctgaaatgcccgcatggcgtccatggagatggcagtgtcgcccaaatgcctggaaaatatctcctgcaggaccttggcacttaattccatgtccttctggcgatggcgcagacgaaggtacaggataaggccgatcagatagaagataatggcggcccccaccgccgcggcgatgtagaccagggaatccatcccataagcagctgtcaggtaattgctgtcgcccagatagtagactgcgccggcaccgcacagcagcagggtggcgataacgagcgagagcaccgaaaggatctttttcgatttcctgccgcagacctccttcgcctccgtatactcgtcaaaggtcccctgtgtcttgatggaataggcggtgatggaatcctggtcggtaaactgattattagccaggacctgtttgcctctggccaccttctggatcagctcttccttttccttctgcttcacttccagcgtatcctttacctccacgcgcatgcgctggtaagcctgaatctgattctcatattcaggtgaggcaatctctttttccgtattgcggatctcgctgagcagagaggtataggtgcgggcggcctccggaaccatctgggattccagctccttgtgctggctctttaaaaaggaagttgcctttgtgatattaagcgcgatattgccggtcgtatttaaattggcaatgtaattcttaagctcagacaccatgccctcatcggtagcgctttttaactggccgatgctgaccgtgttgttgtaagcagtctcacttaaaccgcttaaaaggtcgtcgagaaatgcctttgtcggttcgatctcacgtcccgcggtctcatccaccaccttaaattctttcttgttcttctgaaacgtccgttcaatgcggtagatgtggtccttatgctccagccgcagctgtccctcgtaggtgccgctgttctcccacggctcgaacttggagtacagatcgtttctggaggcccgtccgcgctgtttttcgatgccgaacagcatgcctctgataaaggtatggatggtggatttgccggcctcattcttgccgtagacgatattcaagccgtcctcgaaggaaaggttccgcccgtgaaattttccaaaaccgttaatatagatatccagaattttcattcggtcagctcctttcatccgtagtgcgcagcagcgcgttgattccgtaatacagcgccttcttttctacctggctcatctccggcttttgaagggcctgaatatagaagccgatcatatcgctgggatgctccgcgaacagcgctgagaaatcgtactgcggttcggattcatcaatgatttccattattttaaaacgcgtggacagcatgtctaaatcaaaggagatgtcgggatcacgcatgccgcggatgcggaaccggaaaatattctccggtccccggttctgaatctcctgggtaattttcatggccagctccgtgttggtggtggctgtggtcacgttgactgctaaggagatgtactgaagccttgcaaggggaacaaattttaaagaggttaccatgcgggttacctcgttgatctcacctacaaacatgccgtgctggccggcctccgtcttgtcgagcggttccggtgacccggaaaatgccatacggttttcgatcagcacctccggcttatgaatatgtcccatggcaatgtaggagaaatccagtgcgcccatggcccccttgtcaaagggaatgtggttggcgtcgccgccgtgccccaaaagaacgtggattctgccgttgtttggcaccttcagatggtccaggcggttctcgggaatatccgtggtatggtaggagaagccatagacctccgtgttgatctcctcaaaatagacgcactgcagctcctcgtccatcagataagtcacattgggcgcccaggtaaagcttaagagtgcggaattattccggatgcggtcgtgattgcctgcgatgatgacgacgtgaacaccgggtatcgtagaaaacagataattgacttcttttaaatcccttgccagcggctggcggtggaataaatcgccggaaataaacaggcagtcggcttccagctgtcccgcctgtgcgacggctttcgcgaaggtatctttgatatcctgggagcgttccttgctccagggcttatcgctgtccgggctcatgccccagtgaacgtctgctatatgtacgaatttcatagtcatcacctcatagtccctcagttgtttccggcgccgtttttttcatccggctttcccagtaaagataccacaaattccctgccggaaaggtagggaatttgtggtagaattctagagttcacagttgtttacggttcttgggaacgggacaacgtcgcggatattggacataccggttaaatacataacacagcgttcaaatcccagaccaaagcctgcgtggcgggtggaaccgtactttcttaaatcgagatagaactggtaatcctctttctttaaccccagctcgtccatgcgggctgtgagcttgtcgtaatcgtcctctctctggcttccgccgatgatctcgccgatacccggaacgaggcagtcaactgcagccacggttttgttatccggattcatcttcatgtagaaggccttgatctccttcggatagtcggttacgaagaccggtttcttgaaaagctgctctgttaaatagcgctcatgctcggtctgtaaatcgcagccccagaataccttgtaatcgaattcgtcgttatgcttctctaaaagctctacggcctcggtgtaggtgacatgggcgaattcggaatttaatacatggtggagacggtctaaaaggcctttatccacgaactggttaaagaaattcatctcctccggagcgtgatccagtacatagccaatcacgtattttaacatggactctgccagttccatatcgtcgtttaaatcggcaaacgccatctccggctcgatcatccagaactcggcggcgtggcgggtcgtgttggaattctccgcacggaaggttggcccgaaggtgtagacattgcggaaggccatggcataggtctcggcgtttaactggccgcttacagttaagttggtcggtttacagaagaagtcctggctgaaatccacttttccctcgtcggtcttcggaatgtcgtttaggtcaagcgtcgtcacctggaacatctcgccggcgccttcgcagtcgcttcccgtgatcagcggggtgtgtacatacacaaaatcgcgctcctggaagaactgatgaattgcataggcaattaaggagcggacacgaaataccgcctggaaggtattggtacggggacgtaaatgggagattgtcctcaaatattcaaaactgtgtcgttttttctgcagtgggtagtctggcgaagaagcgccttcgatgacgatttctgtcgcctgaatctcgaatggctgcttggcttccggtgtggcgaccagcgtgcctttgataatcagagccgttccgacgctcagccgggagatttcagaaaagttatccatggtgtcatggtagacgacctgaagtgtctcaaaataagtaccgtcacttaagacgataaagccgaaagctttggaatcccgaaggcttctgacccagccgccgacggaaatctctttgtttaaatactgttccctgtccttatatatttgccttactgtcactaaatccataatgatttctccttttgatatgatcgcatacttattaagattatactgtattttgggctgcgattcaagggggagactgtgtaaaaacgctatatccggcatgaaatgtaaaagaaaaccatatttaaggaaaaatgtcggaaaatgcacaaaaaagtataacaatatttcaaatatttgttcactattttttaaatgtgtggtataatgctagtacaataaaattctaacagcaagaggtgataacgtgattaaaaaagaaatgattgccatgcttttggcaggcggccagggaagccgtttaggtgtactgacacagaaggtagccaaaccagcagtatcgtttggcgggaaataccgcattatcgatttcccgctcagcaactgcatcaattcaggagttgatacggtcggagttttgacacagtatcagccattacgtttgaacacccatatcggaatcggtattccgtgggatttggaccgtaatgtgggtggagtaaccgttctcccaccttatgagaagagcaaaggcagcgactggtataccggtacagccaatgcgatctaccagaatctggagtttatggagacgtataacccggattatgtgttaatcctctcaggagaccatatctacaagatggattatgaggttatgcttgagtatcacaaagcgaataatgcagatatcaccattgctgccatgccggttccgattgaggaagccagccgtttcggaattgtaattactgatgagaacaaccgtatcacggagtttgaggagaagccggcgaacccgagaagtaatctggcgtcgatgggtatttacatattcagctggaaggttttaaaagaagccttaatcaagatgtctgaggaaccgggctgtgactttggcaagcatattattccgtactgccacgcagcgggacagagaatatttgcttatgagtacaatggttactggaaggacgtaggtacgttaggttcttactgggaagccaacatggagttgatcgacattattcctgaatttaatttatatgaggagtactggaagatttataccaagagtgatattattccgcctcagtatgtgtctgaagatgcagtgattgagaggagcatcatcggagagggctccgagatatacggtgaagtccataactctgtgatcggtgcaggtgttactgtagcgaaaggcgccgtgatccgtgattccatcatcatgcgcgagagtgtgattggtgccggttcctcaattgataaggctgtcatcgctgagaatgttaaggttggatcaaacgtcgcactcggcgtgggggaatacgcaccgagcaagtatgatccgaaggtataccagtttgacctggttaccgtgggcgaaaactctattatcccggacaatgtcaaagttggaaagaataccgccattgtaggggagacgatcgtagaggactatcccgacggattactggcaagcggagattacatcataaaggcaggtggtatgcgatgagagcaataggaattgtattagcaggcggtaacagtaagagaatgcgggaattgtccaacaagagggcgattgcagccatgccgatcgcaggcagctaccgcagcattgattttgcactgagtaatatgacgaattcccatattcagaacgtggcagtgttgacccagtataattccaggtctcttcatctccatttaagttcttccaaatggtgggatttcggaagaaaacagggcggtttatttgtattcacgccaaccattaccgcggaaagcagcgactggtaccgtggaactgccgacgcattatatcagaatcttactttcttaaagaacagccatgaaccgtacgtagttatctcggccggtgatggtatctataagctggattacggcaaggtgctggagtatcatattgagaaaaaggccgatatcaccgtagtctgcacggatcttcctgagggagaggacgtaacccgtttcggtctggtgggaaccaacgaggacggcagaattaccgattttgaggagaaacccatggtggcttcctccaataccgtatcctgcggaatctatgttatcagaagacgtcagttaattgagctgattgagcgctgcgccatggaagaccgctacgactttgtcaatgatattctggtgagatataagaatttaaagaggatctatgcatataagatggattcttactggagaaatatcgcctccgtagaatcctattacagaacgaacatggatttcttaaagccggaagtcagagattacttcttccgccagtatccggatgtatattccaagatcgatgatctgccgccggcaaagtataatcccggcgcagtcgtgaagaacagcctggtatccagcggaagcatcattaacggtgtagttgagaattccgttctgtttaaaaaagcctatattggaaataactgtgtgattaagaattccatcattttaaatgatgtttatattggggacaacacggttattgagaactgtattgtagaaagccgggatacaatccgcgcgaatacgacttacataggtacaccggacaatattaaaattgtcgtagagaaaaacgaaagatacacattataggtaatgtgacgggaaggggttttgacatgcagattacagatgttagggtaagacgtattgaaaaagaaggaaagatgaaggctatcgtatcaattacactggataatgagtttgtaatccatgatatcaaggtaattgaaggggagaagggattgtttatcgccatgccgagccggaaggcagcagacggagaataccgagacatcgcacatccgattaattcgaatacccgtgacatgattcagagagtaatcctggacaaatatgagacaaccgcattggaactgccggaggaagaggcagcaatggcctgacgttagagttgggacaggcagcagagaagtgaagtttgaatgaatagaagccgcatggagggccgattggccgccatgcggctttgctggctaaaaaagcaatttacatatgggggacaggcgggttataatgggagtagcgtttagatagtttatgacaaggagaggaagtacaaatatgacaatcaaaattggtatattaggatatgggaatctcggtaagggcgtggagtgtgcagtgaagcataatccggatatggagttggcggctgtctttaccaggagagacaaagcgtcgttaaaagtactgacgcccggagtgaaggtttgttccgtccaggaggcggagtcgatgaaggatgagatcgatgtgatgattttatgcggcggcagcgctacggaccttccggttcagacgccggagcttgcgaagaactttcatgtcgttgacagttttgatacacatgccaggataccggagcattttgaagcagtggatgcggcggcgaaagagagcggtcatgtggggattatctcagtgggatgggacccgggaatgttttccctgaaccgtctgtacggcagtgctgttctgccggagggaaaggattatactttctggggcaggggagtcagtcagggccattccgatgcgattcgacgcgtggaaggcgtgaaggatgccagacagtatacggtgccggtagaggctgcactgcaggctgtgagaaatggagaaaacccggagctgactacaaggcagaagcatacgagagagtgctttgtggtggcggaagaaggggctgatttaaagcggattgaggaagaaatcgtgacgatgcccaactactttgccgattacgatacgacggtccattttatcagtgaagaagagcttatgagagatcataaggggattccgcacggcggttttgtgatacgcaccggaaagaccggatgggagaatgagcacagccatgtgatcgagtacagcctgaaactggattcgaacccggaatttacggcttctgtcattgcagcatacgcgagagcggcataccgtctggggaaagaaggcgtaacgggctgtaaaacggtatttgatattgcgcctgcgtatttaagttctatgagcggggaagaattaagaaaacatctgctgtaggaacaggaggaagaggcatggcggcgaaagagatggttctttattatcagccggcgaaagaaaaagaggccggcaatgcatcaaaagcggcaaagttaaagggtgttctgattcgtatgggagtcagaattaaaaatattacaccggagcagaccgggcagacgattggctatctggccggttttgacggattcgatgagatggaaccgcaagagggaagtgtggctccggaaatcgatgaagagatgctggttatgaagaattttacgaaccggcgtattgatgagctgctcgtgggactgcggcgggccggtgtgccgaagattgaattaaaggcggtcgtcacagagacgaactgcggatggtccttttatgctctgtacgaagagcttaagaaggaacgggaagccatgacgaagaaagaggaagactaatcaggatcagggcgaaatgatattatttaactgaaagaaggagaagtacccatggataacgaaggaaagaaggcggcacagacagaccggcaggcgttactggggcgtctgagagacaccagggaactgtatgtgattgtttctgcgtgtacaaagctgccgtatgttgtatgtgccccggagacatttgacgatgaggtgctggtgttttttaaaccggaggaagcagaagccagggcaaagagcctggcggcggaaaagattccggtgagcgttgtaaaactggaaaataaacagctgcttttgttctatacaaatttatacacaatgggagtcaacgcgatttcccttgaagattccgggaaggaagaacttatccagctggaggactttgtcagacggagaggagacgagcccggcgaggaaggaaaagtctgggtggagaatccggcgctgcacttgactgccctgtattatatgcaggaggcgagaagacagccggggccggagatgaattccaaacttatggagctgcaggaagagattgagatgcatttccgcaagggcaatttcatactggccatacagaaggaaggcaatggaatccctcttgtaaagatgaaaaatggggatgtctatcaggcggcatttacagatattctggaatttcagaagtttaaccgggaagaccagctgcggccggtaatcgttccggcggaaaaggtctcccaggtactggcaggggatgccatcggtgttatcttaaaccccatgggaattaatcttccgctggcagtgaaccgcccgccgaaacaggaaaacaggcagtaggagatgcgcaggtggcggcagagagagttggcagctctttctgccgctgtttttgtgattatctttggggggctggttctcgtgtcacggttgcggtgtcatggtcgcggtgtcaaggctggggaggcttgaccgtttgaacggacagagaatgcctgatgaaactggcagaacggaatgcggacagaagccggattcctgtagacgcagctggtattcttgcgcgttttggtggaatcctgtataatggagtcagtgggtgaggtaaacgatgaagaagatagtttcgtattatttaaagccgtattatctgcgtatggcagtcggttttcttattaaatttacaggaacgctgatggatttattccttccgtggacactggcttatatgatcgatacggtgattccggcaaaccagaggccggaaatatttttgtggggatttttcatgattttctgctcggttctggcagtggtgttcagtgttgcggcgaaccggatggcctcccgggtggcgagcagcgcgattgaaacgatccggggggatttgtttgagaaggtgagccgtttatccaatacggagattgaccgcttcaccaggccgtctctgatatccaggctgacaagtgacacgtataatgttcaccagatgcttggaagagtccagaggctgggagttcgtgcgcccatcctgttgatcggcggtattaccatgaccatggcgctggacccggttctggcgtgtattttgctggcggttcttccgctgctgactttggtggtggtcgtggtatcaaagaagacgattcccatgttttccgtccttcaggaccgggtggaccggttcgtccggctgattagagaagatatcgcgggtatccgtgtgattaaggcattgtcaaaggaatcgtatgagagggagaggtttgatcaggcgaaccgcgaggtggtggactgggaacggaaggcgaccgtgaccaccagcatcaccaatcccgtcatgaatgtactcttaaatctgggccttgtggcggtgattcttaccggggctttccgtgtgaaccaggggacgtcagaggtcggaaagattcttgccttcatgacgtattttacgattattctgaatgcgttgatgtctatttccaggctgtttatcatgatttcgaaggcagcggcatctgctgcacgtatcgtaacggtgctggaggcggatcaggagatggtccttcaggagctggagacggatgaggaagccgcgatggcggaagcggaggctgattcggttcatgtagaatttgatcacgtgtccttttcctataataaagttgaaaataatctggagaatatcagtttccggctgaagcggggagagacgctggggattataggggccacgggagcagggaagacgacgattgtgaacctgctgatgcgtttttacgatgccgatcagggaacggtacgcattgatgggaaggatgtgcgcaccatggggcttcatgagctgaggaagcgtttcggagccgtatttcagaatgatacgatatttgaagataccattatggaaaatattaatatgggaagagatttaagtgaagaggcggttatggaagccgttctttacgggcgagccagcgagtttgtggcggaaaaaggcggaatttcggaacagctggatataaaaggggccaatttaagcggcggccagaagcagagaattctgattgccagggcgctggcggccagaccggatattctgattctggatgattcctccagtgcgctggactataagacggatgcggcgcttcgaaaggaattgagagaacatttcgcggaaaccacttgtgtgattatcgcccagaggatcagctctattatgaactccgatcacattatggttctggaggatgggcagatgatcggatacgggacacatcgggaactcatggagacatgtgaaatttatcgggaaatcggaaaatcccagatgggaatataagggggcgggatcatggctgcacgcagcagaagtgaaaagcggctggatgccgcatataatgagccgcagggacgttctctgattcagagaaagcacaccatactccgcctgggccgctacatgatacagtataaatggctgctgcttctggcgtttgttatgacggtggggagcaacctgctggctttggtggggcccatgctgtcggggtatgcgattgacgccattgagccggggatcggaaaggtggatttttcgagggttttccattacgccgggtggatggcggcgttttatgtgatttcttcggtgttgtcttatgcgctttctgttctgatgatcaccatcagccgaaaggtggtctatcggatgaggaaggatgtattcgataagatgctggcccttcctgcgggatattacgacttacaccagacgggagacatcatcagccgcatatcctatgacattgatacggttaatgagtcgctgtccagcgatctgatacagattttgaccacagtgatcacggtagcaggcgctctttacatgatggtggtgatatcaccgaggctggtgctggtatttgcctttacggtgccgctctccgcctgtattacaaagttcgttacaggcaggactcgtcctcttttccgggcaagatcggcaagtctggggaatttaaacgggtttgtggaggagatggtaaccggccagaagacgttgagggcttattgccaggaggaacatgtgattcaaaaatttgcggtgaagaataaggaggctgtggagacgtattaccgggcggaatactatggcagcatggtaggtcccatggttaatttcatcaacaatctttcactgtctttaatcagtgtttttggagcccttctttatctggccgggtacatgacggtgggcaggatctcttccttcgtgttgtattcgagaaagttttccggcccgatcaatgaggctgccaatatcatgagtgatttacagtctgcgctggccgcggcggagcgggtgtttgctctgatggatgagattcctgaggcagcagatatgccgggcgctatagaactggggcgcggagaggaagaagtcaggggagaggtggagctgtcccacgtggactttgggtatgacagggaccggattattctgcatgatctgtctctgaaagcggatccgggtaagctgattgcggtggtgggccctacaggcgcgggaaaaacgacgctgatcaatcttctgatgcggttttacgatccgaactcaggagagatccgggtggatggccatgagatacgcggtgtgacaagaaaaagccttcggaagtcttacgctatggttctgcaggatacctggctgttccatgggagtatctatgagaatctggcatacggtaaagaaggggcgacgatggaggaggtcatggcagcggcgaaagcagccagaattcactcgtttatcaagcgtctgccggatggctatgaaacaattctgacagacgacgggacaaatatatcaaagggacagaagcagctgctgaccatagcgcgtgcgatgcttctggatgcaagaatgctgattctggacgaggccacctccaatgtggatacgaggacggagattcagatccaggaggccatgaggaagctgatggaagggaagacgtgcttcgtgattgcgcaccggttatcgaccatacgaaacgccgatctgatcctggttattaagcagggagaagtggtggagaaaggaaatcatgaggaattaatgagggcagagggggagtattatcagatgtatacggctcagggggagtgaatgagagcagtgcgcagcgcagcggagctgtgcactgcggatgttacagttcacaccctgtccggtaccctgcagcccgctgattgttcaaaattcctaaaaaaccatccaaacattgacaaatattgagtaatatgctatttttaatataaacagacaggaaacgatccactcgtttttattttttaaactcaacctatcatacagcatatagcatataggttgcggttaaatgtcactcatgcattcaattcattatcgtatgagatcatcatatgggatataggaaagaagtgcatagaatatgtcaatcagccatcccctcacacccttttctgccagtggaagagacggaatgagcggagatggcatgtattgcacccggggatcagtaaaattcgtcaggtgctcatatcaaggaggacatcaatatgaaaagaccagtaacagcggcaattgcaggtctgggcaacaggggaaatgatatctatgcccattatcagcttgtagcgccggaggagatgaaggtggtggccgtcgcggaccctgtggcaaagaagagggaggctgccagagcagagtacggtgtagcacctgaaaactgttttgaaaccgtggaggacttattaaaacagccgaaacttgccgatgtcctggtaattgcgactcaggacaagcagcacgtggcccaggcagtggagggaattaaaaagggatatcatattctctgtgaaaagcctatttccccaagtctggaggaatgtcttctattgcagaaaacagcccatgaatatggccgtatggtagcggtgggacatgtgctccgttacactccgttttactcaaagataaaagaagtgattgagtccggacagatcggggatgtggtcagtgtccagggactcgagaatgtaaaatactggcatcaggctcacagctttgtgagaggtaactggcgggattcggtggagacgagccctatgatccttgcaaagtgttgtcatgacatggatattttcgtttggcttctgggaaagaagtgcagacgggtttcgtcctatggatctacgtatctgtttaaagaatcaatggcgccggaaggatgtgccatgcgctgcctcgacgggtgtgcggcgaaagagaactgtccatatgatgcggaaaagatttatattacggataagggaaccggaatccgtcatgtggttgacgagaagctgaccggtgacgacgcgtggccgtgctgcgtactctctcagacgctgactgaggaggcaatctatgagcagataaagacgggcccatacggccgatgtgtgtatcactgcgataataatgtggtggaccatcaggtggtcaatatggaatttgaaggcggtgtgacggttaatttcaccatgagtgcctttaccagcagcgggggccgcgatattaaggttatgggaactatgggagatatcatcggtgatttacatacaggaattgtgaaggtcacaaactttggaaaagagacggagatttatgatatcaatgcgactgcaggtgatttatccggtcatgcaggcggcgataaccgcctgattcatgattttctggaagcggtagtggagggagagacaaaggggcagttaaggaccggcgttgatgtttccatacaaagccatatcattgctctggcggcagagtattccagagtccataaaggtgaaaatgtggatctggaggagtttattcagagtgaaaaatataaagagctttaagggaatccattatttataaagcgttagagaaggagaggaattctatgaaaaaaagatggttagctttatgtctggcaacagtgatggcggcatccttaactgcatgcggcagttccaagacgtctgcgccggatacaacgggaacagagacggctgcggcaggcagtgagacgaaggccggaggcgaaacgaaggcagaagaggcaccggcaggtgcggtggaacaggtggtgaccattccgatgttcagtgatccggatacgctggatccgggacgctccgatgacgagcagaagaatgctatcgtactggagattcaggaaacgttaatccgtctgatggacggcaaggtaacaccgggaggcgccgagagctgggagacctccgacgacggactggtatggacctttaagctgagagacaatcagtattctgacggtacggctgtaacagcacaggattatgtgaattcaattcgcagaatctttgatccggaggttaactgccacaatgcaggaatcttctactgcatcaaaggaggagaggattttaatacgggaaagggaagcaaggaagatgtagcggcgaaagcaattgatgacaaaactctggaaatcactctgacagaaccgcttccatatttcttacagctgatgacatttgccaatgtgactccggttccggaatccaagacccagggcgagaagaactcttcctacggtgcgacggcagaggaactcagcagttcaggaccattctacgcggcagagtggacccgcggttccaaaattgtgttgaagaagaacccgaattactgggatgcggcaaatgtaaaactggaaacagtcaacatggtgctggcacaggacgagaatacgagagagcagatgtttaatcagggccagctcgatatcttgagaaaggtccgcagtgagtacgcggatacattaaaggccaaaattgacggaggcgaggtacagcttttagagggaccgcagccgagatacagttatatctgctttaataacgaggatccggatgggatctttaccaacgaaaaaatccgtatggcattctctatcgctctggacagagaatcgctggttaagaacgttatgaagaaggatcaggctgcatacggtatgattccttacggtttgagtattggcgaggagctgttccgggatgtttatccggagccgatgaaggacttcctggctcaggacccgaaagcactcctggaagagggcttaaaagagattggaaaagaaggagagcagattacggttacattccttcagaagaactcggataatgatacgaaggttcaggcagagtattaccagaatcagtggcagacaaagctgggcgttattgtgaagatcgacacggcatctgacaactcttcctttaacaaccaggtatccaagggactgtatcaggtatgtcagaccggctggggcgcggactataatgatccgatgacatttatgcagtgctatatgacaggagacggcaacaatccggcattcttctccgatgccaggtatgatgaactggtggaagcgtgcaagacagaatctgacatgaaggtgcgcggtgaaaaatttgcggaagcagagaagattataacagtggaacactgtggtctggcaccgattacctttacatacgacaagaatgtggcaaagagcagcgtgaagggcttctatatcaatggagccggcggcccggcaatcgaactgaaaagtgcatatgtagaatagaattaagagatcagaacatggactttgacaatgcggggcaggtatttactgccccgcattgtgcgtgaaaccagatcggttatggggaaacgcatgagtcagaaacaggatgggaggttcaagatggtaaagtatattttgaagaagatcggttatatgatagttacactctgggtaattctgacgataaccttcttcctggtcagcgtcattccgggcgatccaatgcaggcggacaccaaggtgcttcccgaggcggttgtggagaacttaaaggcccggtggggactggataaacccataggagaacggtatgtcatttatttgaaaaatcttctccatggagagctgggagagtcttataagaccccggggcttacggcaaatcagattattaaggacaggttcccggcatccgcaaggctcggaattcaggctgtggtgttagggctggttctcggactgcttctgggaattctggcggcctttcaccggggaacctggattgattttattacaatattcattgcgatcgtgggggtatccatcccaagctttgtatttgccgccctgctccagaaatacggcggcggtgactatttcccgattgtcggctgggtatcacccggaatgaaaatacctgacattttccggtatacggcgctgccgacactggcagcttccatcggcggcctggctacgtattcacggtttatgcggtcttcggtgctggatgtgctgagctccgattatatcctgctggccaaggcaaaggggctgtcgaattggaaaatcataacgcgccatgtactgcgcaacagcatcactcccattatttccattgtggcgccgcaggtggcgggaattgtgaccggatcctttgttattgagagaattttctccataccgggcctgggccgttactacgtggacagcgtcaatggccgtgattacccgatggttctggccacgaccatcttcttttccttcatcttcattctttcgattgtcgtgatggatattttatatgcaattgtcgacccgagagtccgtaagggcattattgaaggaaagtaaggaggagagccatggaacagggaaatgaaatgacagttacaaaagatctattccggcgtgtcggagtggatgaacagaaatcagaatccgtggtgcgccccagtatttcctactggcaggacgcggtccggaggttaaaacagaataaggtggctatggtaagcctggttgtgctcctgttaattctggtgatgtgcgccatagggccatatatttatccccacccgtttgatgagcagaatattgagtttacgaatcaggcgccttccctgcagcactggttcgggctggatgatctggggcgagatatcttcgcgagaatctggatggggggaagaatctccttaaccattggaattgtgggggcgtttgtgtcgcttgtaattggagtgctgtatggcggaatcagcggatactgcggcggtcttgtggatgatattatgatgagaatcgtggaaatcctggtaggagtgccgtatatggtggtggtcattatcatgtccgtggtgttgggaaaaggtatgacttccctgctgattgcgctgtgtatcacaagctggacgaatctggcgcgaattgtgagagggcaggtgctggaactgaaggagagcgaatacgttctggcagcccgggcgctgggaacgcctcctcttcagatcattgtgacgcaccttcttcccaatacactgagcctgattatcatcaatacgactttttccataccatcatttatctttgccgaggcatttttaagctttgtagggctgggaattcagccgccgcttacaagctggggagctatggccgctctggggcagcagcaaatgtcttattatccccatgagctgattttcccggcgctggcaatctccttgaccatgctggcatttaacctgctgggcgatggactccgggatgcgtttgatccgaagctgcgccagtaatatggtttgtgaataatagaggaaaggcaggcatcacctatgagtcaaccattacttgaggttaaaaatttaaaggtatcatttcatacatatgccggagaggtacaggcggtccggggcgtggattttacgctggaggctggaaaaaccatggcgatcgtgggggagtccggaagcggaaaaacggtgacttccaaggcggttatggggttaattgcttcaccgccgggtgaggtaaagaaagagagcagtatcctgtttgaaggtacggatattttaaagtatacggaaaaacagtggcaggattacagaggcaaggatgcggccatgatttttcaggatcccatgacatctctcgatccgaccatgaagatcgggcggcagatcatggaaagtattgtggaacatcagaaggtgggaaaacgggaagccatgcagagggccatagaactgcttaaaaaggtggatattcccaatccggatgagagagttcatcagtatccttatgaattttcaggcggaatgcgccagagagtggttatcgctatcgcgctggcctgcaatccgaagctgatgattgcggatgaaccgactacggcgctggatgtcacgattcaggcacagatcatcggcctgttaaaggagatacagaaagcaaacaatacatcggttattatgattacccacgatctgggagtcgtggccggtatggcggatacgattgcggttatgtatgcgggctgtattgtggaatatggtaatgtcttcgacatattcaacgcgccgcagcacccgtacaccaacgccctcttaaacgcggttcccagactgaatgtggagaataaagcgcagctggaggtgattccagggacgccgccggatctcatatcaccgccaaagggctgcggatttgcaacgagatgcaagtactgtatggaaatatgccgtcaggcgccgccggaatatacggaggtatcagatacccacaaggcagcctgctggctccatcatccgatggccagagaggcatttgattacgatgatataaggagggtttttgaagcatgacagggatagaaaaagataatcagaaacccatggtccatgtggaacatttaaaaaagtattttcaggtacggaaaaaggggattttaaaagcggtggacgacgtatcctttgatatctgtgccggagagactctgggactggtgggggagtcgggctgcggcaagacaacctgcgggcgtacggttgtaaagctgtatccggctacatcgggaaccattgagttcgatggaagagatgtaggccggttaaagacaaatgaggagataaaatggtttaaaaagaacgctcagatcatctttcaggacccttatgcttctctggacccgcgtatgacagtgggcgatattgtcgcggaaggtatgaagaaccatgatttatatccggggaaggagcgtatggaacgggtccatgagctgcttaatctggttggacttaacaaggaacatgccaaccggttccctcacgagttttccggcggccagcgacagcgtatcggcattgccagagcacttgctgtagatccgaagtttatcgtctgtgacgaacccatatcagcgctggatgtgtcaattcaggcccaggtggtcaatttgctggtgcgtcttcagaaagaactgggactgacatacctctttattgcccacgatttatccatggtgaaacacatctcggaccgggtgggggttatgtatatgggccatattgtggagctggcttccagtgcggaactgtaccggaacccgcagcatccgtatacgaaggcactgctgtcggcaattcccgtgccggatcctgagtttgaacgatcgaagacgctcataccgctggaaggagaggtggggagtccgatcaactgcagtgagggatgcagattcgaaaaacggtgtaaatacgcgacggaaaaatgccgcagtgtgactccgcagcttacggaaatagagacgggacattacgtctcctgccatcttttaaaccaggcaaaaggccattgattgacagtctctgtttattatgatatggttaaaaaaatattatttttaagagagagagcacgatggttaataagataaagaggacttccctccagtccgagatcatacggtttattctggattatatcagagaacatgatttgaatccgggggataaacttccttcacaggagagcctgctggccatgatgggggtcagcaggacttctctgagggaggccatgaagacgctggaagccagggggattctggagattcagaatggaaaaggcgcctatgtgggcggtttggtggatgctgacggtgtgcaggtcattgattttacacaggaaaaggaacgtcttctggaagcactggaagtgcgcaagattctggaacgggagattttacggatgctgatccataccatcaccgatgaggagttaaaggaactgggagagattaaggacatcctgatgagcaaataccggcgggggctgcagcagacggcggaggataaaaagtttcattataccatctaccggctttgccataatcaggtaatgtatcagctgattctgtctttaaacaatgtgatggagaagttctgggagtttcctcttaatatggaggacccgtttctggagagtattccgctccatgaagagctttacgaggcgatctgtgaaaagaacgtaaggaaagcgcagtctatcaatgacaagctgttagaggcagtttacagagatatcagaaaacagaggtaacagatatggattcagggggcataaacagaagcggttcgtgcgccctcatttaaacctgtcacatagcatataggtgtgaagaaaagggggataagatgacagatcaatcggagtatttaaaaaatgataagctgataacatctcattatggggaggaatttgagcattattacaatgccgttgttcctccgatttttatgaattcactcaatgtctttgagacggttgatgattactatgacagcgataaaacggataagcatgtttactgctatgggcgggtacagaacccgacggtacggattctggaggataaagcagcggctctggagcaggggaccggtgctctggcgtttgcttcgggcatggcggcggcgacgacagcggttctcacggtctgtaaggccaaaagccatgtggtctgtattcgaagtgcttatggacccttaaagacgtttctcaatgaatactgcagggagcacctggatatgagtgtcacgtatgtcaaagggtacgatacggaggagtttgaacatgctgtcacagatcaaacggatttaattattctggaaagcccttcttcggttgtgttgtctcttcaggatattcatgcggtatctgaaattgcaaagaaacaccatgcttacgtttatatcgacaacagcttttgtacaccgatttaccagaagccgctcttgctgggcgcggatatcgtgatgcataccgcctccaaatatatggggggtcacagcgatattatcggaggagtcctggctgtgaaggacgaggaactcatggcgaggctgaggcagcagagagagctttttggcgggatcataggtccgatggaagcatggttaatcattcgcggcctgcggacgatggaggtgcgcgtggaacggcatcaggcaacagccatggaaatcgcggagtttttagagagtcatccaaaggtgagaaaggtctattatccggggcttttgtctcatccgcagcatgaactgatgaagcggcagcagggcggaaatacggggcttttgagttttgagattaaaggaagcgtggaacaggcaaaggaagtggcacagcggcttaaaatctttaagatcggcgtttcctggggcggttttgagagccttgtctgtatgcctcatgcgagacaggatgcggaatcatgccgtttcctgggagcggaccagaatgtactgcgtattcactgcggactggaaggtgcagaggtattaaaggctgatttagagaatgcgctgtcatgcgtgtgacagagggaaaaagaacccgccgcatccggctggggcaaagtatatacagggggattacaggatatggcgattgcttttcatgaaagaacgggagagttccatctttataaccgggaaatcagttatattatgaagcttctgcctgacgggtctgtcgggcagctgtactacggaaaacggcttcgtgacagggaagattacggtcacatgctggaatatgctgtgagagatatggcaccctgtccatttgagaacgacaatacgttttcccgggaacatgtccggcaggaatatccggtgtatggaacgggagacatgcgctgtccggcttatcgtattacctgtcataacggaagcagagttaccggttttgcatataccggacaccgtatttacgaggggaaaaagccgcttgagggactgcccgcagtgtatgtggagaacgacagggaagcatgttccctggaggtgtatttagaggaccgtctgatccatacaaggctggtgctaacgtatactgtctaccgtgattttcctgttattgccagacatgcaaggtttgaatgcatggagggctgtgaggggatccggttggatcaggccatgagtctgagccttgatctgccggacagctgctatacgatgctcgatttagcgggtgcctggggaagggagcgctatccggactttcatccgcttcatcaggggattcagtcggttcacagtatgagaggacacagcagccatcagtttaacccgtttctggcgctgatgaggccgggaaccggggagacggcaggggaggtcatcgcagcggcccttgtgtacagcggtaattttcttgccagcgctgaggtggataccatggggacaacgagagtcatgatcggtattcatccggagggattttcctggccgcttgcagcgggggagcattttcagacccctgaggcactgctgatttattccgataagggattaaacgggatgagccaggtgtttcaccagctgtttcggaccaggctggccaggggctggtggagagaccgggagcgcccgattttaatcaataactgggaagctacctatatgaacttcaacgaagaaaagattctgactctggccgaaaaggcaaaggaggtgggggtagagctgtttgtcctggacgatgggtggtttggaaatcgggacgacgacacttcatcccttggagactggtacgcggaccggaaaaaacttccggatggcattgaaggattgtctcagaaaatacgggatatggggctctccttcggcctctggtttgagccggagatgatcaatcagaacagccgcctgtatgatgcgcatccggactgggtgctgggaaacggggacaggccgcgttctgtgggacgccatcagctggttctggacttttcgaaagatgaggtgatcgattatattgggggactgatggaggatatcatcgagcgtgggcacttaagctatatcaagtgggatatgaaccgcagcatcaccgaggtatggtcatcgggaagaggagccgccgaacagggaaccatcctgcaccggcagattcttggggtctatcggctgtatgaacgtttgatccgaaaatttccttacgttctgtttgaatcgtgtgccagcggcggagcaagatttgatcctggcatgctctattatgcgcctcaggcgtggacctcggacaacacggatggagtggagcgtataaaaatccagtatggaacgtcttacgtgtacccgttaagttctatgggaagccacgtttccgcagctcccaatcatcagacacaccgcagtgtcccgttggctgcccgtgcagtctgtgcgtattttggtacattcggctatgagatggatgttacggggattggtggggacgaactggaacagatgaaaaaacagactgcatttatgaaggcacaccgcagactgattgcagaagggacattttaccgtttgatcagtccctttgaaaacgaacgcaatgaggctggctggatggtggtttctccggataaacgggaggcgctggcagcttatttcagagtgctgcagccagtcaatacagggttttgcaggatgaggctttcgggacttctggaagatggggaatatgagatccgggaacaggggctggggacactgccatatacgtattatggggatgagctcatgaattccggtttgattctgtcggaccaggccagcggtgtaaggtcggcaggggtgccgcagggggattatcttgcgaggctgtttattctgaacgtgagagacggcagagatggaagaagataaacggaatggttcccagtttttttcctgtggataatgagcaggacggacgcgttggtgcgtccgtttggaagcagccgtgaaagtcaaaaacccctccgggacattcccggaggggttccaattcttattctactgataatcgcagacattcgcccatttctgaagtaattcaacttcttccggacgctttttcgacagctgagcagcagctacgatcggcagccatgtctgcacatacttcttggctgtaccggtcttcttacagaagatatccatatacatatcagcttttttctgatcctgcaaacagaacagaaggtaggttctggcaacatctgcactggcgttaccctgagttgcgtgtacccagtcgagaacacacatggagccgtcttctcttacgacgatattggtcgggttaaaatcaccgtggcataatttggtatgctttggcatgctgtccagcttggtacgcatgtcgtagcgtgtgatatcacttaattcttcggtctcaagaatctgcctggacatcttatccttcagcttgtttaacagaggacagtgtttggaaagaatattcagatgaagatcaaccatctgttccatgtattctgcaagcttgtcagggttctcatccatcagctgctggagggttttgccttcaatgaagtcaaacgtaatggaccacttaccttcaaatacaccgacttccaatacctttggtacgtcaattccgccggtttcttctacacgcgcggtaatcagcgcttcatttaacacttccgccttcgggaaatctgcgttgaaaaccttaatcgccttgtctccgtcacgatatactttttttgttgctgttgttgcaatcaattctgctgccatatataacctctccttccatccttgagtctaaactatgtagtagttttggttcttttattttactacaaattccataaaaagtacagatattccggtaaaaagttcagaatattttgcatacaatttacataaaactaaaaatatgatcagaaacggaaaactgcggttccgtatgccggaagcgggaaggcgatggagtaatcctggccgtcacactcttttttcaccgaacggaatgcaggcgctttgtcgccgcgtttatagaggccgtggctgttatccagcaccagggtataggtgccgcgtttcggcacgcctacacggtaatccggccgctctaccggagtgaaattgattacaaataaaagactccgtttgtggtcgcggctgctgcggacaaaactgaagatgctgcggtccccgtcgttggcattgatccactggaatccatcccagtcgtaatccagctcgtaaagcgccggatatttgcggtagagctgcagcaaatcttttacatagctctgtaaatctgcgtttaacggttcgtcagccagataccagtccagcgccgtcttttcatcccactcgtggaactggccgaaatcctgccccataaagagcagtttcttgcccggatgtcccagcatgaaggtgtagcccgcttttaagttggcgaacttgtcgtccaaaagtccgggcatcttgttgatcatggagcatttcagatggacgacctcgtcatgggacagcactaaaatgtatttttcgctggtaaaataggtgagtccgaacgtcatcttgtggtggttgtatttgcggaaatacggatccagcttcatatattccagaaaatcgtgcatccatcccatgttccacttaaaggtaaagccgagaccgtcgttttccggcttctgtgtcaccttcggccatgcggtggactcttcggcgatgacaatggcgccgtttccgcggtccgccatcacgctgtttaagtgcttgaaaaattcaatggcttccagattttcattgccgccgtatttgttgggaatccagtttccattttcccggccgtaatccagatagagcatggaggcgacggcatccacccgcagtccgtccacgtggtacttttccacccagtaaatggcgttggcgatgaggaaattgtctacctcatatttactgtaatcaaatactttcgttccccagtccgggtgttccccttttctggagtcagcgtactcatagagggcttctccgtcgaattcagagaggccgtgggcgtccctgggaaaatgggccggcacccagtcaagaatgacgccgatgccttttttatgcaggtaattgatgaaatacatgaattcctgtggcgtcccgtaacgggaggtaggggcaaaatagcccgtgacctgatatccccaggagccgtcgtaaggatgctccgcgatgcccatcaactcgacgtgggtgtatcccatatcggttacgtaatccgccagttccttagcagcttccacatatgtatagcagccgtctttctccggtctgtttttcctgcgccaggatccaaggtgaacctcgtaaatgctcattggcgcgttcaagggatcggcgctcccccgcttttccatccaggcatcgtcactccactggaagccggagatatcggtggtgacagaagcggttccgggccggtattccgcgctgaatgcatagggatccgccttaaataagattttgccgcttttcgttgtaatggcgtatttgtataattcgccggtggcaatgccggggacaaatgcctcccagattcctgaatccgccagcggctgcatcggatttgcctccgggttccagctgttaaaatcaccgacgacgccgatctgctccgcgtgaggcgcccagacggcaaagtacatgccgcttttccccttgtattttttcggatgtgcacccatcttctcgaagatttcgtaatgtctgccgttgttgaagagataacggtccacttccgtgataaatcctgtcccaatttcctttttgcttcctgccatatgtttagccctccgtaatctttagaataaccccccggtttgccggcagagttaccgtgattttctgatctgtaacgggatactcttctccatcgagaagattgaccgctgtggtgccggttaccgggcttggtatggtgacggaggtttccgccccatcgttgtttaccgcggtaatgatggcatgtccctggtggaaccgtgcaaatgcatactgtctgttggtgagaaggagttcctgataccgtcccccgtggaattccggattctcatcatgaatggttcccagtctggcaataagatctgtcaggccgcagtgaagtgtttccctgtctgcgattgcgatgcagggccgaagcgcatcatcgcttgtctttgtccgccggccttccacgccccattcgcctccgtaatagatggaaggaatcccgggaagggtgaacaaaagtgtgtaaacgggatataaatgatccggatcgtttagtttgctggcgatccggtcttcatcgtggttgtctacaaaagtgtagagtctgccgccgatggcttcgaggcgcttaacattatgggctatttcgaagtaattgtggtcgttgtggccggagtaaatgcttttgtgcagctcataattggtgacggaatgaagcatctcatcgttcacccatctgctgtaatcaccgtgaatcacttcgcccatcagccagaaatcctctttcatggcagcggtctggctcctcaactctttcatgaagccgaagtcaagcacgttggcgcagtcgaggcggattccgtcgatatcgaaggtatcgatccagaaccggatcgtgtcaaataagtactgtttaacatcgggattccacagattcagacagggaagttcataatgaccctgccaggcctcataaccaaaggaatctcccagcggactgttccagccgaagtttacacccctgtaccagtcacggtaaggagagctctcccgattggcggcaatgtccaaaaatgcaaagaactcccggcctgtgtggttgaaaactccgtcaaccaccactttgatgtccgattcatgacacagggagacaaagttcttaaagctttcattgtcacccagacggcggtccaccgtgcggtagtcccttgtgtcatacccgtgtgaggaggactcaaacagtggcccgatgtaaatggcgttacagccaagtgaccggatatgaggaatccattgatccatttcctcaaaacggtctgtaacgtcggcaccggaattctctttcggcgctcccgttaaccctaagggatacatatgataaaatacccctttttcataccacttgctcatatacttatcctccagtgtgaaatgtttatacctcccggcttttgaatcgccgcaggaggaactgataacgcagctgtgccgcgtttagttcgtagatatagcagtcgatcagcgtggggtcgatcacctgttcaaaatggtttcttgccgagtcgatggccgttttggaacgctcgatctcccggcgcaggtttttttcttcctcggaacggaccagccgttttctgaatattatgtttttcatcgtttttcatctccagattagaatgagtcaataattcttttataaaaaatagtatatctggaaaataccataatattcataaattgcctgtattcatgaggtttttggtgaatacagctccagaagctcctggagacagttcccaagccttcgcagttcttttgtgctgtccgcaatcgtcagataatagtagttggaagtcccttccctgcgtacattgaccagtccggcatcttttaaaatttttaaatgatgggaaatggcgggccgcgacagattcgtctgttccgtaatttcctttacattcatgccggggacgccggaaggccggtatccgttcagtgaaaccgcgatatccgtctcataatcgtcgtagagaccggagccggcaagaaccccgatgatggacagtcggacctcgtcgccgagcgcaataaacagcggcatgcagtcgcggaaaagcttattcaaatcgccggcttccaacatggtaattcctcctttggtttaaaaaaataaactaattgtattttaccatttcaggaggagaacgtcaacaaagtgcggcggaaaaagccgggttccggaatagaaaaaaggccgttgtatcaggcctgaccagttatgtaaagcggttgaatgtatacagtatttttgtggaaaaccggttgactttttggccaggattgtgcataattaagaaacattcttacccccgctcggtgggcagatatgattcatgcggtcatagaattttttttatggccatagcgccgatattccggcatgattcccaggtttgataaaataaaagacagaaagaaggggattttatcgtccaaaatttgattttgctgttggtgctggctgcaggagcgtattacgatgtgcgggagcaccggattcccaactggtgggtggctgtgtccgcggtctgcggaatacttctttccatggtggagtcaggagcgccgccggggccagccgcgtatttaaaagaatgcggattatttctggcgcgtatgctgaccgtgtccgcactgttttttccactgtttatctgccgcatgattggagcgggagatatcaagctggctgcattaatctgcggctactcaggctttgccggcggagcttcggcgattggtctgggatttctgatcggggccttctggtcctttctgaagatgatggtaaaagggagctttcatgagcgtttttgccatctcgcagcctatatcaggcgtatttaccatacgaaaacaataacggcatattatgataaggcccgggacgggacggaggcggtgatcccgctgggagtctgtctgttttttgggaccatggcttttatcatgatgccgggataggagtgaaggtgtgacaaacagaattatggcggtctatgatgtagaccctttttatgccgaccggtttgccgattttgtaaaccagaaggagaaagtgcctttcaccgtaatggcctttacgacgctggagcggcttaagaattatgccgcagaccatgagatcgagctgctgctgatcaacaactctgtgccaaaggcggagattgaccgtttgggggcggtacgggtcgtgacattggcggacggagaaaccgttccggttgacgggcagtatccaagcgtctataagtatcaggctactgataatatcatgcgggaggtgatggcgtgctactgtgcgggaacgattcagccggcactgactgtaattgggaatgccggggatatcataggcgtgtattcccctgtgaaccgctgcttaaaaacctcttttgcactgactgcgggtcagctgctgtccagaaaatcaagggtgctttatgtcaatcttgaggactgctccgggctggaaaaactgttcggggaagagcacaaagcggatttgtcggatctgctgtatttttacggacaggggaactacagctgggtaaggctgagttccgttatctattcctggggggatttggattacataccgccggtgcgttacccggaggatttatgccagataaccgccgaggagatggcagacttattgacgcggattgccagggagagcgcctatgatattgtggtggtggacttagggcagtttgggaaaaaggcagcccccgttctggaggtatgcagtacggtttatatgccggtgaaggatgactgcatgtctgtggcaaaggtggaggaattcgaggaatacctgatccggtcgggacatgaagcgcttaaggagcgtattcagaagatcaagcttccgtatcacagcagttttgggagaaaggaaaactatctggagcagctgctgtggggggaactgggagattatacgagacagctgctgaacgggaggtaggaatcagccggcagcagggaacaggagggataaaggatggataaagagttatgaagggagctgcgtcaggagctgatggaggttctggaaggccagagccataccagcgatgaagaactgtatgaactgattgatgaacggatcctggaatatggacaggccaggtacctgcctctgaaggagagggtggagttacgcagcagcctgtttgattctttccgcaggcttggggcgcttcaggagctggtagatgaccgtgaggtgactgagattatggtaaatgggccggatcatatctttcttgaaaggaaggggcggatagagacctgggagaaaggcttcgagagcacggaacagctggaggatatgattcagcagatcgtcagccgcgtaaaccggaccgtgaacgtctcacggcctgtagcagacgccaggctgccggatggttcccgtgttcatatcgtcctgcctcccattgcgctggatggccctgcggtgacgatcagaaaatttccggagcccatcactatggaaaaattaatcaggttcggttcaatcagcggggaagcagctggatgtttgaagaacctggtgactgccgggtataacatttttatcagcggaggaacgaattccgggaagagcacatttttaaatgcgctgtctgcctttattccggcagaagaacggttgattacgattgaagattccgctgagctgcagatccggagtgttccgaacctggtcagactggaggccagagggcccaatacggagggggagggggccgtcaccatagcggatctgattcgtgcggcgcttcgtatgaatccggatagaatcattgtgggagaggtacggggaagggagacgctggacatggtcatggccatgaatacgggccatgacggcagtttaagtacagggcacggcaacagcccgaaggatatgctgtccaggctggagacgatgatgcttatgggcgccgaactgcctctgccggcgatacgcagccagctggcatcagccctggatattctggtgcacttggggagactgagggacaggagcaggcgggtactgtcgattgtggaggtggattgttatgaagaaggggaaatcaaactcaatcccctgtatgagtttgaagaagacgttgaagaagggaaggggccagatacggccgtctccggctgccttaagaagaccggagcaattaagcacacggaaaagctgcgggccgcagggattgtattatgacagatatcgtctgtccgccggagagtggtttagatatgccgcagcaggagccggtattgcggcagcagtgtcttacgtattttaccggagtctgccggtatttatcatgttaagcccgttcgggctgtgttatcccctgattaaaaaagcggatttaaaagaccagcggttaaagcggctgaatctggaatttaaagaagggattttgattctgtcctccttcctgagcgccggatattcagtggaaaatgcattttcagccagtattcgggagctggcagttatgtatggtgcctccggtatgatggtattagaattcagtcacatggaaggacagatccggatgaaccggccggtcgagcaggtgttgatggagtttggagacagaagcgggctggatgacgtccggaattttgccgaggtatttgcggcggcgaaacggagcggcggcgaacttgtctctattattaatcatacatcgggagtgattcgcgacaaaatacagattcaagaggagattgccacgatgacagctgccaaacagtttgaacagaagataatgaatttgattccattttttctggtattgtatgtggacgtctcttccccgggatttttcgatatgatgtatcagaccggtgccgggagatggatcatgacaggctgtctggcaatttacgcagcagcgtatgttttagcgggaagaattctgagaatcgaggtgtaaagatgagaaaatccataaaatattcggttccaaagagctcggtaatctgtgctgcggcaggaattctgctgtatgcaggactgatgatttggcaggggggaaaatggatgcccgtgtcttccctgcagaggcctgctcacggaaacggggaacttctctacgaggtaatcgttcgggagttgggggaggaagggcgggaaataccggttacaatacccgtgggagaacggcagtattcagatgaggaggcggaagctctgtatgatgccgtatttccagaactgacagagcggattctgggcgggaatgaatcgctggaagcggtgcgcagcgatctggatttagtccgggtactggaaccctacggcttaaccgtccgctgggagtctgaaaatgtggagcgggtggatacctttggaacggtagttaacagcggagtcccggaggagggagaaccggtctggttaaaagctgccttaacggacggggttcatacgcgggaatacgagattcgggtgactgtgatgccgccggttctcaatggggatgaactgtttcaggaaaagatcatggaggcctgccgccgactggattccgtacagaagacagataaccagctttttcttccggaggaggtggctgggaagaaagtgagctattaccgggaacgtgagacagactatacggtaatccctgttctggggattctgctggctttcctgtgggcggcacgggtaaagatgaacgaacagaatgtaaaaaaacagcgggagcagcttctgcttctggattattctgagattgtatcaaaattcatggtatttatcagtgcggggatgacgatacggacggcctgggaacggattgctgcaggatatgagaagacggttcagacaggaaaccggaaagcgaggcctgcctatgaagaaatgtgccataccatatcccagcttaagagcggaatggctgaaggcagggcatacggcgagtttgggcggagatgcggtctgcagccctacgtaaaactggctgcgctgctggaacagaaccggaaaaccggaagtaaaaatctaaaatctgctctggagctggagatggtgtcggcgttcgaacagaggaagaatctggccaaaaaactgggagaagaggccggaaccaagctgctgcttccattgttcctgatgcttggagttgtcatgattatgattgtggtgcctgcgtttctggctatttattgagaagggaggtgaaatggtatggaaatggtaaagaaagaactgatggcatttttgaaggaagaggatggcgtgggtgtgatcgagattgtgctgatcctggtggttttaatcggacttgtaatcatcttcaaaaagcagattacaaccctgttgaacaatgtattcaaggaaattaacagtcagtcgaaagaggtatattaatatgcggaaaagcggacagataaccgtatttctaagtctggttctgctgtgcgtctgcagtctggtgtgcgggctcgtggagtccgccaggactgctggagcaggctggtatttgaagctggcggcagattccgccatggattccgtattcagcggctatcaccgggaggcgtgggaacagtaccggcttttcctgctggaatacgaagaggaggaggaaccgggcagtacgtggctgaaatatatggagccgtatatggaagaacacggctggtatccggcagtcataaagtccgctgctgttaaggggatttccgatattacagataaacacggcgctaatttaaaacaggagatacaggactatatgcggtttggtatctgggataccgtgtcggaagagtcagaagcggaaaatctgtggaaggagcttaaagaggcggaatccctgcagcacgtttcagaggcttacagcggtcatgcaagggaggcggcccgcatggagcgggcgctggaagccatatggaaatcactggaaagtcaggaggaatacaggcaaaaggcggccgtcaggctggcagaccgggatggggccggattccggacggcggcaaagcagctgaaaaaagagggcggacgtcttcccgggctgataaagacttatgagaagaaggccgatgacctggctgcccatttagaaaaaacgagagaggagacaaaacaaaagtgggaggatttaagtgaaggtgtgcggagcgctatggaggaggaactggcgggctacgaatcctatatctctgagaatggagccaaacggctggagatccgggcattaatccctgaagcagagggaaatacagcgataattgaccgtgcagtggaacggtcttatgaggttgaagagataatcgctgaatgggatgaggaggatgaaggaggcggtccggatgagggggcgttatgggactctgtcgaagccgtctgggacagggtgaaggtaccggagctttcctttcgggcaggcttaaaggaagcggataaacagaatcttctggaacagattcagcaaatggcaggactgaatctgctgatgctggttctccctgaaggggaggaggtctcaaaaggtgtcattcagacaaagagtctcccatcggttcaccatacagaagatattttaaaagacagttttttggagcgcgtattaaccgatgaatatataggcagattttttacctgtttccggtcggaggacgaaaaggaggtgtgctatgagcaggaatatgtgctgggaggcaaatcgacagatgaagaaaatctgaaatctgcggcggcgaggattctggcggtgcgggaaggccttaatctcattcacattctgtcggacagccagaagagagaggaagcccatgcgctggctgcagcaatcaccggtgttaccggaaccgcaccgcttaccggcattgtagcattctttgtcatgacagtatgggcgctgggagaatcggcagcagatgtaaaggctctcctgggcggagaacgggtcccgcttataaagacaaaggagacgtggaacctggatttagacggactcctggctttgggagaacagggaaaggtggaagcgggacaggagaatggggcgggaaagaactatgaagaatacttaaagatgctgatgtttatggaaccggcagagcgtctgtattatcgggtaatggatgtagtccagatcaatctatccgtaaaacagccgggttttaccatggaacgctgtgcctgtcaggcagagattgtgggaaccggcaccggaaaacatctgttttggctgggaggcgatccgtgttataccgtggaagtacatacagacaaagcatattagaacaggaggcggaggataatgcccttttttcagcggcctttatcaaaggatttaaataataaaagatcagttactctccaggtacgaatcccccttgagcttcgcggccttcctggaaaaagggtattatcttccgcctccatccggagtctctggtgtgtacggccattggattgtctgcgtatgggagccagtataacggtagaagccgccctggcactgcccctgtttctgtttgcggtgatgattttaatgatgcccatggttctaatgaatgagagcagaaagatacagtcagagctggaactggtctgtgcggaaatcagccagtatgcaggcgtactttccgattctgcgctggaacgtggagactatgaaaaaggaggaattccggaggagctcatggaggatctgacaaagacgggctttcgcatatatgcggaaggaaagatcagaagcagaatccgcacggagaaggcaggccatttttcgttgacggactccaggattctggaagatggagaaaccatcgacttaattctccgctatgagatgtatcttccatttccggtatttcgaataaagagcgtgccaatgactgccaggagctgcagaagggcgtggatcggaagaacgggaggaaaggggaatgggaattccgggcaggctgagaatgatgaactggtctacgtcggtaaaagcagcacacggtaccacagagacaggaattgtcattatctttacaatcatatcagcgtgatttcctttgccgatgtggagagtgtgagaaattctgatggacggaagtataaaccatgtgccagatgcggaagccaggcgggacagggaagttctgtttatatcatgccaagcggggagagttatcatagcgacaggaattgttcctccattatcgcctatgtgcgggcagtgccgttatcagaagcagagtatttaggtccgtgttcttactgtgcggaatagacggaaaatgcgggagagggaagggagaattctgatggaaaaaatgaaatggagccatgcaatctttatgacatttctgctggccgcgtcatggcaggatttacggaataaaagtgtgagcatatggctgtatctgggatatggggcagcagctggtgttatgaggctgatcggcggtggtcctgttttcacgatactaagtggaacgttggtgggagtggtgcttttggccgcaggcagactgacatcaggtgcgatcggaagcggtgacggcatgtttttcattgttagcgggctgtacctaagcctgaatgagaatatacggctgcttttaaacggaattttgtggggcggcgtattttgtctgtttctgttcctgtatggaaaaaaacacggaagaaatatacacaggatggcggtgccgttcttaccgtttctgattcccggctggatctggatggtgatttcatgaagagacgcctgaagggaagttataccgtagaagcggccttcgtaatggcacttgtcctgtgggctgtgttgttttctgtacaggcggcctaccggctgcgggatgagactgtgggggccatggcactgcatggagccgcagagtatctgcgccatggggaggagaagacagcagaagaggctgagaattatgcagaacgtctggcagggagaccattttcatggagcggatatcaattcagaatagaacagacggaaagggtactgaagggccatcgaatccatgcattgggaactgcgggaacctggtcccttgaaattagccaggatgaatacgatccggaaaattttctgcgaatgtgcagtcttccagaccgggaggaatgaaatggaaatcacatataaaagagagctgaagcataactatctgattataaccccggaagaagctttttacgacagctatgagatacggatgctggccgccaactgcattgaaggcctcttaaaatttcacgtaaagcaggtggacaacaggaaatcttattactatgaaattacatcgaggcagccgctgacacggattctggaatatcagagtttgggagcggagcaacttcggtgcctgattacagggattgtcaggactctggagcggatggagacgtatttactgcaggaaggccagattctgttagagccggagtatatttacgtggagccggaatatttttcagtatatctctgtctcattccgggacggcagggaggatttccggaagagatgacggctcttttgcaatatcttctgggaaaggtcaatcatcaggacaaggagtgtgtggtgatggcatacggactttaccaggaaagtttaaaagaaaattatggaatggcggatcttttaagactgacagggctggatcaggcggctgacaggagaagcaggcagggagaagaatggagtacggaagaaaataactggccggacgtggagatggaagagcgtggaggggatgagtttctgcggccggtgagcagaaggaagatggagacgcggagtgaaccggagtggaaagagcacggaaaaatagtgtctgaaaataaaaaaatcttgcaggctggcaatgaaaaaagagaagaaaggcgtatgaaaaagaagactctgtttcagaatattttaacattatgcacgattttagcaggaggtcccgttctctgctggcttttatacggaggaaggggagtgaaacattattggcccattctggctggtgtggatgtcctgacagcgctttttctggctgtccgtaccattgctttcggattacatgaggaaaatccggaagaacggcatttctttgaaagggagcataaaaatagagaccggtatggggatacggaaaaacgtcatgagtggcagatggtatttcaggaagagcctgagactaattgtgatatcccggtatcaggtaatcaggaggtaaaaatcagaaatgaagagtgcaatacggtcctgctgacggagcaggaacagccagcgaatgccagatgtttccgcagtctggagccgggagttccggatattatcatttcgtatgtcccgtttcttattgggaaacaggaggggctggcagattacgttttatcccgggatacagtcagccgtcttcatgcaaaaatagacagagaaggggaagagtatagaattacggacttaaattcgacaaatggcaccatggtgggaggcaggctgctggagacgaatgaaaccgcgccgttattgcccggagaagaagtttatattgcaaatgtaggatttatatttacataaagcggcaaattgtgctagaatggtcgtaagattagaaggagagcacaatggaagatttgtacggacgaaaaaaagcatatgtgaatatcgggcttatcgcgctaaacgtgctgtacttcctttttctggaggcgacaggttcttcagagaatacttcattcatggtagcgcatggtgccatgtacgcgccgctggtaatagaacgtggtgaatattaccggttgattacctctgtatttatgcattttggaatcagccatatcatgaacaatatgttgattctttttatcctgggtgacaatctggaaagagccctgggccatataaaatatctgtttttctacctgatttgcggtgttggtgccaatattgtttccatgatcgtgaatttaggggaataccgaaacgtcgtatcagccggcgcctcgggagctatctttggtgtgataggcggactcttatacgccgtcatcataaatcgtggccggttggaggacctgagtacccgtcagctggttgtgatgatcgtatgttccctgtattttggctttaccagcacaggtgttgataatgccgcgcatattgcaggtttattgataggcattgtaatggggattcttttataccgcaagcccaggaaaaaacgcaataccgagatatggggataaaatggaaggaggtgagagtgtgagggatgacaattgtattttttgcaaaattgctaatggcgagattccgtcagaaaccatttacgaagacgagacgtttcgtgtaattctggatttgggtccggcatcaaaaggacatgctttgattcttccaaagcagcattacagtgacatctgtgaattggatgaggatgtcgcggccagggtccttccactggcagcaaagataggaacggcgatgaagaaatctttgaattgcgccgggttcaacgtagtccagaataacggggtggaagcaggacagactgtatttcattttcatgtgcacattattcctcgttatgagaaagggcctgttatggtttcgtgggtaccgggagaggtgagcccggaagaattaacagaaacaggagctgccataaggagcaccctgtaaccaaagggggcataggagatgagcatgcaacaagatgaagatatgttgttacagtcgatttatgaagagtatcagggaacgctccgccggattgcgagagcgctgaatgttcccaacatggaactggaagatgtagttcaggaaacgtttattgcttattttaggaagtattcattaacatggtcgccaacgcttaagaaggcgatgctggtgaaaatcttaaagggaaaagcaattgactgtctcagaaagaatggacattatgaaaaggtcagtcttgatgaggagaattcaataagatgtattgagatgctgaccacctatgtggtaacagatcccattgatattattatcagtgaggaatcgatacagaggattactacggaaatagccaatatgaggcaggaatggaaagagatggctgttttgtattttctcgagcagagaaccattccggagatttgtgaaatgctggagataccgggaacggtttgccgctcccggatttacaggacaagaatgtgtctgaaaaagattctcggaccgaaatacgatatttaaaaattatgaatacttagttttgaatgcttagtttgaagccagagattcgatcatatccacgattgtatccacggcattatgcagttcactctgttccatgcggctgatataggtttgacggtcatggtaggtttgagtaatggcctggaatagggaatcgtcagaaagattctcttcttccagaacgcagctgaagccctgcttttcaaaggattttgcgtttaagatctgatcgccgcggctggcagcagcagaaagcggaatcagaatgttaggtttgtggagtgccagaatttcacagatagaattggctcctgcccttgatatcattagatccgctgcagcaaataaatgttttaagggtgcatcaacgtactcatactgtacatatccccgggtggctttcagactctcatccagattgccttttccgcagatatgtattacctggaagctctcaagcagtcttggaaggatatggcgtacagagcggttaacggtaacggaaccgagactgcctccaataatgagaataatggggcggttagcagacaaaccggtgtgtttaagtccagtcagccgatcgccctgcaggagttctttacgtatgggggaaccggtaaggaatgccttttcttttggaaggtatcccagggtttccgggaaattacagcagattttagccgctgatggaatacagattttattagccagtccgggcgtcatatcggattcatggataataaccggaattttataatgctttgccgcaagaactacgggaacggcaacaaatccgcctttggaaaatacgacatccggccgatgaagcttaatcagctttcgggcctcgccatatccttttacaacgcggaatgggtcagagaaatttttgatgtcaaaatacctgcggagtttaccggaggagataccatcatagggaattcctgctccttcgatcagtttccgttcgattccctgatatgatccaatgtaacggatctcgtagccatgttctttcagagatggaatcagagcaaggttcggggtaacatgtccggcggttccgccgccggttaaaatgatttttttcataagacgttgcctcccaatttcgatatactattatagtaaacgttagcaacaaaatgtcaaccccaaagcgtgtgggaacttcaggataacctgtaattatgaggtgtgtgcgtggaccaggataggaatcatggaaaaaaatgttctgttttcaaccaaataaaatatttttttacacgacaagtaaggatggatgcacggttgcttgattttatgcaggagcacccggaaatagcacctgattctgatccgctcgaagcgccgccagatgaattccagaaaatattggatgaaatggaaaaaaggggaattaagcctgctgttaaaagacagataaaagtaaagacacgcctgagccaagctggaaattatatgcggaaacctgcgtttgttgcgttgttggtggttttgatcgttggggggacttctgtggggacatcggcgaagaaggcttatgattataggatgagagagaggtcggtaggaaagagtaatcttgtatggaataatgatcagtatatattgtcagaagaagatggcgtagataaggcctataatgaaatagaggagttattgggtatcaaaccactaaaaatggcatatttcccttttgagatggaatttgtaaagattgaattaagcgaggggaatgctactatggaatttcgttataaagaaaagaatttttactttattcaagctaaatatccagtgactgcttctaatagtatagcttccgatagaactgtatatgaagaaatatataatagatggatagatgaaaatattagaatggaaaagaataaattaacgacgaatgaaattgaatatagtgctactataaactataatggtgcttactattatctatctgcgataatagatgaagatgaatttgcagaaatattaagatatctaactttttaaaggagaagaaatgaaaaaaataattaagagtttatgtttaagcatgtttttatgtataatatgtacaatgccggttttggcgcttagtctagaccaaaatgttaagctactgaaaggtacaactgagcaggttattgttaaacctcaaccgagagggtcgataatatcaacaggaactttaagaatatcgaatgggcaggacggaacaataggtgtgtttatgcagactttagcccacgttgatgtggatgaaacatcttttggagtttatttggatcggtggattgagagtgaaaagagatgggcaaatattgaacattatacattttcatttactaaagaggagtatccagatgaagatttggcaatgaaatctttatcattcaaaattgtcggacaacctgtagattgttattatcgtttgagggggttacatttagttatattaaatggtgagcgagaaatgttaaccacacaaacagatggagtcttgctaacaaaagaatagtagacatgctgaatatataaataatggaatcttaaatagtttatagtagtgttttcataatttatctaaaaagggaatgtttcaaaggtaacatctttttgaaacattccctttagcgttaaaatatgacaagcttattataaaagcttattttcccactcctcctccttaaacccaaccaaaacaaaatcttcccccacaacaatcgggcgttttaccagcattccatctgtagccagcaattccagctgttccgtctcagtcatttctggaagacgatcttttaaattctgttctttgtatagatttccacttgtgttaaaaaactttttcaggggaagtccgctttttttgtaccaggtttccaactctgatacggacggattttgttctttgatgtggcgggcttcgtacgggatttggtggtcgtcgagccacttgcgggcacgcttacaggtgctgcagggaggatactgtaaaaataatatgctcataatagacattcctttctcttaatcaatttaactgctgaatatttaatgtgatttcctacaggcattgaaagccttttaggacgattgagcctttggtactcgggacaaccggccttgactctattttatcttggaatgccctgaatgaaaaggggatttttgaatagaatgtagtaatagatagatttgaggagtttcaatgagctttattttattcttgtcggaggcaatggttccgctgattattttttatattgtaggatttggaattctctctaaacgtccggtctttgatgattttatgaatggcgccaaagatggaatgaagacggttgccggaattatgccgacgttgatcggattgatgactgcggtgggtgtgcttcgcgcttcaggttttctggatttcctgggagaacttttgaagaatccggcaagctggctttgccttccggcgccggtggtgcctgtgatcctggtccgccttgtgtcgaactcggcggcaaccggacttgtgcttgatatctttaaggaatacggtacagattcttatgtcggcatgctgacatctattttaatgagctgtacggagactgtgttttactgcctcagtatctatttcggtactgttaaaatcaagaaaaccaggtatacaatgggaggcgcattggcggctactgctgcgggagtggcggccagcattgttttgagccgttttttggcataaaaaccagtatttaaacagttttttaagaattttataagaattcaggtggttgccttaggattcattatcatgtataatcatgaggaagcttttattggcaggaacgtaggaaagggattgacgtggatacttacgggactcttaacgaagtattggtaagattgtttcgcgatattatggacatagaacaacaggccattattacatctgagtttaatgacttgacgaataatgatatgcatgtcatagaagccattgggatcgaagaaccgaagaatatgtcaactatagcaaaagagctttctgtgacagtcgggacactgacgattgcgatgaacagtctggtaaagaagggctatgtgactcgtcagagaggaaaagaggaccgccgcgttgtctatatattcctttcagaaaaaggaagggctgcttacgagcatcatgccagattccataaggatatgatcgatggcgtcatcggtcagctgagcggagatgaggtagaagctttgattaaagctctgaccaagttgaatacctggttccggagccttgaggagaactagaaggaggctataattaatcatgaaaaaattcatcatgtgttttgtaggagcgatgctggtattatctttggcggcatgtacaccaactcctgtaaaacagtcagaatcagcaacagagcctatggttgaggcatcgaccggcggggccagcgataaagtaccggacccgaacgtagaaccgatggagatcatatctgtatacagttccaatgaagatgcgaccggtttaaatcaggcaatggacgcggtagatgaactgacagctcagtcgcttgtcgataagctgattgaatatggtgttttagaagaagggactgaggtccttaattttgacacaaaagacggtgttggtaccctcgatctgtcgaaagtaccgagcagcggaacatcaggggagatgctgatgctgacggccattggaaatacatttacagagaattttgaactggacaagctgaaactgcttgtgaacggaaagaattattccagcggacatatcgaacacggagataatgattatctggaatacaacagggattataagaagatgtaagatggaagataaataaaggtgccgtttaaccgctgattccgggtggttaaacggcacctttattgaatgtaaagagtcttacggtttcaacgatgattcttctgttaattctcctgcaaattctcctgctaatccatctgttccgccagccacagccggaaatatggctgtataatactgaactgagccggacctatatcgagaaggaaggtatgaaacgcttttagatcaaactgatcctttaaaatcttttcagcagtatttctcatttccataatttccagatagcctacgtaatactccatatagttggtaggattctctaccagactgtaatagatagtatctgccacatcactgtcaccgatattataaaatttgctgagataatcttttacctgtcctttgtcccagccatcgtaattgatacagatatcgagcaaagcatacagaccaagagagatggcggaattgcgggctaaaagctgccccatgctgggatcgagcccgttatccagagtgtaggaataatactctacataggtggcccagccctctgaataactggagaaggagagaattctccgaagatcacaggtattatggctggtaaagtagacgttctggtataaatgtccggggtatccttcatgagccagtgttgggaacagatcttcattttgaaatctggtgccgccattgatgtatatgacattatcctgatagcggtccagcggaggaacaaggtaaaatgctggacttaaggtaccttccagcgccttgggaacatatttgaccttataactgcactcaggaagggcagggaaatctttggagatctgcccgttcaatgattttaaaatttcatcgggcttagtgtactgaaaggtataggtatccagggcgtcaaccagttcaggatgtgtctgaacgatttcccctaatgcctttaaatcggaatttaactgtttctcaatggctttctgcagctttaaaaccgtgtcataggaggtggcagtgttggatttcaccagatattcaaaatattcttttccctgcgggaattcacttaaccctttttcattcgttccggtacccatcagtgcggtgattccgtcaatcaggtttttatacgcagggataaaatgatcttttaatacagccaggttttgttctttataggccgctttttcttccggtgatgcgtcagtaagtgcatcaacgcgttcgttaaaggtctctgccagaaaactgtgatccggctgaatgagatacgcttcgcatgactgaagtacatggtcggcggctgtgtcgcacatgaaaagccctgcttctgatttttctttttcaaattccagaatctgttcatagtatgtatcgatggtggacagaagggccagatagtgatccacgtcttttttgctgtaaaatgcatattctgccaacaggacaggcagctgcgcctgaatgccgatggtactggttaatggctgtgcatagagctccatcccttccgaggataattccgtctccagataggaggagagaattttataggtaagtttctgttccttcgtcagtttctttatatcgatggacccaagtgctttctttaaatcccgcatctcattatagtttttcttcatgcttcccagggagaattccccaaaggtatcagggatttccgtgatgccgcgcgaggcgggatcggccagtgtgtaatgaagatccaggcccgaattactgagttcctctttaaaaatggtctgagtaagagcgtcaaattgattctggacgctcacatgatccgcctggtactgttcgtactgggcggaagacggttccgccggtgcaggcgtctttggtcctgcgcaggccgtcagcatggaggctgagagaagaagggccagcagacggcgggcctgttttacgtgtttgtttgtcatagttgttcctccaatattcactattataattatatggagaaaaagagaactcatgagtggaactttggccaaaaacaacgtatttttcagttccgacggaagttccggccagtttcctgcttgacaaaccggatggaaactattacactaagagttacaaatccagtttatataggaatgcagagaaaagaagagtaagaagagtgcttcatgtgcagagactcccggaagctgaaaagggagcttgaggtccttcccaacatggtcttggagcagcagagccgaagtggcggttaccgcctttaagctttgacggttacacccgttatcgtgtcagactgtaatcccgttttggatgggagcgcagccgatgaggtccgtgtcgcgaggtacggacaaattaaagtggtaacacgggaactattccgtctttaagtgtcctgaaaggatatttataggcggttttttgtgtaatagggaagtgtcccccgcgattcaaaaaagtctttcaggcaggaccgtttatttttcaggattgcatgtagtttgtgataagatgtacaggagggaaaaaacaatgtgtaaagattgtaagaaagaaccgtattatattactactgccatcgcctatgcgtcgggaaaaccccacatcggcaatacgtatgaggcagtgctggcagatgcgattgcccgttttaagagagcggaagggtatgatgtatttttccagacaggaacagacgaacacggccagaaaatagaagaaaaggccgcggcagcaggcgtaacaccacaggaattcgtggatcaggccgcggggcagattaagacgatctgggatctgatgaacacgtcctatgataaatttatacgtaccacagataaggaccatgaggctcaggtgcagaagatatttaagaaactgtacgatcagggcgacatttacaaaggctattatgaggggctttactgtactccctgcgaatccttttttacagagtctcagctggttgacggcaaatgtccggactgcggccgtgaggttaagcctgcgaaggaagaggcgtatttcttccgtatgagcaaatatgcagatcgcctgattaaccatattaatgaacatccggagtttatccagccggtttccaggaagaatgagatgatgaataatttccttcttccgggtcttcaggacctttgtgtatccagaacaacatttagctggggtattccggttacctttgatccgaagcacgtaacttatgtatggcttgacgcgctgaccaactatatcacgggaattggatacgactgtgatggagacagtacgttacagtttgctaagctctggcctgcagaccttcatctgataggaaaggatatcatccgcttccacaccatttactggccgattttcttaatggcccttgatctgccgcttcccaagcaggtatttggccatccgtggctgcttcagggtgacggcaagatgagtaaatccaagggaaatgttctctatgcggatactctggtagactttttcggcgtggatgccgtgaggtattttgttctccatgagatgccgtttgataacgacggcgtgatctcatgggagttaatggtggagcgtatgaactctgacctggccaacatccttggaaatctggtaaaccgtacgatttccatgtccaacaagtattttggcggggtggttgccaatgcgggagacacggaagaggtggacgacgatttgaaggcagtcgtactggacgaagtgaaaaagacccgtgagaagatggagaagcttcgcgtggccgatgccattaccgagattttcaacatattcagaagaagcaataaatatattgatgagacgacgccatgggttctggcaaaggacgaggcgaaaaagggccggttggagaccgtgctctataacctgacagaagcgattaccattggcgcttccctgctggaatccttcatgccggatacttccgcaaagattctggagcagcttcacacagagaagcgcagtttggagcagatggatcagtttgggctttacccatccggaaaccatgtgacggataagccggagatcctttttgcccgtatggacatgaaagaggtaatggagaaagtagaagccatgcagtctgcttcggctgccggaacagcacaggaagatgccggtgaagaagcggacgcaccggaggttattgatattgaggcaaagccggagatttcctatgatgattttgctaagcttcagttccaggtaggcgaaatcattgcctgcgaggcagtggcgaagtctaaaaagctgctctgttcccaggttcgtatcggaagtcaggtaaagcagatcgtaagcggaatcaaggcacactattctccggaagagatggtgggcaagaaggttatggtggttgtaaacttaaagcctgcaaagctggcgggagtcttgtctgagggcatgcttctgtgcgctgaggatgcggaaggcaatttatcccttatggtaccggagaaatcgatgcctgcgggagcagaaatctgttaatagagtagataataagggttagtacagcgtattgcaggttcttatgcatatagagcacccgctgttcacaccaggactgtacctgcaaatctggccgcaggattcacgatgccactgatttgcagacgcatctcccatgtgaatatcgggaactctgagctcaggaatctccgatacgctgtactaaattccgggaatccggtcccggattttgaaaggagaacggatggagcagacgctgcccaaatatggagccaaccaacggtcaggaggaatatcgggaaatacgctgaagatgattgcgataatcaccatgctcattgatcacattggagcgggagtcgtggaaccatatctgagtatgaatatgggagccatggatggaaatgaaatgtttaaccgcctgtattacctggacaggggcctgcgcataatcggacgggtggcctttccaatcttctgtttccttttagtggagggctttctccacacacgtgatgtgaaaaagtatggaagccgcctgcttctgttcagtttgatctcagaggttccgtttgatctgatattttttaatacctggttttatccgggatatcagaatgtctatattacactgtttatcggacttgtggtactggccggctatcagcgctgtgagtatgatgtggttaagaagatgcttgtggcagcggcaggatgcgcagcggcgtatctgctgagatgcgattatgatatcagcggtattgtgatgattgttattctgtatgaatttcacaataataaatattatcagatgcttgcgggaggattaatggcagcgatagaaagtatcatcgcttttggggctgcggcactggcatttattccaatcagcatgtataatggtacaagaggacggatgaatctaaagtatttcttctattggttctatccggttcatttaacggttttatatctgattcagctcctggttgtcaggtgacgggcctgatccggttcgcacggacgtaacaggattctgagatatgaggtaagagaatgatgatatttgatacacacgctcattatgacgatgagcagtttgatgaggaccgtgaggaactcctgaattccatgcagacacacggagtggaggcggttacgaatattgggtccagccttgccgcttcacgcagaacgatcggactgacagagcagtatccatttgtctatggcgccataggcgtccatcccaatgaggtgggagaactggaggaggacggcattgcctggctgaaagagatgtgcgctcttcctaagatcgtggccgtgggtgaaatcgggctcgattattactgggatgaaccggggcacgacattcagaaaaaatggttcgagcgtcagctggagctggcccgggaagtaaagcttccggttgtgattcacagccgtgatgctgcaaaagacacactggatatgatgaaggcacttcatgcagagaagatcggcggagtgattcactgcttttcttatacgaaagagatggcgcgggaatacttaaatatgggattttatctcggaatcggcggagtcgtgaccttcaaaaatgccaaaaagctgaaagaggttgtggagtacatgccgatggaacagatggttttagagacagactgcccttatctttcacccgttccaaaccgcggcaaacgcaactcatctttgaatcttccgtatgtggtggaggaagtggcccgtataaaggggatatcggaggacgaggtaatagagataacaaacagaaacgcgaaaacaatgtacaggctttgatggagggcgcgaatggcgacactgggaaacccccaaaagacgattgagatcatacagaaatatgaatttgcatttcaaaagaagttcggacagaatttcctgattgatacccatgtgctggagaaaatcattgcagcggctggtgtgacggaggacgactgtgtgctggagattggcccgggaattgggaccatgacgcagtatttggcggaacatgcacgacatgtgatcgcggtggagattgatacgaatctgattccaatccttgaggaaacactgaaggattacgggaatattactgtcatcaacaatgatattttaaaggttgacatcaataaactgacagaagattacaatgacggccggccgattaaggtagttgccaatcttccttattatattacgacaccgattattatggggctctttgagggcggagttcccatagataatattaccgtcatggtacagaaagaggtggcggagcgcatgcaggtagggccggggtccaaagactatggggcgctgtccctggcagtacagtattatgcggatgcctatatcgtggccaatgttccgcctaattgctttatcccaaggccgggggtgggatctgccgtgatcaggctgacaaggcataaggaaccgccggtggaggtggatgatccgaagctgatgttcaagctcatacgtgcgtcttttaaccagaggcggaaaacgctgcagaacgggctgaataattcacctgagctgccgtttgacaaagaggagattggggctgctatcgagagtctgggcgtcactccccagattcgcggggaggcgctgacactaaaacagtttgcagatttaagcaactattttacacgcaacagggggtaatatgtcagattcactcattacaaaaaaagcgattgccgcggcgttgaaacaggtatgcagggaaaagccgtttgacaagatatcaattgccgatattaccgcggtatgcggattaaaccgtcagacattttattatcattttcaggacaaatatgagctgctcagctggatctattataatgagaatttttccaggatcacagaggatattaccttcgataactgggatcagaagatcctggagatgcttcagattatggaaaaagagaagacgttttatgtaaacacgctgaaggaacaggaacacacattcgaaagctacttgttcgagatggccaaggctctgttcttagaggcaattgccagattggatgagaaaaatcatttaaatgatgtggaaagggagttcgatgctgaattttatgcgtatgggatatgcggagtcatcgtttcctggacccagaacggaatgagaattaagccggaaattgtggcggagcacttaagaagcctggccaaggatacagagcgaatcggttatatccgcagccagggcctcctttaagaaaccttatccatgatatagctgatacactcttccatagaggaagtcttgatcagctggagcagttcatcgtattttatacgacattcacacggggaaggatggaacttgtttaaaagttcttcgatattacgggccgtccgttccggtgattttttgctgttttttaaaaaatggaagagagccgttttaaacacggattcccttagatgttcctgcatggttgcagacatgacaatcccccctgactaatctgatcctgtaatcagtatttataattttatgctgtaatctgactctattgtagaagatgagaattgatttatcgatagacaaaatagagaaaatgtctggttttgcgacaccatattcacggtgtcgttttttttgacattaaaaaattcatgtatggtgacaggccggatgaagtatgctaatattaggctatgaacagtaaccgattgacgaggtaagaaaggaaacggatatgaagaagaaaaatggactgggaaaagcgattgtctggggcgcagcggcagcggcagccggtgtagcggcaaaaaaggcatacgataattcaaaaaagagacaggaagagaaagtagagaacgtatcggatcaggttatggagaaccgcagttacgaaggaaagaacgcctattttgttggaggcggtctcggaagcatggcaggagcggcgtacttaatccgtgactgtaagtttccggcagagcagatcacaatttatgaaggcatgcatatcctcggcggcagcaatgacggaatcggcactccggaaggcggattcgtctgcaggggcggcagaatgttaaatgaagaaacgtatgagaatttctgggagttatttggttcgattccatcactcaataacccggacagaagcgtcactgaggagatattgaattttgatcatgcacacccgacgcatgcgaaggctcgtctggtcgataaggatggcaatatccttgatgtgaagagcatgggatttactcaggaggagcgtatggctctgctgaagctgatgaacacaccggaggataaactggatgatatgacgatcgagcagtggtttgcggacatgccgcatttctttaccacgaatttctggtatatgtggcagacgacctttgcattccagaaatggagcagtctgtttgaattccgccgctatatgcgccggatgattctggaattttcccggattgagacactggaaggcgtaacgagaaccccgttaaatcagtatgacagtgttatcaaacctctggagacgtatttgagagacaaaggtgttcattttattgaaaactgtaccgtaacggatattgactttgcagatggagatggaattactgtaaaaactcttcatctggatgacaacggagaagaaaaggctgtggaactccaggaaggagatatctgcattatgaccaatgcgtgcatgacggacagcgcgactctgggcgatctccatacaccggctccggaaccgaaattaaagccgatttcaggtgaactctggagtaaagtaacaatgaagaaaccgggactggggaatccggaaccattctttggcgatgtgcatgagacgaactgggagagttttactgtgacgagccgcggaaataagctgttaaaaatgattgagaatctcacaggcaacgtaccgggaagcggagccctgatgacatttaaggattcaagctggctgatgagtatcgttatcgcagcgcagccgcattttatcaatcagccgatggatgagaccattttctggggatacggcctgtatacggatcaagtgggcgattatgtgaagaaaccgatgaaggattgtactggtgaggaaatgctgacagaacttcttcatcatctgcatatggaagatcatctggatgagattatggctgatgtggtcaatgtcattccatgcatgatgccttacgtagatgcgcagttccagccccgtaagatgacagaccgtccgaatgtggttccggagggatcaaccaactttgccatgatcagccagtttgtggagattccggatgatatggtatttacagaagaatattccgtacgtgcggccagaatcgcggtatatacattgatggatgtggataaggcagtctgcccggttacgccatatgtaaaggatccgaaggtgttattaaaagcagtacagacggcataccgttaattggatcaggatgccgggaagcagagcaaatctgcttcccggttttttgattgtgggtcggatagacccagttgagtgcgcgaagcgcgcgaaatagaaaccacccgctatgcgggtgcgcggtgttggttataccaaaaatcactcagcctgatataatagaggtgtccaagccactattaaaaaggagagtgattttatggcgaagaaagccaatgaattagcgcatacaaagtggatgtgcaagtatcatatcgtcttcacccctaagtatagacgaaaagtgatctataatcaatataaagaagacctgagagatatcataaaacaattatgtaattataagggtgttcagatactggaggggaaattaatgccggatcatgtgcatatcctggtgagtatcccacccaagataagcgtatccagttttatgggctatttgaaaggaaagtcagcattaatgatgtttgaccgtcatgccaacttaaagtacaagttcgggaatcgtcatttctggtcagaaggatactacgtaagcacagtgggattaaacgaagacaccataaagaagtatatacaagatcaggagaaggcagatatcatgctggacaaattgagtgtgaaagaatatgaagacccctttaggggttagtcggtattcagatagccccttgaaggggcggcaacagaggtaaaagcacaaagtggcttgaacgaagtgaaagccagcgccttgagacgctggcctagtaacaaaggcttatagccgaagcgcgagccacccgttagacgggtggcagcgactacttttttgatacatccatgaatcttccaaaaaatgaaagaattttacggattgcaagaaacttaaatatatgatatgctatagactgcgctgtctgccacagacagacaaagagaaaagatatggagggaaagtaacatgaaaaaaatggcacttgtattagctgctgttctggcttccggtatggttctgaccgcgtgcggcggatccggcaatggggcaaaggaaacaacaggtaatcaggcatcgaccacaactacaacaacaaccggcggacttgatcttgctgttcagatcggacctgatccggagacggtagatccggctttaaacacagcaattgatgcatctaatgtcattctgcatgcatttgagacgcttcttacctttgacgagaacaatgatatcgttccaggacaggctgaatcttttgacgtgagcgatgacggacttacttatacattccatcttcgggatggcttaaagtggagcgacggctctgattttacggcggaagacttcgtttattcctggaagcgtctggcagatccgatgactgcggctccgtatgcggcagacatgctgtctatggtaaagggatatgatgaggccgcagcaggtgatattgatgctcttggggtatctgcacctgacgcaaagactctggtagtagaattatccagtccttgtgtttactttgacaaaatcatcactcatgcaagtatggctcctgtgaaaaaggatgtcgtagatgccaatggcgatcagtgggctctggctcctgagacctatatctctaacggaccgttaaagatgatcgagtgggtaccgggatctcatatgacttttgcaaagaacgaaaattactggaacgctgataaagttaccttaaactccttaaagttcgttctgatggaagattccaacgcagcttacagcgcttaccagactggcgaagtgcagatgattaaggatattccgacggaggagattccgagccttcaggatagtccggattaccatctggatcctcgtcttgcaacttcttatacaatctttaacacacagaaggcaccgtttgatgatgcaaaagtgcgtatggccctgagccttgccgttgaccgtgagtatgtagcaaatacgctgatgatcggcacggttgccccggcaactaacttcgtaggccctggcatctctgatgcagaagctggttcttccttcgaagaagtaacacgtaagaacaacggcggagatttcttcaatgtaaataattatgaagctgacctggaaaaggcaaaagaactgcttgccgaagctggatatccgaatggagaaggcttcccgattattgagtatatgacaaatgatgccggatataataaaccggttgccgaatatttacagagcgcctggaaagatcttggcataaccatggatatcaagatcgtagagtggtctacctttacaccaacccgtcgtgccggtgattttgaaatctgccgcggcggctgggtatatgactatgatgatccgtccaatatgctgaacttacttgcaagcaccagcggaaacaacgacggaaagtattccaatccggaagttgacaagctgcttgaagaagctcgttccacggctgataaggcagagcactatgagaagcttcatgctgctgagaatctgattatggaagacgcagccgtttctccgcttgtatattccagtgacttctatctgcagaatccgaagttaaagggaacatggcattctccatacggttactggtactttatgtacgcaaccatggaagagtaatcaaagataagagacatcgcagatttacagaaatatagaaagggttccgccacttttcagacattgtggcgggacctttttcttttggcgggaatgtcggccctgcagtcgcatatgctgccttcggggaggtacatcccactctaaggatagtatcacatgagttcaggattgtaatgcgcccgctctccgccgataaatttaggcctggttcttgcgcagacgacacgggcggcacctacgtacctggtcgtgatgcgcaccggaaccgccaccggttttaaatgcatgccaatcagggtgtctccgatatcaatgccggctgcggcctggatatgttcgactgccaccggatgccgtaacgtccggtaagcggctgtggcaaaagaaccgccggcctttaactggggaactgcgttcaccggttcatagccatagcgtgcggcagcttccgcttccagaatcagggcacggtttaagtgttcgcagcactgggcagccacgtcaatgccgtgtgacgacagaacctgataaacagcggtgaatacagcctcgccgatctcttcactggagtgagatccgatgcggtattccgcaatttcactggaagagcagccgatcaccacaagatcgtgttctttcagatgagctgcctccaacaattccgcggcggcatcggccgcctgcttactgatatcttctaacatgaatttcacactttctttctgcgtttatcattataatgcggcgcggatcgcaacggccatatcttcatactcctcatcggttaagtagaccttgtccggattcatggcaaaggttccgccccattcatccccgccattatacttgggaacgatatgcatatggagatggcagccggtatcgccgtaagcgccataattaaccttgtccggctggaataccttgtgcaccgccctggaaacctttgcaacatctgcaaaaaatgcgctgcgctcgtcatcgctgatatcgatcatctcactgacatggtctttgtacgcgagaatgactctgccgcgtttgctctgttccttaaataaatataaaaaacctgtttccatttcacagaccggataaccaaatttggcaaccagttctccctgcatacagtatgcgcaattcggatctttcataatattagtaccttctttcttatatttttattattctggctctattttatcaaactagagtggggatgggaagagggcagatcgttaactttctcaatatagagattaaacagcaggtcaaaaaagtaactgacaccatatcgggtatatacattttgaattccctcggtaatgcggtcactggaatggaatttgtgactgagataaatgacactgtcatagcaggattcaaatttttcggaatggttgagggtaatcagtactttgtgggcgtgaacgtcctgcagatcagtgagtgtggcgatagcgtaattaccggtagtggaggtgacaatgaccaaatcctcaggtttaagattccgaaggagatttgtatcggggtaggcgtcggtaacaattcgaatcagcttgccgatagcagccagtccctgctgcagtactcttgccggaaagcttgagagatctgcggccaggatgacgacctgttcactgtcatgaatgcgtttgacgagaacctccagattttgagaggcaaacatctcattcatatcctgcatcatgtcatccatggacaggcgaagatactgatcaaattccggatgacaggcgtactgaacaaacgcatccatgtgctgccgggttatcggtgcgttctgcttcatcgcagtaaaactctcatagccgattagcttggcaaatcgttgaatactgctgcgggaaacgtaacattcctctgccacatcatagatactcagtttttttaattcatgaaaatgttccagcaggtaccttgccaacaccagattggtgtcgtcatcttcattggaattcaggactgccaataaagatgtcatcaaattaaaataactcaaactaaaattgttttggattttatctgtgctcatagccaaatcatatcacaggttttttattctgtcatcggtattcacaataaattcttttgtaatctcctgaaaatgcagtaattttaacaaaatatggattcaaatcttgcaccccatcgttttcttacctttgttacactggttatatgaaacaaaggtaaaaacggaacacaaattttgaaaggggacataatttatgaagtattcaaagaatccggtatttccagaaggctttctgtggggagcctccagcgctgcatggcaggtagagggggcgactgccgaggatggccgcactcctgcgattatcgatctgaattctcagaccaaaaagccttatgcagataattcggtggcatctgatcactaccaccattataaagaggacgtggctctgatgaaggaatgcgggtttaccagctaccgtttttctatttcctggtcccgtgttattcctgcagcggatcgtaaggtaaaccctatgggaatcgctttttataacaatctgatcaacgaactgctggcagcggggattactcccattgtcacactgtatcactatgatatgccctgctgggtcgatgagaaatacggcggctggcataaccgggccattattgatgaattcgattattactgccgtgtctgctttgagaacttcggtgaccgtgtaaaatactggctgtccatcaatgagcagaatatgcagattgtctatggcgactggttaggcgtatccaggggatgcacagactggttcagggaaaagtggcagatcaatcacattatgaatttatgccattccaaagccgttattgcctgccatgagctggtaaaagacggaaagatcggtccggtgccgggatatgtaccgatttatccttactcctgccggcctgaagaccagattggcgcaatgaatgcagaagaactgacacagaaaatatgggatgacttatatgtattccgcgagtacagcagtttcgtaaaaaattactggaaagaaaatgatattgatccggacattcgtcccggagacatggaactgattgaccaggcgaaaatcgattttatcgcggttaactgctatcggtcggatgtgggaatggcacctgatgacagctataagcaggaaattggtctgaataaatccgggatcaagggtgaattcgtatatcccaacctgccgggcgaatatgcgctggccagaaatccatacgtagaagtgacggattgggactggcatattgatcctgtctgcatgcgctatgcactgcgttatctgtgggatcattaccatctgcccatggttatcacagaagcaggctttggcgctcatgaggatgtgggagaagatggtaagattcatgaccaggcccgtattgattatctcagagagtatgtttataatgtaggtctggcaattgaggatggggtagaggtgttcgggtttaatccctggtcttttacggatcttctcagcaccggaaatggtatggcaaaacgttatggtctggtctttgtaaacaggacagacgatgatttaagggatctgaagcggataaaaaaggactcgtttgactggtattctgcgttaatacgttctaacggccaggaatggggaaccgatatgtcacagtggcgtgattttgccaaagataaggcagaataaacagaaggagggggtaccgatatggcgaaaaagaattatgcggcaatatgcagctctatcattgcggtatgtggcggtgaagataatatatccagtgtcagtcactgtatgactcgtttacgcgtacagctttttgatggaaacaaattaaacagagaggaagcggggaaaattccaggtgttctgaacctggtgatacaaaatggtgaatatcagtttgttatcggacaggatgttccaaatctgtatgcggaatttatcaaacgcgaggggatcaagacaagcggagaagtggcggatgccgctgcattaaaacaggatacggaagcgaagaaggggaatgtaatgaataccgtgatgtcctttatcggcggaatcttttctccggttattccggtgttaattgccggggggcttaccggcgccgtattgacactgctgacgacgctgttcggagtatccacagagtccggtacttatacggtaatctatgcaatcaatcaggcgactttttatttccttccgattttcatcggtttttccgcggcaagcaggttgaagtccaacggatttttaggcgcctttttgggagcaatcctgctgttttctactattaataacgtggagggacttaatttcctcgggattcctattcaacagatcagttataattccacggtatttccagttatcctgggcgtgctctttatggcggtcatttaccgttttctttccagagtggttcccgtgtatctgcggacgatctttgtaccgctgattacgatgctgattacagtgcctgtcactttgattgtattagggccgatcggcaacctgatgggaacctggctggcaaatggtgtatttgccatctaccgcgcggcgcctccagttgctgttatgattatcggaattacgacgccgctgatggtgttctttggtatgaataatgcgacttatcccatcgtatttgctctgctggcagaggtcgggtcagacccgctgatctgcaccggtatggcgccggccaatgtagctgtagggggagcctgtctggcggctgcactgattgcaaaggacgtgaatgaccggagtgtggctaccggtgcgggtattactgcactatgcggaattactgagccgggagtctatggagtattgtttactaagaagtatccgttgatcggtgccatggccggaggcggaatcggcggattgctgggcggtctggctggtatgacgcagtacgtgatctccactccgggatttatctcaattcctgcatacatcaatcctgatggtacttcgtccaatctgatatgggctatggcagtcatgattcttgcagtagcggttgcttttggtgttacttacgtattaggcagaagaatggaaaaacagagttagagtgtgacagtttagccttcacttccggcagccgctgtccggtcctgccggaagtgaaggctgaactgctgcgtcggatcaatgggtccctgtcgtgctgctggacattaaaaaaacggtatgctatgattgaagaaatgcatgaagcaaaggggcagtcccatgaataaattatttaccatcggtgagatggcgaagttgttcggaattaatgcgaaaacgctgcgttattacgatgaaataggcctgattcgtccggaacatacagacccaatgacaggataccgttactactctactgggcagtttgaacgccttaatactatcaaatatctgagagcactggatatgcctttggctaaaatcaggcggttttttgaaaataaggatatcggtcagatgatggaaatattaaaggagcagcaggaggaagtacttgtaagacggagggagctggaacgtatcgaacataagatcagtgaacgcctgtctcagcttcacgatgcactgtataccgtttataatcgggtggaggaggttacgctgccgaaccgaaagcttgctgtgctgcgaactgaaatacccgctacggatgacctggaatttccgatccgtcaactggaacggcagactcaactggaggccgccatgtttttgggaaaggtgggagtgtcgatttcgatggatcatgtgaaatcccataagtttgatgaattttgttctatctttgtcgtgctggaaccgggggattcttatgatggagaagctgtggatattcctggcgggcagtacctgacactgaggtactgtggaactcatacgcagtcctccttctattatgaaatgctgctgaaggaaatgtcagagaacggttatgagctgggtggaaattcgattgagattacgttagtggatgcgggaatgacaaatgatacttcccggtttgtaacagagctgcagctgccggtaagcggtgggaacaatgcgaagggaatttaaagtaaaacagaaatagagagttaatcgcagagctgccggaaggcagctctgtttgatctcatacgggacaaatgttcctgtgatatcaaatatagctgtattatgtatggtgtgagatgtaacttcctgtcagtaagggccgatgtttttacgctacgattcttgttccggattgctgttactgcagagattctctttgtgcttctggaaagtcttaatcatatccaggacataatcctgctcttcttttgaaagaagggtggatagatgatagatctcagccagaagctgggcacttcgttccgcatctttttctgattccatggggccttcgccctggagaagccatgaactgttaattccaagctcgtaacagattccacggatgacgagcatctgcggttctgatttttcatgttcaatatttgttatgacaccgcgggagacaccaattgcatcggcaagagaattctgtgtatacccttttgaactgcgggcctgtttgagacgggcacctattcccatatgatactccattccgcgtagacgcgtgccatgatctttacgatggcaaacatacgccgatccgccatttgattttaattaatacaggaccttaaatagttttgtaaatcctgatatctaatcttatcatgattaaaatgatttgtcaatacaattatgtattgaagaggcatataaatgccttgacaatgcgtaaaaaacgtgttagcatgtatttataaaacataaaaatgatttggaaaagcatggctgaagacatagggggtagttttgaagtcgataggaagagatcaggaaaagaatcgtgcggaaatcattctcgaggagtccggaaaactttctgttgaagagcaggagtgtgttctggcaactttaaggggaatggtgtttacaagagactgtatattgaagaatggtgtggatgaagacaaaaaggagtgagtccgtttatgacaaagtattttcatttgatttagattggattgaagtgaaagaacccggccatgtctgagtcctgttttgtgggcctgtctgaatatctcacagagtttagaaacatatcgtttgtcttttctaagtcccaaagtctgtaattatagataagttttcgcgttgatttgtattgaatattgttgacattgctcatggaatgtgctattgtatgaatgtacaaaataatgaatattgaaataatgacaaataaaagcaggtatacagatggaatatgaagttggaaagagcatcttatatcaaaaaaccggattagccaagagtctccttgcattagatttactgtcaaagaatgcaggggacagaatacagcccatatccgagtatcaggagaagtttggagtatccagagggactgtccagaatgcctttacatatttaaaagagtgtggcgctgtgaagctggagcaccacggtcaccagggtacttatatcgaaaagctggactaccgcaggcttcaggaaaactgtatgagaaaagagctgctgggcatcatgccgctgccgtattcactgacttatgaggggtttgccacagcaatttactcggaactggatgagctgaattttaatatggcgtacgcgagaggcgcggttggcagaatcgagcttgtagagtcgggaacctatcaatttgccgtctgttcacgctatgccgcggagcagtccatcagctgcgggaaagagatcgagatagcctttgatttcgggccgggaagctttctgtcaaaacacgtacttcttctggctgatgaatcaaaagacggtatctgtgatggtatgaaggtcgcatacgacagcaagtctcttgaccagagccgtataacagataatatcgttaagggaaaagagataactttaattccaatcaggacacagcagaccatcggggctctgatggatgggaccatagacgccggtgtgtggaattatgacgatgtattggagaatcatcacgacagactgaaggtggtttcgctgccggaatcggactataataattccttttccactgcagttctggtgataaagacgggcgacgaagcacttaaggcactgcttaaaaaatatataagcgtggaacgtgtattgggaattctttctgaagtcagagagaagaggcgggagccgttcttctgaccggagagaaagcgctatattagcgtcttatcttctgcggtggaccgcagatcaagggcagccgtgggcagaaggtatccgcagtggaattctggcagatgttttgtcacacctgttacggctgccggcggctttcccggctcatcagctttccggtctcatcagctttcccggctcatcagccaaccggccagtcagccgtactgacaatctgaatagaatataagaaaccgggaaagtgggtggagtgtcgtaaaaaataagtcaggacagaaatttttacagcaatgtacaaaatattgtatattaagaaaggagtattatgaacctggaggaagcgttaaatcagcgtcttgagattcttttaaacagtggtgtcatatcgcagagaatttcagattattgcaaaacagcagtgaagctgctgataaaacaaaaaccggaggcagacggcgacagggctgctatgtttattacacatctggctatggcgggacagagaattttagagggaaaggaggaaaaaccattggatggccagattctggagtctgtaaaacaggaacctgcttatagtagggcattggactttctgacgtatatgctgaatcagacagatctggaatttccggatacagaaaaagattttttgacggttcatctgtgtaatctgtttatgccatgagtttgaaggctgtgatgtagagagcatgcttacggggatgagatgctgcaggagtattgaaatttaaaattcaggagggaaaaaatatgcggtatatagttatatttttagccggagcgtttggggcacttttggctaacaggggaattgcggtttttaatgatgcggtcaggccggttgttccggaatacagagagggacgtatgacaaggctggaatttgcaacaaccacatttgccttaagctttggtctggtcattggatttggaataccttattcgattatgtcacccattatactggtacattctctgtggcttggaaccgatgttatcggtatcttctttccggcaaaaaacattgaaaaatggtacctggacaaagaaagcctgatcggcgccggcctttccgttctggcaggtggtctgtacggagtgcttctgctggcggggcttcagagctttgtcaatatgatgcaggctctgccggttaatatcttcgatgcatggcagaacatttccggccctgtcatttccgcatttattgcgttcccatgtgttgtaattaccatggattacggttggaaaaagggtcttgtttcactggttgtttctgttctgcttcgccagatcatggtatttttcggaaaaggagatatcgcggacggtgttgccttattaaccggcctcgtgttcatcattgtatttgcagtcagggacaaatctgaatcgacgggaaatctggcttctatatttggagaccgtgtgaagaacatcagaaagaatattatctggattgcaattatgggtgccatttacggacttgcctgcaatatgcatcttctgatggaaggtccgcagtctctggttgcattaaaggatggaaatgtgtcttctgcagtcagcatcagctttgcgagagcgctgtcctttatcccattaaaggcgctgacctcgctgacgacaggtacctttgtaacggatggcttcggtttcaccgcaacagcaggcctcctggctccaaacggagtacttgccgcagtatttggcgcagtggtcatgtctctggaggcattgtctctggcagtagttgcaaagctgtttgataaggttccaagtattaagaaatcggccgacagtatccgtgtggcgatgaccaggcttctggaggttgccattttagtgggatccatgtcggcggcggaaggtatggcccccggatttggatttttggtagtcggtggattctttgtcatgaatgaatattttaagaaaccaatcgtacggatggcggtaggtccgatcgctgttatcgcagtgggagttctggtcaatgtactggcagttttaggtctgtacagtgtttaaatgtgtgcagtgatgcgtgaaaggagcagtcagcatgaaaattgtaattggcggacagatgggaaaagaggaaataaaagatctgatagtcacgactatgggagctgaatgtgaggttgccatccgggatgatgtggcagctgccatggatgtaaagagcggaaatgccgatttatatctgggggcatgtatgaccgggggcggaggcgcacttgcgatggccattgcaattttgggctatggagcgtgtatgacggtaagtgacgcggatgaaaatgccattcgtgacgcactgaaatcggggaaaaaggcgtttggttttaccccatccatgtcgagaacggtggttccagtgattgtaaggcttgcaaaggatgctgtgtagaattgagatgatggtgctgtctggcttaaagagatgatataccgtgtctgcttagccagccagcatccgtgaaaggagaaaggatgcagacatatccgttacagagcatgtccgtggaagaagcagcgatgcttcagttccaggtagtggactgtataacaaaagtatttgaagggcatgaatcactgaccaggggagatttaggggtcgtcatggggattaatatgccggtgacaaccagaaaagcggaaatggtgattgccgaagtatttggagcagaggcgtgtatcctggtacggggggcggggagtgccgcaatccgttttggacttcattccatgatgcggcccggcggccggctcctggtacaccgggctcccatctataatactacggcagcctctctcgaaatgatgggaatagaagcggtggaagctgattttaatgattcggaagaaatccggcgggttttgacggataatcccgatattaagggggcgctggttcaatatacgagacagctcccggaagacagctatgatatgcatgaggtagtacgcgtcatcaaacagaccgctgatatccctgtactgaccgacgacaattacgcagcaatgaaagtaaaagatatcggtgtgcagtgcggtgcggatctttcctgcttttccgcgtttaagctgctggggccggaaggtgtgggcgtcatcgtcggtaagcaggaactgatcggcagactggtaaaggaaagttattccggtgggatgcaggtacaggggcatgaggcgctcgatgttctgcgcggaatggtctatgcgccggtctccctggctctttctgcgagggtcaatgaggaatgtgtcagacgattgaacagcggagagataccggcggtaaaacaggcatttctggcaaatgcccaatctaaggttcttctggtggaattcagggaaaatattgcggaacgggtactggaggaagccgaaaaatcgggcgctgcaccgaatccggttggcgcggaatccaaatatgagctggtacccatgttttaccggatttccggtacgtttcgcaaggcagatccggaactggaacatcggatgatacggatcaatcccatgcgggccggagcggacactgttttaagaataataaaagaatcagtagaaagagtggtgtaaatgttcctggaacaaactgtaaaacggaatccggaactggtccggctggcattcagtctccacaggcagggaatcatagaaccggattcctatctcattgatgtggacacctttttgcaaaatgcggaggaaatgctggagtgctccaggcaaaatggcgtaaagctttactttatgctgaaacagctggggcgcaatccctatctggcaaaggagctgatgaggctgggatattccggcgcggtggctgttgactataaagaggccgccgtaatgatggagcatgggattccgatcggaaatgcagggcatctggtacagataccgacggcccaggtaagacagattgtctccagccgcccggaggtcatcaccgtctactcagaagagaaaatacaccagattgatcaggccgcgtcggaactgggcgtcatacaggaaattctgctgcgggtgtatggtgaaggtgatatgatttattccgggcagacagccggttttcacttaaataccctggaagaactggcggatcgtatcgttggttcgtatccccatgtgagaattgcgggtgtcacctcttttccctgttacttatatgatgaacagctggatgacatcgttcctacggctaatttaaaaaccgtaacgcgtgcggcagcaatcttaaagtcgcggggaattctctgccgtatcatcaatactccctcagcaacctgctgtcgtaccattgaacggatgaagcgggacgggggaaattgtggtgagccgggacatggcttttccggaacaacccccatgcatgccgcccatgaactgccggaacgaccgtgtgtagtttacataagtgaagtttctcataatttcgaaggccgcggatactgttttggaggcggtcattacaggcgatcccatatgaagaatgcattggtaggagacagttttttaaatgccaggcacgtggaggtaattcctccggcggatgacagtattgattaccatttcggattaacaaaagagtgccctgtaggccagacggtggtgatggcgtttcggtatcagatatttgttacccgttcagatgttgtgctggtcaccggacttagaaagggagcgccgaggattgaaggaatctatgacagcgcgggcagagagaaatgaagaagagatttattgttattatactggatggatttgggatcggggcgatgaaggatgcccgtatcgtgaggccgggcgatgaaacagccaacacgctcggaagtattttaaaggactgccccgacatgaagctgccggtcctggaacggctggggctgatgaatgcgttcgggagggagagcgcagccatgaaattcagcccttccgctaattacgggagatgcgaactgatgcactatggtgcggatacttttatggggcatcaggaaatcatgggaacactgccaataaaaccgacggcgcatccatttctggagaaggcggaggaggtaagccggtatttgaggcagaacgggcatgatgtccgcgttatcaagaaacaggggcttaaatatctggttgtggatcggtacgccacggtggcagacaacctggaggcggatccgggaatgtgctataatgtgacggcgcctcttgattttatgccgtttgaggaagaggtggagatcgcccgcctggtccgcgaggtagtgaccgtgggccgtgtgatcgtgtttggcggcaccggcaacacaatggaagatttgcagagggcggaagagataaagcttggaaattatatcggcattgcatctgcaaaatcaaaatcgtatgagcacggttatcagtgcagacatctgggatatggagtggataaacaggtacaggcgccgaccatactgacaaatgccggggttcactgtacgctcatagggaaggtggctgacattgtggctaatgacggcggtgagagtatttcctgcgtcccgacggaggaagtgatgcggcttacggttcaggcggtaaagaacatggagaagggctttgtctgtaccaatgtgcaggagaccgatctggcgggtcattcacaatctgcggtggcttaccgggagatactggagaccgcggaccggggaatcggtgcagtgctgaaggagatggaggcggaagatatcctggttgtcatggcagaccacggcaatgatcccaatatcgggcacagccggcatacgagggaatgcgtgccgttactcatttatacaagggggatgagcggacgggagattggtaccagaaagacactttcggatgttggggcatctgtatgcagtttttttggtgtgaagagtacgcagaatgggacgtcatttcttgaagatcttcgttgaacgaaaaatgtaaatgcgtgttaggaagaattgaagctggttaaaaaacacttgaatttcaggttcgaattgagtataataaagacataaaaggaacaaccgcccacaaagtggttaacccgattaataagttacattcatagaaatgccacccagtaactggtcaaagtatatgatatgatacctcttaagtagacaagataaataaccaaaatctacttaggaggtatttttatgtccaaatcccctcatacttcggaattccgtgcaaaggtgtcacaggaataccttgatggattgggttcctataattatttagccactaaatataatatcgggtgtaaaacattgaaagagtgggttgctaaatacagaattcatggaatcggagcatttattcgtaaaacggggaatgcttcttactcatccgattttaaaaccatgtgtgtcgaagcggttttatctggtgatggaagcgtagatgatatcgctgctaaatataacattttttcaagaagggtactcagccaatgggttgtgagttataatgccaatagagaacttaaggattatgttccgaaaagggaggtctatatggcagaggccagaagaaaaacaaccgttgctgaacgcaaagaaatcgttgagtattgtattaaacataaccatgattataaagggactgcaggcatttataacgtttcatacagccaggtttattcctgggtaaaaaagtatgatgtgaatggagaagacggtttaacagataaacgcggccatcacagagcagataatgaagtggatgaactggagcgtttacggcgggaaaatctcaggttgaaacgccagctggaagaaaaggataaggctgttgaactactaaaaaaagtgaaagaattcgaaaggatgtgaagcttggaaagctgcgttacgaatcaaaatatttagcaatcagacatttccatgaaacagagcagtggagcattgcatggatgtgcaaacagcttgaaatctcaagggcggcttattataaatggctggaccgggagattccgaaacaggaatcggaaaatcttaagctggcagaactgattaaagaatacgatcaacgctttggccatatcttaggctatcgaagaatgacttcatgggtcaatcgctttaaccatactgcttatggaaaaaagcgggtacatcggattatgaagaaactgggtattcaatctgtaatcagaaagaaaaagaaaaaatatgtatcttctcccccggaaacaaccgcagaaaacaagctatgcagggatttttatgcgtctgcaccaaaccagaaatggtctacagatgtaactgagtttaaaataccgggcgaaaaaaagaagctgtatctaagtgtaatcattgatttatatgaccgataccctgtttcctatgtaatcagcagccggaatgataatcaactggtgtttaaaacatttgataaggcggtgatctccaatccgaacgcagcgccgatttttcatagtgacagaggttttcaatatacgagcagagtgtttcagaagaaactaaaggaacatgaaatggaacaatccatgtcaagagcaggacactgtattgataatggccccacagaaggtttctggggaattataaaatcagaaatgtatcagatgtatgaaattactgatgaaacgacattgagacatgcaataaaggaatatatgaagttttatagcgcagaacgtcctcaagacaggtatcattgtaagacaccgttagaagtaaggaatgaggcaatcgctgctgaacatccagaagaataccctattcctaaaaacaagcgaatcgaaaaatataaagaaaaatggtgtgcatagaaaaacggccacaaaatgtggccgttcatcagcccctcgttttaaatatttcacctgtctacttgacagggggcatatcatattggggtggtttttctatgccttaaataagcactatcgacagaacgtaaatacgaacgtcagcaatgccaggatgaacagtccaaaagtcattaaatccttaaagtcaaatttcatccgcatcacctccattctatgtagtagaatggaggtcaaccaccctgtaacacgattgttccataaaatggtttatcacaataaaaagtatatttcaattaaaaacgttgtatttcccgcggcgtatttctgttctgcaacaatttattttctacgattttttccaactaaaatacaatcttgctatcacatcttcaataggcgctcttctgatttccacatcctcaataccttcaaattccgcaaggtaaccaagaacctcatggattgcggtctgatttcggttgaactcgtattcgtaaatccctccattggaagagagcagctgtaatcccggaattgcaggagcacttaagagccccctagctgcggcagactgcttatcagagccggagcctctcatggtgacaacaattctggaacaggcgccggccgtatttctgagttcatcaaaatttccgtcaaatgcaatctgccctttattcagaagaataatccgctgtgccatctcctccagatcatccatgtcatggcttgtgacgataatcgtggttccgcattcccggttaatttcctttaaaaagtgtatcatctgctgtttggccagcacatccaggcccagtgtcggctcatccaggaaaattacggaaggatcgtgcagaagcagcatcgcaatatccgcccgcatgcgctgtccaaggctcagttccctggcaaatgtgtgaaggaggtctttcagatcgagcagttccgttacaagtgccagattttttttgtatactgcatccgggattccccatacctcctttttccattcgaagctggtaatgacgggatgatcccaccaggtttccgtccgctgtccgaacagtacgccaacatgacgcatgagttcgatccggtctgtggcaggattgaaaccggacacggataccgtgccctctgaagggcttaagataccggagaggatcttaatggttgtgctcttgccggctccgttggctccggcgtaagcgacaaactcacccggagccacttcgaaggaaagatgatcgagtgctgtgatgatgcgtttctgagggcgaagtatattttttaagatatcccgtgcgtggccgcttctctgccattgggaatactgttttgtaacattatcgatgaccaaagccggagtatcgtggcgaaccgttgactgcataatatttcattcctttcttaaatacataaattgtgaacagtgataatgccaatgccgctgccggcagataacatgcctgcaaaagcagcacagcgcttaagccgccgttccctgcttttaaaagcagctccgacggaaaccaggcagccagtcccactggaagcacggtcaggaacagccgtttgacggaatggttcatcgtgcccagcggataagtcttcagagaagtaaataaatccctgcctgtctgggcgatctcctcggctgccgcaggtgcgtaaaatgctgcgcaggacaggaggagcataacggataagaccaatatggtggagctgaccgcatagataagcagcagaagcagccagggcagtgtggcggataggggcagccgtctgactgcatacgccgtcagtccgattccgcataccagcatactgcttccagacagcggggaaaagccctgggccagcagttctgcccataggggaaccggctgtatcattacgtgatccagctgcccccgtcctatgatgcggcttatcatagacgtattattaccgataaaaaacatcatatagattccgtcaacgagagtggagaaacccatcatgaagagtatctccccctgattcatgcctccgaagccgccgaatttttcggaaagcaggaaaacgcctgcgatggtacaaaacgcgcataccgtgtctgaaaagatttgaagcagacagtagcgggtgtcccgaagaaaccacaggaggtccatttttgtgtattgcctgtaaaggcgaaacagtatttttaaattatccaccaaaagaaatcatcctttctttgctttttttaaataccatggccgctgtaatccacaaaatcacattccagataagctgcagcccaatggttctaaagggggaggcggccatgccggtatagatggtgagcggtgcatgggcgatcgagccaaaagggagacaggaaaaaaacttatccagtccccatggaaacagggcaaagggtatcatttcccctgacaggagggaaaatgctgcctcccgtatactggctgccgcccagcagccattttttaagaacatggcaaaagcggcaaacagcaggtcgagggcaaatcccagagaggccgaaagcatcagactgatgaacgccatcaatccggaggcagagtctgccggagccggatttacatgtaaaaacggcgagatgatcagcagaggaaggccaaaaaacagaaaattcggaatccaccaccgtccgatcgtttcagcgatgaaactgaccggaacgggcaccggccgggtaaaacgtccaatgacagaaccttcccacagtgaggaggtagccggtgaaataatatttaattcctgatgaaaaacggttgccatcagcgtgtatgtcatcagctgatttaatgtcatgcctcctaaaccggcaccttcccggtccagggcggtccagataaaaacgagcatgacaaactgaacggcagaaacaagatatccgcctgcgatgcacaggataccgccgtcaaaaatttgttttgtacacatcagtacagtggaaacaatggcgcggggcccgcagccatgtccggcaagaaatgtcttaaatttattcatgataaaactgcctttctaaaaaatggaataatagaacccattttccgaaaagggcagattttatgtaaagggggctaatcccagaacataaaaatacccgaaagcgcaggcaccttcgggtagagaaaccatcatgaaaaccggtcgttaagacagccggagagtcgatgaatacgaagggaggacgctgctgttatcgcaaaaatgggcgcactgatacacggaagcgtcatttttgtacgtaataacggcgacattgtcaatatttaaccacagtgttgtggccttgattgtgatgcaatgcatggcgtctacctcctttttctgaaatgtttgttttagcatatcatgacagtggaggtgagtcaagaataatatgcctcttgattgtccccaaatttgatcagtaaagttaagctaaccgtaaggctggggttaaacgaaaagcccctttcggtattaaaccgatgggggcttaaattatgtactgtttagtcagtaccactcttactatttacagcagtcgccaagtttcgcgagggcagcttcgtctgctacgattgttacatccggatgcagctgtaaaatggaagcaggaacgcgaggagtaaccggaccgcagatcacttcccttaagatggcagccttatcctcgccgcttactaccagcaggatcttttttgcactcatgatggttccgattcccatggtgtaagcctgacgcggaacgtcatcgatggaagcgaagaaacgcttgtttgcttcgatggtactttcctgtaaatcaacgatatgagtttccttcggatactcgtcggccggctcattaaagccgatgtgaccgttgtggccgaggcctaaaagctggaggtctacgccgcctaactcatggactacattttcatagcgcgcacactcttttgcagcgtccggctctgtaccatcagggatattggtgttctcttccttgatgttgacatgcttgaacagattctcatgcataaaatagtagtagctttgatcgttatctcttgtcagtcctttatattcatccagattggcagtctttacttcagcaaaatccagatcaccgttgttgtaccattcaatcaactgcttgtaggttccgatcggtgtggaacctgtagcgagtcccagtacgcagtctggtttcatgataacctgagcggaaataatgtgtgccgctttgcggctcatgtcattgtaatcctttgcgcggtaaagtctcattttatagccctccatgttcttgaaaaaaaattttattccatttatagctttaggataacatttttatggcatagtttcaatggctatttgcataaaatatttataaaaggggtgatatcatgtccaattatcggagactaatctcatatatctatgcctatgaaggcggaatcaaaggaaaaaacattgggttcgcgaaaatagagacgcggggcagccagtgcaagattacggtgaatgtgaaaaaggtttatgtgggcggcaatgatatcggtgtctatctgctggccggtgaaaaagaaattttgctgggaaatatttttatccgcggaggttccggggaatttcgtacggtcgtttcggtaagcgatgtggaacactccggaattcccatggaccagtgctacggactgacagtccatgatgtggaaaatacatggcggtcttacacgacgatctgggaggatgcagtggcccacgctgcagaggtggaactttccaacacacttcccgaaacaaaagaaagagaagaaacggcgcaggaggcgcagattaaaaaggcgataaaagaaatcgaagaagagttcccggtagaaaatgaacaggatacaaaggaaagtgaaaaacaggataaaatgtcccgggagcagcttaaggcatttacggaaagtgccagagaacagtcgaaggcatttgcagaaagcatcagaaaacaggtggaacagtctgcagatacgacggagcagacggcggaggcatggatccggcagcaggaagccaggatggaatggtccagagcaaaagcttcttacatagaatccgtgaatgaacctgcgaagccggaaatggcgccggtggaggaaccgccgcgcaatgttcacggtacggaggagcctgcctcagagcaggaaattccaatacgggaaccggtacggcagcagcaggagcctctgacaatggcgcacacgtcggaactgtcttatggcaaaaaggataattcgctgcgcagctataccgtattttccggagttccggccgtagaatatgcttctgaactgatgccggatatcgagactgttacgacactccatacaggaatgttggaggcggaagcaaataatcagcctccgtttatggaagagaggcagtctgccggggagtcggcggagatgctgtataaccaggaagagaaggaaattcagagtgaatttctggaagagatccagggcgagacgatttgctatcgggccgatgcatcgaggccatttgccgtccggccggaaagcaggatgtacccgcagcaggaagcagatatgggagcaccgaaatctgcagatgaaaatctgacggatttccatgcatcagaacacaggcaggaacaagtggaccggtataaaactcagaacacagatgagataaccggcattcatttgttggcggacagaggaaaaataccaggtacagagtctgtggggaacacgcaaaatccagagatgccagacaaagcgatgtcagtcaaagcaatgccagacacagcgatgtcagacacagcgatgtcagacacagcgtccggtacgcagaacagttccgattccggtatggaggaattcatgcaggaacggccagagatgtatctagcggacgacgcacaggattgttcggaaacgagcgcgtcagaaaatcaggcagcacagtctgtacaggagaacagagacgcagcagaatcttatggtaccgatgaggggtcagcagccacgccctcacatgcagcggaagaaagacagaaggagccggagatccaaaaagcccaggaggcacagcctgttccaggcgatccaatggaactggaacggcttttaaagactgaggaagaggaagaaaactccagtgaccggatatgggatcagttaaggcgggaacacacgaaaatcctggattttgactatgagaagggctgcgaaatcctgactattaaaccacaggatatcggccttctgcccagagagacatgggtgtacggaaataacagtttcctgcttcacggatactataattaccgttatttaattctggcaaagctgtttaacccggaggggactccgcgttatctgctgggggttcccggccattattacagcaatgagcggtatatggcgtcgatgttcggtttcccgaattttgtgctgtcaaagaaccagcctatggaagacggacgtttcggttactggtataccgatgtaaaaattggtaactgataccgtcagccgtccgtcagtaatcgattccgcgcagagaaacgtcagcaatataggggtgcaggatttctgcaaatgccagaagctcctcctttgtgcaggaagtaaatccggtgcataagacttcaccggagtccacataattctggagatagtagtgggaacagcccctaagccattggccgatatccaggaaatcccggctgccgtgaagttcctttacgacagtagtccggaactcatacgggatggagccattcatcaaaaatgccgcgctttcctctatatattttatctgaatgccgggaatgcctgctgtgcgcgggtaattttcccggccggccttgatgtccatggcaatatagtcgagaaggcctttcccggcgagatcctttaagacggcgggcctgtagccgttggtatccagtttgatcaagtaccccatctgcctgatccggcggataaattcttccagatcgtctgagagtgttggttctccgcccgtgatgcagaccccttccagaaccgaggtacgccgttttaagaaggtgaagagcgaatcctctgtcatggcttcctcggcgtcatttcccagaagcccgctgttgtggcagaagggacagcggaaattacagccgcctaaaaatatggtggctgcgacatggccggggaaatccaggagagtagttttttgcagaccgcaaattttcattattttcgcttccttattttcatggtatactagtatgatccgcacgaaataccttactgtttcgctggtctgatttaccgacagcacagacgcaaaagcctcagcgtagccccactacgcctgcgtttttgcgtctgcactctcgaaaaatcatcctcatcgaaccagtaaggcatttcgtgcgggtcatactggtattgcattgcgcaatgcagtaccagtataccatattctaaaacgagtggaaagagggaccggcatgaatgctgatgaaaaatatatgcgcgctgcaattggacaggcccggaaggcgggagcgatcggtgaggtacctattggctgcgtcattgtttatgaggacaagattatagcgaggggatacaacaggaggacgatcgacaagaatgttctgtcccacgcagagattatcgcgataaaaaaagcatgtaagaagattggtgactggcggctggaaggctgtaccatgtatgtgaccctggaaccgtgccccatgtgtgccggggctatcgtccaggcaagaattcccaaagttgtaatcggctgtatgaatccaaaagccggatgcgccggctctgtgcttgatctgcttcatgaggacgggtttaatcatcaggttgaaatggagaaaggcgttctggaggaagagtgttcgcggctcatgaaggagttttttaaggcgctgagggaaaagaaagcagctgtgaaaaaacaaaaacaggaagagacgactccttgacaaatggaccgattgcatgtatactaaattggctatacattgaaacagatgtataggtgtgtgcagtaatgttaatcgatggaatgtcagcatacagaccaacatatgtcataaagtttccgtgcagccggggagatagcggtgccctgtacctgcaatccgctccagcaggggtgatgtctcacctcggatcgtctactgcagggctgcccctgataagtggcgatgacgtttgggtcttacgcaacaggaattcatgaaccgtgtcagggcaggaatgcagcagcactaagtggaacctcctgtgtgccgtgaggtagcctggactgagttaactgtcagggtaacgcctgtggtaacgatacaaagtgagacgcacggattaataatataactataaataaaatacagcgaatagaagacaataagacaccggggaagaaaatccggtgtcttattgtttcacaggaaaaaccgtccgtgtatcaatcctccctttgaggggccgcaaagccggcttgccggactctttggtatattacaatcattaccatttaactggtaattttcttacatttcccgatagaacaaagttttcccttgccccacccttccctttgtattataattatgtacaaaatgggtatatagtatctatttcctaaacatgaatctaagaaggggtgtgctttgatgatgagagttggaatgcttacaagcggcggcgactgccagagcttaaacgcgacaatgcgcggtgttgcgaaggcgctgtacagaatgtatgacgatgtggaaataattggttttgaggacggatacaagggcctgatctatgcagattaccgtgttatgaagcagtcggagttttcaggaattctgacagaaggcgggacaatccttggcacctcacggcagccgttcaaactgatgcgtacgccggatgagaacggactggacaaggtagaagcgatgaagcacacctataaaaagctgaagctggaatgtctcgttgttctgggaggaaacggcagccagaagacagcgaatcttcttcgcgaggaagggctgaatatcattcatctgccgaagaccattgataacgatttatacggaaccgatgtgacttttggttttcagagcgccattaacgtggcgaccaatgccatagactgcatccacaccacggcggcatcccatggccgcgtatttattgtggaagtcatgggacataaagtgggctggctcaccctgtacgcaggaatcgcaggaggcgcagacataattttacttcccgagattccctacgatctggatattgtggtggaagctttaaagagcaggacaaagaggggaaaacgtttctctatccttgcagtggcagaaggcgccatatcgaaggaagatgccgctctcaccaagaaagaactgaaagaaaagaaaaaaagcggagtgatctatccgtcagtcgcttatgagattggcgctcagattacagagcgcacgggccaggaagtccgtgtgactgttccgggccatatgcagagaggcggcgaaccgtgtccgtatgacagggttctttccacgcgtcttggcgcagaggctgcttatctgattaagaataaggaatacggcaatatggtggcggttatcaacaatgagattgtgaaggtgccgctggaagaagttgcaggaaaattaaagacggtcgatcctgagagctctatcattaaggaagccaagatgataggtatcagcttcggcgatgagtaaggagccatagagcatgtcatatacggcattataccggaaatggcgtccggcttcctttgaggatgtcagaggccaggaccatgtagtacagacattaaaaaaccagattgtatccgaccgtatcggacatgcatatctgttctgcggtacccggggtaccggtaagaccagtattgcaaagatatttgcaaaagcggttaactgtgagagcccggtggacggcagtccctgcggagaatgccggacgtgtaagaacatcgcggcaggctcttccttaaacgtggtggagatcgacgccgcttccaacaacggcgtcgagaatatccgtgagatcagggatgaggttcagtatcctcctacagaaggaaaataccgggtttatattattgatgaggttcatatgctttctacgggagccttcaacgcccttttaaagacgctggaggaacctccgtcttatgttatcttcattctggcaactaccgaagtgcagaaaataccggtcacggtcatgtcacgatgtcagcggtatgattttaagcggattacggttgataccattgtaacccatttgcagaagctgaccgaggccgagcacatttccgtggaggataaggcgctggcctatatagccaaagcggcggacggggccatgcgtgacgcgctgagtcttcttgaccagtgcgtggccttccattatggagaggtattgacctatgacaatgtgctggatgtccttggagccgtggatattacggttttcagccagctgtttcgcgccgtggtggagaatcggacgaaggactgtattcaaagcctggaggaaatggtgatccaggggcgtgagctgggacagtttgtaacagactttatctggtatctgagaaatcttctcattgtaaaatccgtggatgacgcggaaaatatgctggatatgtcgacggagaatatgaatcttctgaaggaagaagccggtctgatcgacggagagactcttctgcggtttataagggtattttccgacctttcgaaccagcttcgctacgcatcccagaaaagggtgctgattgaggtcgctctcattaaactgacgcgccctgagatggaggagaatctggattccgtcatacagagaatcggcaatattgagaagcagctggaagaaggcgttttcgtagcgggaaccatgcctgccactggaaacggtacggactccgtacccggggacaatggaagaatgggcggcaatggtgccccgtctgaaccgctgacgcctgcggaacgcgttgtgcttcccgaggctcagctggaggatttaaatcttgtccgcaatgaatggggaaagattgtaaaagatctgggcggcccaattcgggccagcttccgggatacggtggtggaaccggcgggagacagttgtctctgcgttgtatttacggatcagagtaattttattatcggcagccgtccgacgactctgggagacatcgagcggtatgtggaagagcattatcaaaaatcaatttattttaaggccagactgcggggcggaggcgaacgcctcgataccatttacgtcagtgatgaagaattaaaagaaaatattcacatggatattataatagaagattaacaggaggacatacaccatggctaagcgtggcggtttttcaggcggaatgcctggcaatatgaataatttaatgaagcaggctcagagaatgcagcgtcagatggaagagacgacaaaggagcttgaggcgaaggagtatacggcaacagcaggcggcggagctgtatctgttaccgtatccggaaagaaagaagtgacagcggtgaagctttctgaagaagtggtggatccggatgatatcgagatgctggaagatttaattgtggctgcaaccaacgaggcgttccgccagatggaggaagagagcagcgcagccatgtccaagctgaccggcggtttaggcggtatgggcggaggctttcctttctaatcatggattactacagcagtcagataacgaaattaatagaagagctgtccaagcttcccggaataggaagcaaatctgcgcagcgtctggcatttcatattatcaatatgccggaagaatcagtaacaagccttgcctcgtccattaccgaggcgaagcataatgtccattactgcaaggagtgtttcactctgacagatcaggagctgtgcccgatctgcaaaagtgacaaacgcaaccataaagtcatcatggttgttgaggatacaagggatttggcggcttacgaaaaaacggggaagtatgacggtgtttaccatgtgcttcatggggcgatttctcccatgctgggaatcggaccaaatgatattaagctgaaggaactgatgcagcgccttcagggtgatgtggaagaagtgattatcgctaccaattccagtcttgaaggggaaaccacggcgatgtatttaagcaagctgataaaacctaccggcgtgcgggtaacccgcattgccagcggcgtgcccgtcggcggagatctggaatacatagatgaagtaacattgttacgggccctggaaggccgggtcgaactgtaactcattaaccttgttaggagatgcaaaagaatggataagtacgagtttaatattaaagttgaacagataaagaagcttgtcggcaagagtgattatgagacggccatgaagattgccgataccattgactggagacgtgtgcgcaacacgaaccttttgtccatggtagccatggtttatgaaaaaaatgaggactatgaagaggccagagagattcttcttctggcgtttgaacgcgcccccattgggaaacgtctgctctataagctggcagaactcgcattaaaagagggcaatattgatgaggctgaggcatattacagggaattcagtgatctggccggtgacgatccgagacagcagcttctacgctatttaattttgaaggccaaaggtgcgcctgcccagcagttaatccattctcttgaatcatatacaagtcaggaaattgatgagaaatggctgtatgagctggccgaactttacagcatagcaggtatgaccgacagatgcgtagagacgtgtgataagatcatgctgatgtttggtcttggaaaatatgtggataaggcgatggaactgaaaattcagtacgcgccgctgaccagttatcagatggatctggtggaaaaccgtgacaaatacgaggccaagcttcgcgccgtagaacaggaatacggactcggcggaaaccagatgcaggttcaggatcaggaagaggaatactatgatgacggaaatcaggggatggatatgccggaggaacctgatttcgaggatttacaggcgagaatgcaggaggctgaggttcaggaaggcctggcccgtgagatgtcccgtatgtcatatgaggagccgccggcagcacagcgtgcgatgaggcacgacaggacgcgggtgcttgatgatatcaggcgtattaaccgtcctgtctatcacgatgcgtccatggctgccggggagaccgcggctgccggagccgtatatgcagaaaatgcgcttgcaggagctgccggagctgtatacggcgcagcagattctgcggttcacatggctgggaatgcagagcggctcgcttccgcgatgccgagaccgcgcggaatgatgcgcatgccggagatggacgaggaagccgccgcggagccggtgattgaagaagactatgcttacggaaattccggttacaatggatcttcctatggtaataccgcttatgacgaaccggtttacggtgaagacgcctatgataatacaggatatggtgaaaccgcttatgatgatccggcttacggagagaatgcctatgaagataacacctacggtgaaccgttcaacggagaaaatacttctggggagcctgccttcggtgaagcagttccggaagaggaggcctacagcgattattcagatatggaatcctccggtgatgatccggcctgtggagagaacgcttatgaagaaccggaattgtcatatgcggaatcagagactgaggaatccgctgatgttccggtggtggcggaatataccgcaccggagagcgatccggctgagtctgaggtattgaatagccaggaaccggaagaagaggctcttgagatcgaggaccttgacgacgatgcagaagaaccaccggtattgaatcatttgatgattgaagccaggactccggaaaaagggctgaaaattgccgtagaggcattaaaacagatccataatgaaacaggcattaaaaatccggtagccaagattacaggagagaagctttcgagaagaggtgttcttgcttccgcggaaaaactggccggaaaagatcttgtgatagaagaggccggtgatttgactccggaagccttagaagaattgtatacactgatgaaccgcgatgccagcggaatgatcgtggttctgattgacaatcccaagcagatggagaatcttcacagaaaccatccgcgccttgcaagcaaattcgaatgtattggaagcggagaagcgtatgagccgggcgaagcgtatgatcagcccgtttctccggtacgggagccgaaaccggcggtacgggctgaagtgtctgctccagggaaagctgcgccaaaagcggcggtaaggcctctttatcccgaacgcggcgaagcaccggtcagacgccagccagttcctccggaagaatcctatgaagaggattcttatgagcaggattcttatgaacaggatccttatgagcaggatatcagaaatgcagagtcatacgagacggattcttatggtgaagaaggatatgaagagattccgaatgaggaaaaagtgcacaataagaaaaaaggtctgttccgcaaccgtaaaaaaccggtatatgaggagctggaaccggaagagtcctatgacgaaaacgatgattattacgtggaggaagatgaagacggcgaaaacggcatgacctaccgcaatgacaatggtcctggaagccacggggaagagatggatattgatgagttcgctcaatatgcctgccgttatgccaacgaaattgactgcagtataacaggaaagagcatgctggctttatatgaacggattgagatcatggaagaagacggtgtggctctgacaagagagaatgcagaaggtctgattgaagaagcggcagaccgtgctgaaaaaccatcctttggaaagcgtgtcaaaggaatcttttcttccaaatatgataaggacggccttctgatcctgaaagaagaacattttatatactaattgagagcggtggtcataccgctgtaccccatcatttctgcgtgaaacttaacctgtagggagcagaaagaaacagtaaactggagcatgaattgtggatatcagattaattgcacttgatttagacggaacgcttctggacagtcagaagcgtctgtcgtcccgtaacaaaaaggcgctgacggaatgcctgagacgaggcattcatattgttccgacaaccggaagaaccgtatcggggattcctcaggttgtcagggaactgccgggagtgcgttatgccataacgacgaacggcgcagtggtggaggacatgaaagatgatttgactctgtccgagtgcaccattccatggcagcttgcgctgaatattttaaaaattgttgaccattatcatgtaatgtatgatccgtacattgaacggcgggggattacagaaccgcgtttctatgagcatttaacagaatatggcctggccccggaactgcaggaggtggtgaggctgaccagggatgttcatcccaatatcattgaatttgttgagactgcccggaagccggttgagaagattaatctgttttttcctgaaatcgaggaacgtgcacgggtaagagaggcattggaagcgatagacgggattctcatcacctcttccatgccgatgaatcttgaaatcaacgctcccggagcgacaaaaggcggcggcatccggcgtctggcagaacatctggggcttaaaagagagcagacgatggcgatgggtgacggagaaaatgatttctccatgatcttagaagccggaattggtgttgccatgaaaaatggcagaccggatctctgtgaggcggctgactatattacagacacaaatgacgaagatggagtggcgtcggccatatatcgcttcgtccttgagacagaaatataacgaggaattttatggaaaattggttatcaatcgcggccggggtctacctgctgtctatggttctctatggacattacaggggatttatccggcttgcagtatctatggtggcattggtggcggcgctggcaattgtgcacgtatccatgccgaaagtaacagaatacttaaaagaaaatacgtcgatacagcagacgctgtctgacagcatgaagcaggcagcaggtatcggtctgcccgatgaaactggtgatggggaagagaaggatgtgccatccgtacagcgcacgatcatagagaaccttaatctgccccagaatgtcaaagcagcgatgatcgaaaataataatcatgaagtatatgagcttcttggggtaaatgcatttgctgattatatcggaaactatcttgcggacatgattcttaattccgtcggctttgttctgctgtttgcaattgtgtatcttctgatcaggctggtagtccgctggctggatctgattgcccgtcttccaatactttcaggtatgaacaagattgcgggtgcgctgctgggaggcgtgcaggggctgctctttctgtggattctctgtctggtgctgacggcatgttccggtactgcgtggggaatgactctgattcgtcaggtagaagccagcaaatggctgtcctttctatatgaacacaattttctgaatgcaattgttctgggcgtcatccatggtatgctgtaggcacaaaattgttgatatcatatattcaattaaaacaaatcgttgagcagaatgtaaaaatgtctgtccaacggtttttttaataaccactaaatgtaggaaaaatcaagaaataaaagcatatttagtatctgtaaaaattgtttgagaaaatggaacaaattcccttgacattatttgttgaacatgatatattataaatccagcacggagataatccggtgcaggggtcagctgaaaggctgaaaagaaaataaaaaaagttgttgacaaaacagaaacgatatggtaagataaacgagttgctgttgagaacaaaacaacgcaaacgcactttgaaaacagaagattgaacagtatgtaaaaccctgaaaattctaataaaacaagccattgtttgatggctttgaatgagaaaattcagaacgaatacaagtattgtatacgaaccaaacaacaagtaaaacgggaaataaattagctagttagttgattttgaccccggatcaaacgaatcatttaacatgagagttcgatcctggctcaggatgaacgctggcggcgtgcttaacacatgcaagtcgagcgaagcggatcttcggaagttttcggatggaagaggatttgacttagcggcggacgggtgagtaacgcgtgggtaacctgccttacactgggggataacagttagaaatgactgctaataccgcataagcgcacagggccgcatggtccggtgtgaaaaactccggtggtgtaagatggacccgcgtctgattaggtagttggcggggtaacggcccaccaagccgacgatcagtagccgacctgagagggtgaccggccacattgggactgagacacggcccaaactcctacgggaggcagcagtggggaatattggacaatgggcgaaagcctgatccagcgacgccgcgtgagtgaagaagtatttcggtatgtaaagctctatcagcagggaagaaaatgacggtacctgactaagaagccccggctaactacgtgccagcagccgcggtaatacgtagggggcaagcgttatccggatttactgggtgtaaagggagcgtagacggtttagcaagtctgaagtgaaagcccggggctcaaccccggtactgctttggaaactgttggacttgagtgcaggagaggtaagtggaattcctagtgtagcggtgaaatgcgtagatattaggaggaacaccagtggcgaaggcggcttactggactgtaactgacgttgaggctcgaaagcgtggggagcaaacaggattagataccctggtagtccacgccgtaaacgatgaatactaggtgtcggggggcaaagcccttcggtgccgccgcaaacgcaataagtattccacctggggagtacgttcgcaagaatgaaactcaaaggaattgacggggacccgcacaagcggtggagcatgtggtttaattcgaagcaacgcgaagaaccttaccaagtcttgacatcccactgaaaacactttaaccggtgtccctcttcggagcagtggagacaggtggtgcatggttgtcgtcagctcgtgtcgtgagatgttgggttaagtcccgcaacgagcgcaacccttatccttagtagccagcaagtaaagttgggcactctggggagactgccagggataacctggaggaaggtggggatgacgtcaaatcatcatgccccttatgatttgggctacacacgtgctacaatggcgtaaacaaagggaagcaaaggagcgatctggagcaaaccccaaaaataacgtctcagttcggattgcaggctgcaactcgcctgcatgaagctggaatcgctagtaatcgcgaatcagaatgtcgcggtgaatacgttcccgggtcttgtacacaccgcccgtcacaccatgggagttggtaacgcccgaagtcagtgacccaaccgcaaggagggagctgccgaaggcgggactgataactggggtgaagtcgtaacaaggtagccgtatcggaaggtgcggctggatcacctcctttctaaggaagaagaagtaggggttttagatactgttgagtcttgtgtttcaaagaagataaaagtaattgaataagaaacgccaagaaagactagaaatttctggtgccgatgcgcttaggggaaacacccgtacccatcccgaacacgatggttaagacttaagcggccgatggtactatgctggagacggcatgggagagcaggtgggtgccagattttacaaaagggcttatagctcagccggttagagcgcacgcctgataagcgtgaggtcggtggttcgagtccacttaagcccactacttaactcccaggagataagtaagtggaaagaaacaaaagaataaagggattgcctgaaaagggaagaccagcatccggtatttgacataaatatgggggtgtagctcagttgggagagcacctgccttgcaagcagggggtcaagagttcgaatctctccatctccattcggtatgaaggaaggaagccgtaaggtaaccgggagtcatgccagcatgtaccttgaaaaccacatattgaatatatctagaaaagttgaaacagaggagaggttcgcaagaacatcaaacctgtggaaaacaattcaagacatccgaggtgttatatcgtaacagatataaccgaaaattataaactcgttgttgctgtaacgtacagcgataacaaacctaagaccagagattcaacgctatgaatcttagatgagtaatccgcacccgcagatgaaaatcgaactggttaagctaaaaagagcgcagggtggatgccttggcactaagagccgatgaaagacgtgataagctgcgaaaagcttcggggaggagcaaatatcctttgatccggagatatctgaatggggaaacctggctgagcaaacctcagtcggcgtatggtgaatccatagccatacgttgggaacccgctgaactgaaacatctaagtaggcggaggaaaagaaagaaaactcgatttccagagtagcggcgagcgaaatggaaggagcctaaacctgggtgcgtgcacccaggggttatggactgcagtaagtgactcgtatggtaacagaacggtcctggaaagaccggccacagagggtgaaagccccgtatgtgaaaccagaagagagcgggcatgttccaaagtaccacgagacacgagaaaccttgtgggaagtcggggggaccaccccccaaggctaaatactccttagtgaccgatagcgcatagtactgtgaaggaaaggtgaaaagaaccccgggaggggagtgaaaaagaacctgaaaccctgtgtttacaaactgtggaaccacattttaggtggaaccgcgtactttttgtagaacggtccggcgagttgccgggactggcaaggttaagcactcaaggtgtggagccgaagggaaaccaagtcttaatagggcgttgagtcagttcaggcagacccgaaaccgggtgatctacccatgtccaggttgaagtttccgtaaaaggaaatggaggaccgaacgcacatccgttgaaaagggtggcgatgaggtgtgggtaggggagaaattccaatcgaacccggagatagctggttctcctcgaaatagctttagggctagcctcgtattagtttagcggaggtagagcactgaattcttaagggggcgtcaaagcttaccaagagatatcaaactccgaatgccgcataaatgatgtacgggagtcagactgcacgagataagttgggcagtcaaaagggaaagagcccagaccaccagctaaggtcccaaagtgcgtgttaagtggaaaaggatgtgggatttcgaagacaactaggatgttggctcagaagcagccacacattcaaagagtgcgtaatagctcactagtcgagaggtcctgcgccgaaaatgtccggggctgaaacacgacaccgaagctgtggaattgacttatggtcaattggtagaggagcattcttaactgcggcgaagcgttaccgtaaggaggcgtggagtgttaagaagagagaatgccggaatgagtagcgagatggaggtgggaatcctccaggccgaatatctaaggtttccagagtaaagctgatctgctctgggtaagtcggggcctaaggcgaggtcgaaagacgtagtcgatggacaacaggttgaaattcctgtaccgcgtattatcagaactgtggggacacagaaccgaagccaaacccgggaatgaaaagaccggggcaagcgccggactggttagactggaaaatccgtttaacaacaggaaagcgtgacgcgtaccgaacaaaagtagggaagttggtataggggctgtcaagaaaagccgctattgtgtaatacgtgcccgtaccgtaaaccgacacaggtggatgaggagagaatcctaaggccggcgggagaagcattgttaaggaactcggcaaaatgaccctgtaacttcgggataaagggtgcccacgagagtgggccgcagagaataggctcaagcaactgtttagcaaaaacacaggtctatgcaaaaccgaaaggtgaggtatatgggctgacgcctgcccggtgctggaaggttaagaggagaggttaggagcaatccgaagctttgaatttaagccccagtaaacggcggccgtaactataacggtcctaaggtagcgaaattccttgtcgggtaagttccgacccgcacgaaaggcgtaatgatttgagcgctgtctcgacaatgcacccggtgaaattgaagtaccagtgaagatgctggttacctgcgccaggacggaaagaccccatggagctttactccagcttgatactgggattcggtactgcatgtacaggataggtgggaggcagagaaggtaggacgccagtcttactggagccattgttgggataccacccttgcggtattgggtttctaacctgcggccatgacctggccgggggacaatgtcaggtggggagtttgactggggcggtcgcctccgaaagggtatcggaggcgctcaaaggttccctcagaatggacggaaaccattcgaagagtgcaaaggcataagggagcttgactgcgacaccgacgggtggagcaggtacgaaagtaggacttagtgatccggtggtataaagtgggattgccatcgctcaacggataaaagctaccctggggataacaggcttatcactcccaagagttcacatcgacggagtggtttggcacctcgatgtcggctcatcgcatcctggggctgaagtaggtcccaagggttgggctgttcgcccattaaagcggtacgcgagctgggttcagaacgtcgtgagacagttcggtccctatccggcgtgggcgtaggatatttgagaggagctgtccttagtacgagaggaccgggatggactgacctctggtgtaccggttgggtatcaaacccatggccgggtagccaagtcgggaagggataaacgctgaaggcatctaagcgtgaagcccccctcaagatgagatatcccatcgcaagagtaagaccccttgaagacgacgaggtagatagggcagaggtggaagtgcggtaacgtatggagctgactgtcactaataggtcgagggcttaaccaagttggtttaggaaaagaggaaataagaacggatgaaaagatatgtacaatgtgtggttttgagggtatatgccttgccaaaaggattatcttcatggtataataatcctcgatagctcagtcggtagagcacgcggctgttaaccgcgctgtcgtaggttcaagtcctactcggggagttcgtgatactcaaacgataaatgaggagaacgaaatgcaaagcttaggccccatggtcaagcggttaagacatcgccctttcacggcggtaacacgagttcgaatctcgttggggtcactaaagttgaaattcattagaacttcaactttttacaatatttacggcgacatagccaagtggtaaggcgtgggtctgcaacaccctgatcaccagttcaaatctggttgtcgcctctcttagaagagcctcaggaaccttgagaaatcaagagtcctggggctttttacattgtttacaaagcagataaattctggcataatgatgaaaaagggggctgtgtaaatgggggcgttaattgacagaatccggcgggctgtgatgaacaccggaatacgaaaaaagctactgttaatctactgtgcggcgggcctggtgccgatgggggtgatcggcagcctgatgctctataatacccaccgtatgctttacggacagtaccgcgggcagctggagtcggagaataagcgggttcataatattgtatttgaagttacctatctggtgtccaatatctctaatgttctgggatacgattcggccctgaatacgcttttgagtaccagctatgaaagtgacggacaggtttacgaggcataccgggcttatcctcttctggactccttcgcggaaaattatacggagttatcttctatccgtatctattttaacaatccgaccatggtgagcagcggccgttttcaatatgccggtgaagaggtgcaggcgtcggagtggtaccggctcgcaaaagagagctccggtgagccgatctggatctgtgagaagcaggaaaactcacaggacaatctctttctggtgcggaaggttccgctttataaccgggattttgcagtgatctccattgggatcagcagcaattttttaaaactgatgattaatgatgaacagacagacaccttgctcagcctggacgagggggaggttttttatgcgggaaacgcgtcctactttgggaagccgcttccggtttcacagacagcgctgtcggagacccgggtgcggacacttcgggacaatggacttctggtcggatgctccgcattgcagccggttcgttcccaccagattatccaggtactcaccgtggattcccatgcccttggggcggttaaccggactatggtgcttatgatggccattattttgttttgtatccttattccgtttgttctgatctttttatttaccggctcttttggccgccgcattgccgtgatccgcggggagatgcataagatctcggagggcaatttagacatcattcctctgtttgacggtaccgatgaactggggcttctgttccgggacatgcagcagacaatcaataatattcagaatttaaaccggcagttgtatgagaaccagctggaccgccagaggctgatgaaccagcagagaatgatagaatttcagatgctggccaatcagattaatcctcactttctgtttaacacgctggagaccatacgcatgaatgccagtacccataaggacccggacaccgcttatattattacgcagctggggaaaatgatgcgttacagcctgcagactaaggatcagctggtgagccttgctcaggaactggcttatacgagaagttatctggagattcagcatttccggtaccgggagaaaatcagctacgagatcctggtaagcgatgagatcacacaggatacttattatctgatgccgcttttgatccagcctttggtggagaacgccatctctcatggcatcagtcccatggacggaccagggtttctgctgatacatattgaaccggtaaaagactatttgtcaatcgttatccatgataacggggttggcatggatgagggggcgctgcaggctctgagagagtcggtggaagctccggagccggaatatacagaggatccggtaccaactgaacgtcatatcggtcttagaaatgtcagctcccgcatccgcctgttctatggcagagaatatggggtggatattgagagcagaccgatggaagggacggctgtcacgctgcgtctgccgcttccccggacagacggccccctggagatggagaaggaaaaggaggatgaaaggcaatgaaccttttgatcatagatgatgaacagattgtaagggaagggctgaagacgatttttccctgggccgagtacggttttaccgtctgcggtgaggcgaaaaatggggaggaaggggtgagcctgatccgtagcctgaatccggatctggttctgttggatatcaggctgccaaagcttgacggtctggaggtgttaaagaccgtcagggaagagggatttggcggacagatcattatattgagcggctatgccgattttgattatgcgaaaacggctattcgtctgggcgtctgctcttatttattaaagccgattgatgaggaggaacttcttcatgccgtgaaacaggcgaaggaaactctggagaaggaaaagcgggaatccgatcaggcattaaaatcaccggagcaggtgcgccgggaactgcttttagacatcttaaacggcggagcggagcataagagggaggaactgctggcctgttccatggatttaacagccgatgcctatcaggtgctcctggtggttatcaaggacagaaaaccggatggtccgggagatatgctgtgtaaatggctgcagaccctaaacagtgtttctgtctctgagggaggctgtgagtactatctgctgcttggaagagaggcggtcagccaggccgcccatcccctgctttcggattccggcatttttttatcctacagcagaatgggatttgatgctgctgagattccccagcttaccgcccaggccagagaaggctatgaacaccggttcctcttcagcacggacggtctctccatccagtgccgtctgattccggagccgtcggccaaagcgggggaaggctttggtgatcccctggtcattgccgataagctttataattttatttcttctgatcagacggccaaggcggcagagttcttaaagcacttagaactcagtatccagagacagaggcttaattatgacacagtaatccgtctctttatcaattcctatatgcagattgatatgctgataaaggagcattatcctgaggcggcaaaccgtgtcacgggagccaatctcgttatctatgccatctgcaagtgcaggacgctccgggagattgtgaacttcctgacagaacatatcacaggcatcatccggatggtgcatgaggtgagaagcgataacatcatcgaaaagctgtgcggctatatcgggaaaaattatcggcagcctttaaagattgagactctggcggaagtgttcggctacaatggcagttatctgggaaagctgttcaagcaggagaccggggagtcctttcactcctatctcgaccgggtgcgtatcgaaaaggcaaagaagcttttggagacggatgccaggatctattccgtagccagtgaatgcgggtttcagagcaatgaatatttttctaataaatttaaaaagtatgtgggagtaagcccgcaggcttacaggaaagccagggcggaagaacagggaggcggaagacagtgaaacgtaaagccggccggacattgggaggactgctctcaatgcctggccggctttctggattaacaggaaatgcgtgacgtttctatgcgtgttcctttctcaagacttcaaagaatcggaattctccattttctatagataccttatagtgctgctccgtcagcgcctccggaattttggcgctgtcaaaccgtttttctggatgcatatccacggtaagcggtgcaaatacctcccctgtttccagatcccggattcccgacgcatcttcaaggcgtattgagatatccacttccccggcatgggggcggtaggaaatcaggccgaaggtctggttgtcatacacgaagagactgtatttgggggctgcgctcagggagacgaataaccctctggtgagaacggctgcgatctcagccactaccgcttcaggcagccggtagagctggctgtaatcgtcgggaatattgagtatcaggaagcttccgtctccatagaattcctctgtgagtatggagaagccggcttcctccgtgaccatggacaccgcctgccaggctccgccgctgcaggtgtagaccggaaatgtgacaggttctctgctctcgcagtagatacgctggttgcggtgatagccgtctgcgataaaaagttctgcgctggcccgacggtttgtgatctgggcatttgtaatctcatcgatgccccggtctgacatggcctccacgaaggcaggagttgccacggcatggccgccgtttctgacatagcttttgagctttgttagaatctgcgggtctcctgcggcgctggccgttaaaaagatcacaggagcgtcttcccggaatacggcggagggctcaaacgggatgccgagcatgcctaagtagttgattaactggccttctccgctgccttccagaggttcatagaccgagacgccgatgggggttccggttttgtctaagaggctgtcgatgcgttttagctgctggcccaaaaccggctgcagcgggcattccgtcagagtcggatagcggaacgacatccagtcgcggcaggcgatcagttcctttgcaccggcaaagagtgagagcgccgcctgttctacccaggtgttaatgtggttgttggagcccccctcatcgatccaggcccccaggttgcggccggggacgatgccggtaatccgcctgaagctgctgtagcttaagtagcgctgtacgtgctgaggatcgtatttgggattgcgggcctccgtgccggtgtagacaaagtcgaacacgtctttctgcagatccggcgcatagccgcactgtctgtagctctcataccagttgggatatttgatgatgagccggcagccgggattgacatcggccgcggccgctttcatatccctggaaacctggagcatcagatccgtccggtattcagcccaggttcggtctcccctggcgtcaatgcacagggggcatttacagctggtaaagaagaaatcatccagtatgatctcgtcgaacaggctggcggtgtaacgcacaatatcgagaaatgcttcgcggtacaccggatcctggtagcagatcacatcgtagagcgtgttcttttcatggcccgggatggagagggtgggggcgatggcgcccccggtctcgattccgtaccggtgaaacagttccttcaccgctctcattttactctcctcaatgtcgtacatgcccctgtgagtctccagatacaccttggtcagaggcagccgcttttgaaaatagcggatagcctcctccacagtatctaaatccgcataatataaatactctgcatgcgggtaggttgcaatgtgaaaatttctgtacattcttctattcctcctttccgatcaggcggtaaaaccgacagaaaccggcggtgaagggaacttccagaatctgctcccttacctctgattttgccttggcggcatcgaatcgcttctgcggctccactcccgttaaaagcggatagtactcccggccggtctccagatctacgatgcctttatactcatctcctctgagaatgatctccagattttcgtccacgggtctgaaggagtagacggcaaaggtactgttgtcgtactcgaacaggccgtactttgcatctgcacttaagaatacagggagatttctcgtcatgactcggctgatatcggtcagcacatccttcggaaggcggtagagctggctgaaatcatccggtatattgagggtatataaatttccttccccgtagaaatcctccagcatgagcgggaaattgcactcatccgtaatcaggccgatctggcaccaggtggcgttggtcttgtaatccagcacctgaagatctacagggcgtcttccctcgcagtagaaacggtgattgcggttataattgtccacgaagtacacattgccggaggcccgtctgccggtggggactgcagtggtcatatcccggattcctctatccatggtgctgcttagaaaaccggaggttatgacggcatggccgccttttcgcacatattcctttaatttctccacgacatccggatccttggccgagctggcggtaaggagcatggaaggcgcctcctcacagaataccggggttggctccagcggaactccacacatgcctaagtagttcatcagctgatcctcgccttccgcgtcaaatggctcatagacgctgacgcccatcggcgttcccaaatgtcccagaacctgatccatacgctccagctgctgccccagcaccgcagtcagaggggaggaggccatggattcaaaattgaagagtgtcagctctctggcgcccgcaaagagggccagggaggcctgttctacaaatgcgttcatgttgtcgctgcttccaccttcatcaaaccagccgccgccgtttcttccgggagcgatctgctccataaaacggatcaggctgtagcttaaatagcgctggatgtgctgggcgtcgtactgaggatttctggcctctacgccggtatagattccgtcgaagatatctctttgaacctgcgggttatagccgcagtcctggtaggactcgtaccagttgggatacttgatgataaagaaacagtccgggttctcttccctggcggccgccacgatctcctctgccagtccggccataagatccagacggtactccggccagctccggtctttttttgcttcgatgcactcactgcagcggcagctggtgaagaagaaatcatccaggatgatctcatcaaacatctttgccgtatctcttacaatctccagatagcgtttcctgtagacagtatctgtataacagagcacgtcgaagatcgtgtgtttctcatgcccctcgatggagagcgtggaggtaattccgccggaggtctttatcccataggaagcaaacaactctttgatggcttccatcttttcccgggggacatcgtagattcccctgtgggtttccaaatacaccttgtcgaggggaagccaggttaagaattcctcaatcttttctttcagcattggtaaatctgttttgcataaatactctgcgtgggcataggatgccgttttaaattgttgaaacatggtcgtctctcctttttactgttcaatgattttgttgccgccttactctttcagttggaaatttaacacaggagagaggaaaatgtaaagaaaaaattatagcaattaacgaatggaaattgaaaaaaatggagtttttaagatgaaacttataaaaattggagattggagttgagaattttatacattgtattttataattctaatttttacaagaatcatcttcggtttgcccggttttctatttatggcaaaacgctataataaaacatataaaacaaattccccgctgcggtacacagccggggagcacagaatagggggttttattatggcactggctgctgtgaagcgaccacccgccggaaatggccgcacgataaataaacggcggcagaccgggattcggtattttctcttaatccttccattcctggtactggtcgcaatcttttcctactatccgctgtacggatgggtttattctttttttaattaccggccgcccatcaagctgtcggactcggagtttgtcggactcaaatggtttgcctcactggtggagacggacgttaaacgcagacagctcttaggggtgcttcgcaatacctttgccatgagcggactgacaatcctgacatcctggctgccgatggcctttgccattttcctgacggagatccgcagcaaatggtttaagaaatcggtacagaccctgaccaccctgcccaatttcgtcagctgggtgctggtctattccatggcctttgccctgttttccagttcgggcatgatgaatacgcttcttacgaagctggggctcgtgagccagccaattcagtttttacagtctgactcccatacatggttatccatgtggctgtggagtacctggaaatctcttggctggtcagccatcatgtatctggcggcaattgccgggatcagcgatgatctctatgaggctgccagagtggatggagcgggacgattccgtcttatatggaatattacgattccgcagctgattcccaccttttttgtcctgctgatgttaaacgctgcaaacttcttaaacaatggcctcgaccagtactttgtattttccaatgcatttaatatggaacacatccaggtgctggatctctacgtttataaccttggaatgggatcgggaagctattcacttgccaccgcaatcagcatgctgaaaagtctggtcagcgtcacgctgttagcagcgatcaacggactttccagggtaatgcgcggggagtcaattatataaggagatgaaccgagaatgaaagaaaaaaagaaaaagaatttgggagaccgtatatttgatctgctgcttatggtgtttttcggggcatttaccctgatctgcatctatccgttttactatctgattattaacacgatcagtgcaaataatttaagtgctaatggagatatcctgtttttaccgaagcagattcattttcagaactacatcgacgtcattcagcttccgggccttttaaacgctgcatttgtcacactggcgagaaccgttttgggaactctgggtactctcatgggatccgcattcttagggtttatgttcacccaggaaaagatgtgggcccgcaagttctggtaccggttcgtgatggtaaccatgtattttaacgccggtctgattccgtggtttctgaccatgaataacctggggcttaccaataattttctggcctatgtggttccaaccattgtacagccctttaacatcatactggtcaagacctacatagaaaatattccaaaagagcttcaggaggcggctgagattgacggagcgggaattctgcgggttttctggcaggtaatgcttccgattacaaagccgatcctggccaccatcaccatctttgctgcagtcggacagtggaattcctttcaggataccctgctcctcatgaccaacgagaagctgtttaccctgcagtttatcctgtaccgctatattaaccaggccagttccttatcggccctgataaaaaacacctccagcactcagatgctgcagtcccttgccactgcacagactgcaacatcggtgcgtatgaccgtctcggtcatcgtggtgatcccgatcctctgcgtctacccgtttttccagaaatatatcgtaaagggtgtgatgatcggatccgtaaagggatagcagcaatttagaaaacagtttttacatgctttactctttcaaaataaaatatgataatggttaggagaaaggaaggtatcttatgaaaaaaagaaaaatggcagcagcgtttatgacggcactgatgttaactgcatctcttgcaggctgcggaagcagtgaaaaggcggagagtgcttcagacccgtcccatggaggagcggggaaggaagaggagcttctgacaatcgacatgttctgcgcaccggccaactatcagggggtacagaccggctggttcggaaaggcgatcaaggacgcctgcaacgtggaggtcaacatcatagcgcccaacgtggcggggggcggagattctctgtaccagacaagatcagcagcaggcaacttaggcgatctgatcgttatccggaaggatcagctggaggattgttacaaggcaggactgctttacgacatgaccgattttgtggcgaacagcaagaacctgaaaaactacagcaaatcctcggaaaatctttcaaagcttcttggaacagacagaatctatgcgtttgcaaacagctcttctctgctgtcccccatggaaccggcctggacggcggtgaatccatccatggcgatcttttccagatgggattactataaagagcttggtaagccgcagctgaaagatatggatgatcttctggatctgctgaaacagatgcaggacgcccaccccacggctgagaacggcaaaaaggtatatggattctccctgtttaaggactgggacagtaagtggatgcgctgtgcctccatctgtacctggtttaatggttactctgagagcaacaccggatttttgtttaccaacggggatgccagcgattacacacagctggatgatgagaacggtatttattataagatgttagagacctttttcaaggccaaccagatgggacttgtagatcctgactccagcgcgcagacctttgacgccatgcaggccaaggtaggagagggagaggtgctctgccatttctggccgtggctcaccatcgacaactacaacacgccggagcgtgtggaacagggcgtgggatttgcctatcttcccatcgaggatcagcgatttgtggtggaaggctataatccttacggcaccgatgatctggttatctgtatgggaagcaaatgcaaaaatccggagagagtctttgaatttctggactggttctcctcgccggagagcatgatgataaactacggcggaccggaaggtctggcctgggaaaaggtagatggaaagccggtacgtacggagtacggacgtacagcggagacgataaacgctcctgtgccagaggagtatggcggcggcaatttcaaggatggaaaatgccagtttaactggtgtatcccgttctggctggataaggacccggcaacgggagagatctttaacaaggctctgtggacatctaccgtgaaaaatgagagaaaccgtgtgatggacgagtggaccgagaccttcggaaccgagcttccgacccagtatcttgtggacaatgatttaatggagatcattccaggcagtccctatatctgtccggtggactcctcggatatcaatattaagcgttcccagtgcggcaccgctgtgaaggaagcctcctggaagatggtatttgccagggacaaagaggaatttgacgctgtatggcaggatatgaagaccaaactggacggcttgggctacaacgacgtgatcgcggtagataaggccaacgtggaaggtttttaccaggcccgtaaagcagttatagaagaaaatcaataggcggggaatcccggggcgggcatatgaaaaatcaaacttccaggtatcattactccctgtttcatttaacgtggccggtatttctggagatggtactgcaaatcatggtgggaagcgtggatcagcttatgatgagccagttctcacaggttggtgtcacggccataggaaatgccaaccagattatcacctttgtgctgcttctgttcaacattgtaagctcggcggccctcattctgatttcccagtacctgggggccgggaaggaaaaaaaggcggtgcagttttattccctgtctctgtttttaaacggcagcgccagctttctcttaagcgtgctgtttatcctggctgcccgcccgctgtttacagcgatgcgggtgccgggggaggcgctgtctgactgtatcctgtatttccgaattatcgcagtgtccttttttgtgcaggcactgttcgtcaccttctccgcgattttgaaggcccatgcgtttatgaaggaatccatggcagtctctgtggtcatgaacctgctgaacattttaggcaactggctgctcattccctccatgggagtggccggtgtggccttatccagcacggcaagccgtatggcagggctgggcttcctcatcttctttttcgtgaaacggcttcatactccggtggggctttccatcctaaagactgtggggcttaaggagctgaggcagctgctttccatcggccttccgaccggcggcgaggggctttcctacaacctctcccagatgggaattttaatcatcgtgaactcccttgggacgtatgcggtcaacaccaagatctatgtgggtatcctggcaaatatctcctgtctcttcgccgtgtccatctcccaggcggtccaggtcattgtgggtcacgctgcgggagcgcaggattacgactatgcaaggcagagagtgagaagctgcctcggttatgccacggcagcttcgtttgtcatgtcagtgctgctttatgcattgagtggtccgatcttttcgatctttacggattacccggagattctggcactgggaaagcagattatgctggtagagattgtgctggagttcggaagggcggtcaacaatgtgatgatccgcagccttcaggtgtcgggggatgtaagattccccacctttttagcgatcacctgccagtggagcgtggcttttggcttaagctgcctgttcgccttcggatttggctggggactgatcggtgtgtggcttgcaatggcggccgatgagtgcatccgggcctttgtccttatgtggcgctggcacaccggcgcatggcagcggatgggatttgcggctcacgcctgaggggaagaagtatactgatagggcagtggaaaaatggagttaattcagcttcatttttccactgcctttttcctggatgtttccgtattggaacgaaaaaaatctaaaaagattgtgaaacatcagatgacgagattgactttttgcagtgacttcattatagttaagtcattatgaggaaaagaggcgtttaactttatgatgaataaatggagggaaaagttcgcaggatttatggtgggccgctacggggcggaccgcctggggcagtttctgatcggtgtttcgcttttctttcttctgattggaatctttgtcaggagaccatgggtggatattctggcgtttgcctgcctgattctctgctattttcggatgttttcaaaaaatatcggaaaacggtacaaggaggagcaggtgtttgaaggactccggtattccgtgacggaaaagtttcggaaatataagtttagaatccgggaaaagaaggaataccatatctataagtgtccgaactgcggacagaagatcaggattccacggggaaaagggaaaatcagtatccactgtccgaagtgcaataccgattttgttaagaagagctgagtcaggagacaggacgaaagacaatatgaatacagaagggaattattatggatctacagtttaagccggtagtggcaaaggatattgagagactgacgccgtttttcgcactgcgtcccaataagacgtgtgacagtgtgtttctggacagctttatctggagggatttctaccatatccaatgtgctgtcagcgatggaaaagcagttcagtttttgatggaaaaggatggcgttacgttcagcgccatgccgatgtgtaaggaagaggacttgtcccactatttttatgagatggtagagtattttaatacggtgctgaagaagccgctgcggatttatctggcggacgaagaggccgtgaatgatttaaagctggatcctgagaagtttgaggtgaaggaacaggaggatttaaaggattatctgtatgatgccggggccatgcgttctctgtccggtaaaaagctgcataagaaaaagaatcatttgaatgcatttttgagggaatatgagggacggtatgagtatcggaccttatgctgttccgaccgcgacgatgtgtgggaattcctggaccgatggtgggaaaacaaggtggaggccgcggagttcggtacccagctggattatgaggtgaatggaattcacgatattttgaagaactgttcccagctgtgcgtccggatggcaggagtctatatcgacggcaagctggaggcatttacgataggcagctacaatgaatttgaaaagatggcggtaattcacattgagaaggccaatccggagatcaatgggctttaccagtttattaacagagagtttctggtcagatcatttccagaggagatgattcttgtcaaccgggaggacgatgtgggaatggaaggcctgcgcagagcgaagatgtcttataatccgattgactttgccagaaaatacagcatagaacagaaggactttaaaggatgatacactatttaagacaggaagagaagaacaggagccggaagctgtgggaagagattttcacggaagattcccagtcgttcgtggatttttactatgcggagaagtgccgccggaacaggattctcgtggcggaggaggagaatgagatcgtagccatgctccatcggaatccgttcgacgtggtggttaaggaccggatctggaagatcgattatgttgccggtgtggcaaccgctgcggcgtggcggcatcaggggtatatgagccgtttgctgtccagaatgtttgccgatatgtatatggagaagatgggattttgctttctgcatccggtgaatccggctatttatctgccctttgaatttacctatatatttgatcagccgcagctaaccataagcgaaaaagggatgatgcggctgagcggacgcgccctgatggaacagcggacggaggaatgcgaggaggctgccagatttgccggaaagtaccttgagaagcattacgaggtctataccatgcgtgacgaggagtattaccggtctctgtgcagggaggtaagaagcgcggacggtgacctggttctcttgaggacaagggatgagaaggaacgcctgaccggtatttcggcatattacggaggggaagagacggagcagagggagcttctcgtgcatccggattttgtgaaggagattgccccgccaaagcctctcatgatggggcgaatcgtcaatctggagcagtttgtctctgtgatccggctgaaggaggactcagaggtcagcgagatggagcttatgatcgaggtttcggatggacagatccgccagaatgacggtattttccgctggaggctggataaaaatggatcgaaggtgacgcgtatgacggaaggggctattgtaaaaccccatctctcgctgggcattgcggagatgacagcctggctctttggatacaaaatgccccagataccggaaaaccggaggagtatggcggaaagaatcaggccgttaaacggtgtgtatttcgatgaggtagtatagaagattttccttgtaaccggtcgtgcttctgtagtataataaagaaaacagcagcaggggaggtttctatggaaaacagatatattaagcttcaggctccaggatgtaacgtaccgctcaaggttgtgccgggacattttgcaacgaaccattcccatatcaattactacattgatatgacgacgctgaagacgcgtgtcagtgaggcacaggaggtcgcccgtgatttggtggggctttacctgtataacacgtttgtagataccatcgtatgcctggacggtatggatgtggtaggcgcctatctggcggaggaactgacgaaggcaggagttatgtcaaggaacgcgcatcagaccatttacgttgtgactccggaatacaacagtaacagccagatgattttccgcgataatattcagcccatgataaccggtaagaatgtgattcttctgatggcttccgttacgacgggaaagacgatcaacaagggagtcgagtgcattcagtattatggagggaagctccagggaatctcggcgatcttcagtgcgatcggggaactggatggaatgcctgtgaactctgtgttccgggaacgtgatatccctgattaccagacgtatgatttccgggagtgtccatactgcaagcagggaatcaagctggatgcccttgtaaacggctacggatattcgaagctttaaagcattttcagacatgctctgaaacgatccggggtgccgcaggcggatttggaagaatccggtctgcggcaccccgcttgagttttggaccggtattgcgttgtgcagtgctgtgtcagccgcaattttacagtgcaggagggagaacggaaaagatggaagcgcaggaacagttgaagcagtggatctctgagagcagccggatcgtattttttggcggagccggtatgtctacggagagcgggattccggatttcagaggcgtggacgggctgtatcaccagcagtatcagtatccgccggagacgattatcagccacagcttttacaggcagaatccccaggaattttaccggttttataaaaacagaatgctgtttccggaagcagagccgaaccgggcacacctggctttggcaaagctggaggcggaaggaaagttaaaggctgttatcactcagaatattgacggtcttcatcaggcggcgggcagtaaggaagtcctcgagcttcacggatcggtacacaggaattactgtacccggtgcgggaagttttacagtctggaggatattttaaatatggatgaaccggatggaatcccgcggtgcagctgcggcgggacaattaaaccggacgtggtgctctatgaggagagtctggatcaggaggtgctaagccgctcggtggaatatattaccagggcggacatgctgatcgtcggcggtacatcccttacggtttatccggccgcgggactgattgattactatagaggaaacaggatggttctgattaataagacggttacccccatggacagccgggcggatctggtgatcagcgggcagctgggagaggtactgggggaagcagcgggcgtgtgagcgtggtgcgaagtgcggactgcgggcagcccggaagcagagaaagaatgaaaaaatgacagtgtaaaggagcgtaaaacgatgtatcaggcagcagaagacagatatgagaagatggaatataagcgttgtggaagaagcggggtacggcttcccagggtttcactggggttatggcagaatttcggcctggaaaagccgttggaagaccaggaggcgattctctgccgggcctttgatttgggtgtgacgcattttgacctggcgaataactacggatttccggcgccgggaaaggcggaggagaattttggagagattttaagacgcggtctgggagcttaccgagacgagatgattatttccacgaaggccggatacgatatgtggccgggaccttacgggaactggggatcgagaaagtatttaatggccagccttgaccagagcttaaaacggatggggctggagtatgtggatattttctatcatcacaggccggacccggagactccgttagaagagacgatgggaacgctggcggatattgtgagacagggtaaggcgctttacgtcggtctttccaattactcaaggcaggaagcggagaaggcggttcttctgctgaaggatatggggatacactgcctgatcgagcagccccgttataatatgtttgagagaacgccggaggacggattgtttaaagcgatgtgggagcacggtgtcggctgtatctgttacagtccgctggctcagggcgcactgacggataagtatttaaatgggattccccagggatcgagagcttcccgggtgggatctacgattaatgaccgatacttatcggaggagaagctagaccagatccgcaggctgagtgagatcgcgtcgggcaggaaccagtctctggcacagatggcgctggcgtgggtgcttcgggagaaggcggtgacctccgtgctgatcggagccagcagtgtaaaacagctggagaacagcgtacactgcctggataatctggagttttccgcagaggagctgaaaacgattgacgagattttaaaataaggacgctgaatacaggagaacgagatgaattttgaggttggagatattgtaaaactgaaaaaacaacatccctgcggcagcagcgaatgggaaattatgcgggtcggcgctgattttcgtttgaaatgtatgggctgcggacacatgatcatggttcccagaaagctggtggagaagaacgccagagggctgaagggagcagatggggtggaaaagagatagaatgccctggaaatgtcgtaaaatcgtagaaaagcaggaaaaagtacttgcttttcctgccaatttctgataaaatattaatccgtgacacattaaattccttgctcctgaaactgaaagcaggggccagagaccacaaggaggtaaagaagcatgaacaagtatgagttagccgttgttcttaacgttaagctcgaagatgaggagagagcagcagccatcgagaagattacaaattatatcactcgttttggcggtactgtaaccaacatcgacgaatggggtaagaagagattagcttacgaaattcagaagatgaaagagggattctactacttcatccagtttgatggcgattccacaacgccgaacgagttagaatcacgcgttcgtattatggaaccagttatcagatatttatgcgtaagacaagaggcataatcgataaagaaagtgtgatcgtatgaacagagtaatcctgatgggtagattgacccgtgatccagaagtaagatattcccagggcgagcgcgccatggccatcgcaagatatacgcttgctgttgacagaagaggccgcagaaaccaggacggcaacgagcagacagcagatttcatcaactgtgtcgcttttgacagagcaggtgagtttgccgagaagtatttccgccagggcatgagagtgttgatttccggaaggatccagactggcagttacacgaataaggacggtatcaaagtttacacgactgatatcattgtagacgatcaggaattcgccgacagcaagggcgcggcttccggtgagggcggcggctatcagccgacatccagaccggcaccgtcttccgcaatcggtgatggatttatgaatatcccggatggagtcgaagacgaaggacttccattcaactaaatttacagggatagaaacaacaaaatctaacaggaggtagtaccaatggcatataataagaatgataaagctgatggcgccaagttcagaagaggcggcatgcgcagaagaaaaaaagtatgtgtattctgtggtgagaagaacggcaccatcgattataaagatgtaaataaattaaaaagatatgtctctgaaagaggaaaaatccttccgagacgtattacaggcaactgtgcaaagcatcagagagcacttaccgttgcaatcaagagagcaagacacatcgctcttatgccttacacaatggaataaacctttattttataagggtttagcgaatgagattccgtaagaaattatggggtctcatttttttgcagaaaagtcggaaatttccaagtgtgtttccagtttttttccatttacgcctatcgcgtatttccctataatggagtggggatacgatagaatttttcacggtaaaggagactatgatgggaacatttttattggataaaagcgttacggcagacatgggaacgatgaaggacagaggtgcggtgagacgagcggtggagcggttttaccgggatctggatatggtggttgacggggatttggcttttgggggcgggatagagctctgcgaggaatccatggaaccggaacagtacaggatactggttgaggagagacggatggtcatctgtgcgggggatgaactgggatttgtgtacgcactgctgcatttgagcgaggcatatatggggatactgccgttttggttctggaatgatcagaaattcgagaagcgggaggttgtggagatcccggtgggaacgatcgcctcgtcgccatatccggtgagatacagaggctggttcttaaacgatgaggtgctgatcagccgctgggatggcggcgtaagtaaggagtatccgtgggagatggcatttgaggcacttctgcggctgggaggaaatttagtgataccggggaccgacgcaaattccaagatttatgcggaactggccgcagagatggggctctggatcactcatcatcatgcggaaccgctgggagccgagatgtttgcacgggtctacccggataagacgccttcctttgcggagtatccggagctcttctacggcctgtgggaggagggaatccagaggcagaagaattaccgcgttatctggaatatcggattccgtgggcagggagaccggcctttctgggatgatgatccgcagtatgacaccccgaagaagcgcggggatttaatcagcagcctgatggtgcgccagtacgagctggtaaagaagtatgtggaaaatcctgtattctgcacaaatctctacggggagacgatggaactgtatcagcagggattcctgactctgccggaggatgtgattaccatctgggccgacaacggttacgggaaaatggtatcgagaagacagggaaaccacaatcccagagtgccggcgctgcctcccgcagaattgagggaagggaaccatggaacgtattatcacgtctctttttacgatctgcaggcggcaaatcacattaccatgctgccaaattctatggaatttgtggaaaaagaattgaaaatagcgtatgattgtggaataaagagtctgtgggtcgtcaactgttctaatgtaaaaccccatgtatatccgctggactttatcgggaatctgtggagaggaaattcgcttaccgcagaggaacacagaaggcggtatatggagtcttactatgcttatggacagcggattgacggaaacgatcttttggagcctcttcaggaactgtttgaagcgtattttgattgtacggttccatatggaaatgaggaggacgagcgggcgggggaccagttttataattacgtgaccagggattttgtctgccgtatcatgaaggatgggggacggagaccggaaccggagcttaactggtttgccccgggagagagtctggaagaacagatggaacactaccgaaagacggttgcaggtgggaaaaatgcatttgaaccgcttctggaagcgtgcagccggatggcagagcaggcgggaccgctaatggaagactcccttctcctgcaggtgaaaatacatacttactgtctgagaggtgctgtgtccttctgtgacggttatgaggcgtatgaaggtaaacagtatctgaaggcgttttatttattcggcagggcggcggactggtatgaagcggcagaccggtctatgagagagcgggaacacggaaagtggaagggattttacgaaaatgactgtctctgcgatgtgaaggagaccgcctgctgtctgagacggctgatgggatatatcaggaatttaggggacggccctcatttctatgagtggcagagggaggttacctattcggaggaagataagagggtggttctcattaccaatatggagaatcatatgacggatcaggaactttaccaggcgatgaaggagcgggaaagtgatgagaaagcgttgggatcagtgggtggaacggtttaggaatacgagccttgccagaaagatgatggtggtctatgtggccatattcggaattctgtgcagtatcacgctgcttgccatgcaggttaccttaagtatctatgacggccagctttaccataagtccctggaggaattgaatttcttcacagagcgggtggatggagaactgaaaaaggtggaggagctgtctttcgatctggcgatggattacgagattcaaaatcagctttcgattataaaaagcgcgaagaacaaggcggaatactcttttcagatgtcgaagctgcgaagcaggctgaccacggaggcgctgtcggcggagctggtgtcggaatttatctatacggataagtttctgaccaaatatgaggttgggaaacggtatgtggaactgccggtggggatttacgacagcctgctggagaaatttgacaaggcgaaaggggcttatgtttatgagaatcctacggaggaatttccctacctcgtctccggcagggatatacgcaaacacatcgatgccagccttgaatacctggggagtctgatttttgtatcagatatccgggtgctgatcgagaagcatttaaatcagctgaaaaccgatgtatccagcctgtgcgtgaccagcgactccggcctgatctaccagagcgaggacggtctgtatgagaaaatcaggcaggtgctgccggagagcgattatgagatcataaatctgcaggggagaaaatattttctctgtcagcttacatcggcagagacgggctggacgtatgtgaatatgtttccgtacagctcgatttactttatgaacaccatggtccgctactgtctgatcggcggatttcttgtgttgtttgtggcggcgatgctgattctgaagcggctttccacggccattaccagaccgcttaacagactgacggattcaattcagatcgtggaagcgggggagtttcagaaggcgaaggagtatctggagggagagaagcgcggtgacgaggcgggaattctgacccaggagttccagatcatgctggataagatcatggttctgatccacgaaaattatgaaaagcagatattgctgaaggatacgcagtaccgggcacttcaggctcagataaatcctcattttctatataatacgctgaattccattaactggatgatacggtcgggcaaaaatgaggaggcgtctgagatgctgatctcgctgggggatttgctgcgggcggcatttaaaaaggaacagctggctacggttttggaggaactggaactggcaaggcattatattgatattcagaaggtacggtaccggagaagggctgaatttctcgtggaggcagagggcgatttggaggcgtaccacgtgccgcggatgattctgcagccgctggtggagaactcgatcaaccatggtgtggacaactccttaaataaatgcaggattctggtgcgggttaaggaaaatgaagaggcgcagaccatgactctggaggtggcggatgacggacccggtatgacggaggaagaactggcggctgtcaggaatttcaccatggtgccgaagggaaacggaattgggcttaaaaatatcagcgaacggctgaacctgatcttttccgacgcggtatttgagataagcagccagcccggaaagggaaccgttgtgaggattgaaattccgaaatatggagggaaataaacgtgtataagcttctgatcgtggacgatgaggatgtggagagagaggggatggcagattttatccagtgggaaaagtacgggataagtctggcgggaaccgcatggaacggtgtcgagggatatgaggagatccagaatcagatgccggatatcgtgattacagatattaagatgcctgtcatgaatggtattgagctgatccggaagacgagggaggactttccggatattgtattcattgtgctttccggctatggggagtatgaatataccagcagagccatggagctgggtgtgcgccattatatactgaagccctgtgatgaggcgaagattgtggaagtgatcggtaaggtgacggaggagcttaaggtccgggaagagaagaagaggaaagaggttgatatgcggacccaggtcaagcggcttgccccgagagccagagagcagatgttccgcaatgtgctgctgaaccgggaagatatccataaggatttcgaggcgtatctgggcggctgcggtatcttttcaaaagaggtctttcttctggcatttcataaggaaacgtggtttgactatctggaacagtttgtggtgtcgaacataataacagagcttctgggaagcggtcacgtgcttctggtgacatccatccgcaacgatgtgctgcttctgttggatgggcgtgtatttgatgagattcagcccgtcattgtgaaggtgaaaaaggagtatgagaagtttgattccagcccgctacagaccgcggtttccggccgcggaagctgggggcagatacacggcctctatgaggaggtctcgggacttttaaagatgggaaagatcgaggcggacacggacgctttgtggcatggattttataaggatatcaaccgggaggaattgatgctgattaattaccgggctcttaaggctgcaaaatcctatgatactatcctgtttgaactgtatctggggttcgtaaagatgcggctcagaggcgatctggccggaagaaaggaagcggtaattttatatgtgcttgacatgctctatgaggacgaggacaatgaacggtggatgaaggagaaactttggaatggagaggggcgcagcggggaagggagccaaaacgccggggacgacagggagcttttgaagcttttggccgactatatcagtgagaagcagggattttatccgggcggagataaggaagagcggcgcatgcgcgatattctgctgggaatctatcagaatatcagcagacaggaactgagcatccaatggctgacgaaggaagttctgtacatgaatcaggattatttcgggcgggtcttttccaagtgcatgaaacagaagtattcctcttatctgctgaatgttagaattgaactggcgaaacggctgatctggtattttccggagattaagctttcccagatcgcggaggaagtggggtacccggcggatggccagtatttttccaagaccttccgaaaatcggtgggaatgtccccttccgagtacaaagattatatacaaaaacaggcgtaatttgaaaaaaaccggctttttcgctttggaaaaagtcggcttttttcaattgggatgacggctttttccatttttaattggtttaaaatcatgtagaataacaacataaacaaggtgtgcaccgaacctttgagagttaaaaataaagagatcaaggagagatggttatgagaaaaatgaaacgtttactggcgctggggctcgccggaatgatggtactgtcggcaacgggatgcggaagttcggataagacgaaaggcagtgcagccgacacaacacaggcggcagccacagaaggcacatctgcaggcggcacaaccgcggcagcagcttcctccgatggagaagatgtgacactgaagtttacctggtggggcggacagacgagacatgaactgacccagcagcttctggataagtatacggaacttcacccgaatgtaacattcgaagcggtaccctccggctgggatggatattttgacaagctggcgactcaggcggccgcaggagccatgccggatatcgttcagatggactatctctatatcagtacctatgcaaagaacaattccatcgcagatctgactccgtatatagaagatggcaccatcgatactgccagtatcgatgaaaatctgatgaagtcgggtgagattgggggaaagacagtcggactcgtgtactccagttcccttctcgcaatggggtataatcctgaagtcctggaggaagccggtgtggaagttccttccatggactggacctggagtgactttattgaattatgtaagactgtgaaagataagacgggaaagctgggctcagcgaccggacctgtggatgataccaacctgtttaattactgggtgagacagcatggcgcttctttgttcagtgatgatcagaaatccctcggttacgacgatgaccaggtttgtatcgattacttaaatatgtggtcggagctgatggcagcaggtgcggttccgaatccggacgaatatgcggcaatccagacactgggacaggaagcgggaccggttgtaacaggtgaaggcgctaccatgattgagtggaacaactatgcgaacaaggtggcatccgtaaatgataagctgaagattacttctctgccattatctgataacaccgaatataaaggcctctggaataaaccgggcatgtttttgacgatttccgaaacgtcaccgcacaaaaaagaggcggctgagtttatcaactggtttgtaaattccgaggaagccaatgacattatgatgggggaaagaggaaccccggcatcgtctgctgtcagggaacacatgaaatcgactggtaaattatctccgcagcaggaagaaatgtttaattatttagacatcacggcagatatctgcggcgagacgcctgctccggacccgatcggtatgtccgaaatcaatgaggcttttaagaacgcggcttacagcgcattctacggccaggtttcggcagaagaggccgcaaaggctttccgtgaagaggccaatgctattctggtgagaaataactagaacgtgggaaaacatatttgcagacacgtttaggaaacaaagacaaagggattgcacaagacattgtgacagtccctttttaaaagaccgaggtgactattttgataaagaaaagatataaagacaataaagtggcgtatctgctgcttgccccctggctggtgggctttatcgggatgtggctgatccccatgtgtatctccatctactattcttttactgatttcaatttactgaacgatccgcagtttatcggggcagccaattatgtccgggcgtttacacaggataagaccttttataaggcgctgaaggtgacttttttatatgtgctgctcttagttccgctgcgtctggcgtttgcactgtttgtggcaatgctgttaaacaaaaagcacaggggactgggactctaccggacgctttactatattccttccattatcggaggaagtatcgcagtgtcagtggtatggaaacagatttttggaaacaagggcgttatcatgacgctgctgggggtctttggaatcacgcagaagacgtcacttataggaaatcccaagacggcgctgtatgtcattatccttatgggtgtctggcagtttggatcttccatgctgatctttttatctgcgctgaagcagattccgggttcgctctatgaatcggcaaaggtggatggagcaaatggctttgtaactttctggaagataacgattccgatgctgacaccgaccattttcttcaatctgattcttcagatcatcaacggtttccgtgtgtttacagagagctatgtaattacggatggcggaccgctggacagcaccttatcgtacgtcctgtacctgtaccgtcgtgcatttacgtattttgacatgggatacagctgtgcgctggcgtgggtgctggtggcaattgtctccgtatttaccataatactgtttaagactcagaaaaactgggtttactatgaagcagggagggaataaatcatgggaatgaagagaaaaagacagttgagttcagtgattttccacgccggggcgtgcattctgggattttttatgatctatccgctcctgtggctgctggccagttcctttaaaagtaatgaaacaatgtttaccaatacgtattccctgctccccgaggtatgggatgcggcaaagaactatgccagcggatttgcaggaattggcggcgtggctttcagcacgttcttcatgaactccatggtggtaacggtggtgggaacggtcacatgcgtgttatcctctctgctggccgcttatacattttccagacttaaatttcggttttccaatttctggtttggctgtgtgatgatgacgatgatgattccggcacaggttatggtggttccgcagtatattattttgaagaaaatccatttaatcgatacacgtgtggcacttgtgctgccgtggtgtttcggaggtgcgttttttatctttctgatggttcagttttttcaggggattccgaaagaactggatgaagcggcggaaatcgatgggtgcggtaagattcagacactcgtcagggtgctgatccccattgtgagaccagccattatcacttcctctatttttgctttttactggatttggcaggatttctttcaaccgctgatctttatgagttcatcgacgaaatatacgattccacttgcactgaatatgtatttagacccaaactcttacaataattacggtggattgtttgcaatgtcagtgatttcactgattccaatcgtggtgttctttatcattttccagaggtatctggtggacggaattgccatggatggaattaagggataaataaaaataaagggggataacaaattgtacagcttatcacgatggaaaaccagaatgacagcatgtatcttatcgggggtcgtggcttttggcacactgttcccggttccggcagaggcggcaggaaaaacagccgtatacgatagcggggagatcgtggatctggcggggaacagtgagatgaaggcttatggtgaacgccttgtcacaggagggaaggcttctgtatccagagattatgggggagaagcgggagcgggtatttcctattatctcgattctgaatccggaaatgatgaaaatgagggaacttcggaagacaaaccgtggaagagcctcgaaatggtgaataacagaacctttcagccgggagaccggatattgcttaaggccggaagcgtatggaaagaggagacgctgtccccgaagggatccggtgaagaggggaatcccatcgtcatcggcgcctacggggatggggataaacccaaattagagggaaacgcagcagttcctgaagtggtgtcgctctataatcagcagtactgggagatttcagatctggagattaccaatactgcggccggatttaccggcgccatgaacgatcagaatggaaataagttaaaggatgtcagaggcattcgcattgccggacaggacggaggcgatttaaataatttctatttgcacgatttatacgtgcatgatgtgaccggtgtatgcgcctggatcagcggtgacagcaatggaaaaccgggaattctggggaagcagggctgggataagtcgaagcgcacgggcggaatcgtgttcgaggtgatggaaccggccacagaccagccgacggtttttcatgatataacggtcgagcggaacgtggttaacaacaactcctttggcggtattattatcaagcagtggaagggcgcagataccggcggggaacactgggcgtccagagaagagggaaagggcaatgcggcaaataattatttctgtgaaaactggaagccgcataccgatgttaccatacgcgacaactatttaagccaggaaaattctgactatgcctgcaataccatttatttgaccagtgtacagggcgctgtcgtggaggggaatatctccaaggaagccggtacgtgcggcatagaaatgtattatgcggacgatgtgaccgtacagcggaatgaagtctacaagaccagggtgaaagctggaggagccgattccaatgccatagatccggataaggcgtccaccaatatcctgatccagtataactacatccacgatacaggagatggaatcctcctctgtggttttattttcggaacctccgtggtccgctataatgtaattaaggatgcgcagaaacggtatattaatccacatggggataagggagtcaattacgtgtacaacaacatcctctataatacgattgagaagtctaatctgccgtttatcgagtcatcagggggcaacagtgtttatttaaataaatcgggaaatatgcactatttcaacaataatattttctacaataccgcaaagactacaaccagtgtcggaatcggtgaagggacgtctacttcctatgacagcaactgctattatggaaagggagtgcaggcaccggagcaggagacccatgcagtatgtggggatccgatgtttgaaggggaactgacaggagccggagaggagggggcggcggaacttttaaagctgcgtctaaaaacggaatctcctcttctgaatgccggaatcgaggtggaagatgatcccctgctgtctgtttcggcaaatccgggaactgattttgctggtgatcccgtatttaacggggaacctgatatgggaatctttgagtatcagggagaagcaggaagcggaatcttaaatggatatgtggaagacccttatggaaatatcatgaagggagcctcggtaaagttaaaggatacggattatgctgcagtgacgaatgaacagggatttttcgccatagcaggagtgaagccgggatcgtatacggcggtgatctccaaagagatttatctggacggagagaccccggatattacagtggaagagaaagctgtgacgagagtacagctgaagctgagagagagtctgtctgatgtgggcagtgtgaaaggctgtgtgtctaattcgtctggtcctctgcagggagtgacggtgacggtctcgctggaagaccaggtatataccgccaaaaccggaaatgacggctgttatgaaattccggacgtaaagatcggaaccggatatgaggtgacggcttcgaaggaaggatataagacagccaccgagaaagatgtcaggataatgccggcagctgtttcggaagtgaatctgattctttccagggaagttggaaaaacgacgtatctcattgcagacttgtttgaccagtatgatacaggagcatttacgaataacagcagaggtaacgagttatggaaggtttctgatatctccgctgcggattcggctaaagcatctttgcagattaaggcggaggagaatggaaacaagtatctggagatggcgaaaaacggatcctataacctctatgcctacacaaagaaggaatatgatttaaatggaatcattacggttgaagcaagggtgaaacggacaaaggaaacggcgtctcccaatcagtttggtatgtattcgtttaacaaagcagattttaaaacaggggatccaacgtccagttctaatgcaatcggtacctttgcactttctaagggaaacattattacgcataataaaaagggctcttcgagcacagtaaacgttcagccttatgagaagggccgatgggatattatcagaaatgttatcaatctggataccaacacctttgacttttatgtgaatgatatgaatgttccaaaactggcagatcagccgcttcggacacagggaaaaaatattgaccggttcgagtttttctccagcagtacaaatggtggagacctgttgatcgactatttcaaggtttgtaccggacctgccatggattataatgacgcgggtctctcaggaatcagcgtagatggaaaagaggcggagtggaagggggaaaatatctatgaaatgcaaattccctccggcagcagtgaagtaaaggtacagccgtctgccaacagtatttttgttaaaaaggttatggtgggaggtaaggatgccacaaaagaagcggtatctgtgccggtacccgaggctggtgagccgctccttataactgttctggcggaggatggggagacagaggagcgctatcagctgaatctggtgaaagaggatgtctcagggctggcctatttaacgaatcttaccattgagggcatcactttaactcctgaatttgattttaatactatggaatacgaaggaaacgtggcgtcagacgtgcacagtgtgacgctgcagtatgagacggttcaggcgagcaatgaggtcactgtcaaggtcaataatcaggaagtgacggatcgggtgattccgttaaagccgggtgttaacgttatagagatcggagtcgcatcggcggacggtaccagctttgcggattacaccgttacggttacgagagactgcgtgattgacgagattcagatcgatacgctgcctgtaaagactgtctatgagagaggggaagaacctgatttcgaaggactgacagttggtgcctattgtgagggagaccgggtgcggagtctcgaagcggccgagtttacggtaagtatgccggatacatcggaagcgggaaccgtttcggtaacggttacttatgagacggaagacggaaagacgctggaagcctcctttgatattacggtgtatgaccgggataccatgcagcctcagagtattaaggtggtgaaacagccggaacagactgtatatggaaccggagaagcatttaatccggatggcatggaagtgcgccttctcatgaaggctacggccagcaatgccgcaccggcagaggtcagaatcctggatgacggggaatacgacgtcatggatgattttacagagccgggagacacgatggtaacaatacgctatagctggaccgacagcaatggtgaggagcggtatctggaggatcaggtggcagtaaccgtctatgatgaggaactggaatactatcagacggggattaaagtgacaaaacagcccaaaaagacggtctatgagacgggaagtatctttgacccggatgggctggaagtaaagaggatcatgaaggccagcggaagcaacgccgattattatcaggaaaccatcacagattacgattatgagacggctgaactgaccggtaccgggaccagaaagatatccatccgtcatgagggaacaggtgaaaatggtgacgaacagacgtttaaggccgtagttacggttacggtgacaaatcgtgaagatgtattaaataacgcggttctaaagcagtctgtagccgaggccggagagaaattaaataaagaatatgtggcttatatgacggatgaggagaaggacgctgcagctaatgcggctaagaatgtgttcctcgaggtcatgggagcggaagatacggtcctgacaaaggacatggcggatcgtatggctgaacttgaagcacttcttaaaaatgcgtatcctgatattacggtacggattgagggcgattccagtctgacggaaggcgcgaaggtgacaggaacactgctgaatgctccctttggtcagggaaatatcaggatggttccccaaattacaaaaacaaagcttcctgaagacatcccacagacaaaagcagcaacggctatggaaataaagcttctggcaaatggagaagagctccagccggatatcccgctttatctgaccttaaagattccggaggggctcgacagaaaagatctcatcgtttactgtgaattggatgatggcagtattaaggcggtaaatccggaaatcagcggcgaatttcttcgcttttttgtaagaggcgccggcacgtttgtaattgccaatccgaaagagaacgatttaacagaaatcgaaataacagctaagccgaagaaaacggagtaccggataaatgaatcatttgacgctgcaggattggtagtaaccgccgtttacgaggacggaacaaggactgtggtcacagggtatgagatggccgggtttgattcgacagcagccgggactaagacaattacggtattctatcaggggaaaacagcagaatttaccgttacggtaaaagaggatgaggacggacctgacgatgatgacaaggatgacgatcaaaacaaggatgacgattacaacagtgatcatggaagtcatgggagcagcggcggaagttcggcagtcagaacggtgctgcccgatacggtaaagggaaattggagacaggatgagaatggctggtggtttgagaccacagacggtggatacgtggtatcagattgggcccgtatcaatgagaaatggtactatttcaacgaacagggatacatggcagccggctgggtattggatcagaatcactggtattatctgggcgaggatggagccatggcggactatacctggatcctggatcggggaacgtggtatttcctgcaaagcggcggtgtcatggccgcagaccagtgggttctgtggaacggaaactggtattatttaagcagtgacggcagcatggctagagacactgtgattacggtcggataccggatcgacgaagacggtgtctggcgtcccaattaacagataagaggatgaactcccgggaggcggatgctttccgggagtttttttgtgaaatcagtaaataaatcacgaataaaggttccttcattgacaaatgaggagttgcgctttatcataacagttagaaagacttaaggatagaggatcaggaggttatctggatgacggtaaaggattgttacgaggcgataggtgccgattatcaggaagttcttcgccgtctggcgaatgaagaaagagtaaaacgttttctgctgaagtttccgggggatgacagcttctccggactggttaaggcggtggaagaaggggattatgagactgccttccgtgcagtccatacgttgaagggaatctgcttaaacctgtcgattaccaggcttgcagcgtccagcagtgcgctgaccgaatcactgcggagcggcggatggagcgaagaggcagggcggctcttcgaacaggtgaaagaggagtatgctcagactgtccaggagattaaaaagctggaaaacgattaattgcgccagatacgcgaggaaaaatgatatatgaagaataaaattttaatagtggatgatgcggagataaaccgctcccttttggcggacatcctgtctgtcgagtatgatattatggaagcatccaatggtatggaggcagtttccctgttgaatcagtaccacgccgatctttcgctgattcttttggacatcgtaatgccggaaatggacggatttgaagttctggcgattatgaacaggaacgggtggattcagagcataccggtgattacgatttcagcggagacgtcttccagctatattgagcatgcttatgatctgggagcggccgattatatcagccgcccgtttgatgaaaagacggtactgcgccgcgtgagtaatatgcttatgctctatacgaagcagaagattctggaaggtatggtgacggagcagattatagataaggaaaagaataatttcctgatggttgaaatcctgagcaatatcgtcgagttccgtaacggtgagagcgggcttcatgtgctgcacatccgtgtcattacggagatgcttcttaaaaagctggtggagaagacggatcggattcagctgtcactgtcagatattgctctgatcgtcaatgcatcggctctgcacgatatcggaaagatatcgatcccggaggaaattcttaataaacccggccgcctgactccggaggagtttgagatcatgaagacccatgcggccataggtgcacagatcctgaaaaatgcaccgaaccgtcagacggaaaagctgattcaggtagcgcatgatatctgccgctggcaccacgagaggtacgatggaaagggatatccggatgggcttaagggagatgaaattccgattgccgcccaggtggtttcggtggcggatgtctatgatgcgcttaccagcgagcgtgtctataagtcagcctacagccacgaaaaggctatggagatgatcttaaatggggaatgcggggcgtttaatccgctcctgctggattgtctggtggaagtgggagaccgtattctgaaggagcttgatttacattccctcgatggaatgtcggacattgagatggagggcatcgcctcggagctgaagtctcataatgaactgcgtgcatccaatcgtacgcttatgcttttagagcaggaacggattaaataccgtttcttcgcttccatgtcacaggaagtccagtttgaatacaatatccattcagaccttctggaaatatctgagtggggagcgaaatacttaaggataccggagctgatagcccatccggaacaaaatgacgaacttgcacgggtatttgaccggagagatttcgcagatttaaagaagaagcttcgtgcgacgactccgggagagccggtgttcagtggaagctatcaggttatcatcgatggaaaagcgaggtggttcaaggtcgtggcacgcacgatctgggattccgacgaggataccttatattcgggaacgatcggaaaattcattgatatccacgaggaacagatggagcttactaatttaaaacgcctggcttcccaggattctctcaccggcctttataaccataaggcggccaaggaaatgattgagaatatgatcatccagcgcgagaataaagagtatgccgtgattctgattgatgtggattacttcaagtctgccaatgaccagcatggccacattttcggggatgaggtattaaaatatatttctcagaagatgaggcagaatatccgaagagacgatatcgcggccagagttggaggagatgagttcctgatttttgtggaataccgtggcagtgtaatgccgcagatcgagcggattttcagttctctgacagattccttccagggatttcagatatccgtcagcatgggcgtggcatgctgtccggagaacggggagaactacgaagtgctgttccactgtgccgatcaggcgctctattcggcaaaaaagaatggcagaaaccagttctgcctgtatgaccagtcaattcagggctttttgtctgtgctttcgccaatggataactgagtatggtgtgaataatgtggtaaaagtggaatttccggaagataacgggagttccgcttttttgtttcattaagaaagcttcggatttatatttcggaaattttaccatttatgtctgatttttgaattaacttgagaaagtacgtctgctaaaatagaagcagatgaggaagcttcccaaatgaaaagaaaggatgaaggcgattatgaagaaaagaacagctctgattgtggcggctgcacttgcagcgtcagctttggcgggatgcagcggaggaaacgggcagaaggagacgggggctccggcagcggaaagtactgccgcggccgcaggccaggagagcgagactgtggatcccatggcggccattaccgatgatggaacgaaaaagacgattacatactggcatacatttacggagggggcccgcaaggattatattgatgagatggtagccgaatatatgaaagaacatcccaatgtgacgatcaatgtagaggtatatccctggaatgtattcactcagaaatggacagccgggctggctgccggggcgctgcctgatgtcagcagcgtaaatccggacaacttatttgcgattaatcaggcgggcgcagtactgcccatgaatcctctgatcgatgcactgggagaagattatttccttgaaaaaccgctggataactttacggatggggatacaattctgggcataccctattaccttcattcttatgtcatgtggtaccgcaaggatgtgctggaggaaaaaaatctgtctgttccgaaaaactgggatgaactgctaagtacagtgactgcggtggcagatccgccaaacagatatggatttaccattgccatgtctaaaaatgatcagatgtgcgcacagcttctcagctgcttcgcaaaggcggagggggctccgttgattacagaagataacaaggggaatctaaccgatccgaaggtagtgaaggcaattaaactgatggcggatctctataaggcgggctctccggaaggctctgtaaactatggcctttccgaacagaatgatgtattcttccagggaaagtcgacgtttgcctttggctcgggatttcatatcaatggagtaaaacagaattctccggagcttctggataagattgcggcggttccatttatgggaccagacggggagaatcttggagcgactacttttgtaattggtcttatgggctggaaccagacgaaatatcccgaaacggtatatgacttcattaagttccattttgaaaaggaacgctatattgacttcctgcatctgattcccggaggacagctgccggctacgacggaagcagcaaactcggcagaattctatgacgatgagacaatccagaagtttaagccagagattgagtatatccaggagggcattgaaaagggaacctttatcggtatggactatggccttacacctgccgctgcagcactgaccagccaggggattattgaggagtgtctgcaggatattgtgctgaatggaactgccgcggaggaagccgcgcagaaagccaatgacaagctgaatgcggctatagcgattttaatggaataagagcaggaggttttctatgaggcaacaccggaatcggcaaattgccggaaagagtgtcggggaccggatcgcggattttgtggaccgccatatgtgtggggtgtttattactccggcgtttctcgtgaccatactgctgctggcttatccgatatgtatcagtgtatattacagttttaccaataagagtctgctgggaaaagcggttaaattcgttggatttgacaattacgtttcggttctgcagaatccggatttttaccatgcgctgtggaatacccttgtgtataccataatctcgctgtcattacagttgttcttcgggtttattgtggcattatcactccacaaaatcaaccggttcaaaggcctgttccggacgctggtgctgattccctgggcatttcccatgatcatcgttacttttacatggtcctatcttttaaatgatttatatggaatcgtcaatgccaagctgcttcagtggaatctgattgcacagccgattcagttccttgccaatccgaagattgccatgctgacagtaagcctgatcaacgtatggtttggagttccgttgtttgccattaatattctggccagcctgcagacgatttccagggatttgtacgaagcggcccagattgacggagccagtccgtttcagcgatttcgttttattacgctcccgtttgtgagagtcgttgtggggctgctcatcattttgcggacaatctggatctttaacagctttgacctgattttccttctgacaggaggcggaccgggaacgtcgacagagacggtacccatctttgcctaccgtatgggctggacgctgtattccctgggaaggtcttccgccgttacaattctgcttctgctgttcctgacggcagcgtgtctgatctattttaagatattggatcactgggaagaggaggtggcgtgatgagaaccaggctgcataaaaatagctggaccgtactggcctatgtaattcttaccgtcgcggtattgctggcgggaggacctctcgttattgtcatctttgcctcctttaaaggccagtttgagattgtcagcaatacggcggcccttctgccggaacagttttcactgtactggtttaaggatctgcttcataaaacggatttcctgatttacgtgaagaacagccttctctactcgtcgctgtctacggtgcttggcatgacgatctcgtctctggctgcctatgcgattacaaggttcggaggaaaaaaacagaaaattctgacaagattaatcgtgatgacctatatgtttccgccgatcctgcttgcaatcccatattttatactggtatcgaatctggggcttgccaatacgctgccgggattattaatggcatatatgtcatttaccgttcccttctgtacctatctgctggtcagttattttcggactgtgccaaaggatatcgaggaagcggcaatgatagacggactgcgaaggccgggagtatttcttcatattgcgcttcctctggtggcacccggactggttgcgacagcgatttttgcatttattaatgcgtggaatgaatttttatattctcttctgattataagcagtggggataagcagacggtttccgttggtctgtactccttaaagggtggcatggagacgctgcagtggggagatatgatggcggcgtcagtgctggttgttattccatcgattgtatttttctctattattcaaaagagtattgtaggtggacttaccgcgggggcggataaatagaggacgcagaaaagaaaggagatgggagaatgactgggtatggaatcataggctgcggttatgcaggtggaattcatgccgacaatctggcaaagatgccagggacacggctggcggctgcgtttgatacggattatgagcgcgcgaaagcatttgcgcaggagaggggagcttacactgcctccaccatagaagaactgtgcagcaacagggaagtggaggccgtaatcatcacgactcccaataacagccatagaatacctgccatctgtgcggcaaaggcgggaaagcatgtgttctgcgaaaaacctgtggcgctgagttttgaagatacgaaagaaatgattgatacggcagagaaggcgggggtatattttttcgctgcccatacgacaaactttattcggggtgttcagacggcgaaggcgctgctggcttccggagctgtcggagagctgcttatgatcgaagctgttcatacggactgggcaggacctcagaaattcacaggctggaaacagaggaaggatatttccggaggccacctgtatcaccacatgcatgaggcagatttaatctgccagctggcaggccttccggtatccgtatatgcaaatgggaagaatctcgttcatcacggagagggatgtggtgatgaggaggatgcgatatttttgaatatggagctttccggaggcggatttgcatctttgacgataggatctgcattccatttgggagatcattttgtaaagcttcagggaaagactgggggaatcctgctggattttaaaaactctgttgtacgactggaaaatgaccggggagagaaactgtattccatgcaggaaaatgaggcagaggacgaggaacgcaggaacggataccggaaacataaagcggatgcaggaaaagggtttggaaagccggggatgaagacgtcgtcctggatgagcaccatattttataaggaattgaagtgttttaatgatatcattagaactggtaatacggcgcctgaatatgagccgctgctggacgggagcgcagcattaaactgtgtgaaggtactggatggggccagagaatccatggcattaagactgccggtcagactggaggaatgatagaatgaatctgggtatcataggactggattcttcccatgcggtccagttttcaagaatcctgaatgggaggaaagaaccgtttcatatcggcggtcatccggtgaccgcggcatatccggggccagtatcgtcggatttcgatatgagccgggaccggatggagaactttaccagagaagttacagacgattggggagtaaaattatattcatccattgaggaagtgatgaacaattccgatgcggtttttctggagcaggtggatgcgagaaggcggctcacgcagtttcgggagatggtcggatttggaaagccaatctatgtggataaaccgtttgcattaagtacagaggactgcaaagcgatgcttaagctggcggaagagtacagggttccggttttatccacttcctctctgcggttcgcagacagccttacagccgcattgaaacagtgtgagtggcattctgtagtcggagctgatttttttggcccaatgccgtttactcctacgcagccgggatatttctggtatggggttcacatggctgatatgctgtacagaaccatgggaaccggctgcagcaaggtttcagtcattcataccagccagcacgatataatcactggggtctggaaggatgggagaatcggaaacattcggggaaaccgatgcggtaatggtaactttggaggtacggtttatcacgaatcaggcagtgtatttgtcgatgtttcacgggatacgagagggtattacgagtgcctggtggaacagattattaagatgtttgataccggacagagtcctgttacgagtcaggagatgatggaggtggttcgttttttggaggcggcaggtgaaagtctcaccacaggacgggaagtagtattataaaaggagagatggagcggatgattcgaattggtgttttgggctgtggctattttggagcggaatttgccagagcagtaaaggaaatgaaggggattcagctggcggcagtttacagtccaggaaagagttcggagcggttaagcagtgaactggggtgtccgcgggcttcttctgtcaacgaaataatggaaaatgcagatattgacgcggtaatcattgccacgcctaattatctccatcatcagcatgtgctggcggcggctgaagcgggaaagcatattttctgtgagaagccgtttgcacttgacgcaggggaggccgcagagatggtggaagcatgccggaaagcaaaggttactctgatggtggggcatattatgcatttctactatggaattgccagggttcaggctatgattcaggagggcttttttggtgatattcttaccatgcatatcgagcgtaccggctgggaacagaaaaagccggaagtgagctggaaaaagatgcaggagaaatccggcggccatctgtttcaccatattcacgagatcgatattatgcagtggattatgggagtacccacggaaatgtacggggcaggcggtaatctgggacaccgcagtgcagagtttggagatgaggacgatgtgctccttcttaccgccagcttcggagggaatgcctttgcaacactacagtatggttccggcttccgggtgggaaatcattttatccgtatcaacggtacgaaagcgggggcggtgattgattttaagcatgcggaagtacgcgtggtcagcgatgcgggagaaacggtattcccgctgtttgaagatgagaagagtgcagcggcgatctgtgagctctttgcgcgtaccgacggagggatctcatacggatctccggaggaacggcctccggagtatatactggtctccctgcgaaaggaactggaattgtttcttcatgtgttgaacggaggagatataccagaagataaaaaagatttgtttgatgggtcctcagcggttcattcggttcagattgcacagatgggctgcaatgctgtacagcggcatggatcccggccggtgtaaaccgctggtcggggcggacaccagaaggaggaagtcataaaggagaagaaaagagggctgcatcataagatgatgcagctcgtgtggattgacatcattatattttttctgattgcgggggctggtgtgattctgtcacaacgtatttaccgtcaggatatggaaacggagacttctaatgtatttgaagcctccttttcgaatatagagaatacgctgcattttgtcgaaaatatggcattcaatattatgaatgataaaacagtgaaggaggcgctgcgggcggtgaaccaggatcgggaagaccgttacccactggtagatgatttgtattatcgtctcattaccggatccctggtggccaatgacgctgtttccattattgtaacggatcaggaggggcgccagtatgcgacaggcagtctggacgataatctgacggatgaagaacaggagaaaatacattttctgatggaggaacgctcctcacgaaccgagcctgtgtggatagaacggggaaatggacaggaactgctctacgggagggagatctatgatactccgtttggagggcacaatccgctggggatgatcctgattcgcgtgaatctggataagatgatggcggagagccgtcagggcagccttgcaaaggggaatattgttattttttataaggggacccccatttacgcgggggataagcgaatctttggcagtccggaactgctggatactgtaagaaaagagaaacgcgggcgctcgggaaggtattttaaggcagagtcagagtctgaatttttcggtattacttatctgggatatgaaagatacaatgagatgatgacatcgacaaacacactgatgatattttttacaaccgctattttgtttatcctgattgtatcgtttctggcgactgcccgtgtggttcaccatataactgcgcctatagcatttttgagcaggaagatgaaagcggtggaacagggggatttttcggtacagattgacaggaagctgctggatacggacatcagggaatttgaggagctggcggctaattttaatcttatgacaggggagatcgggcgtctggtggaagataattatttaagaaccattaaggagaaggaataccagattaaggttcttcaggcgcagatcaatcctcattttctttataatacgctggatgccattaactggctggccatggacagcggacggcctgagatatcaagcatggtacagtctctggcgacgctcttccgcgaagcgacgaaacagcagcagtatttaattcctctgagcgaagaactggcgcttttatcatgttatgtaacgattcagaagatacggctggaggaacggctggaagtggcattttccattccggaggagtgtatgaatctaaagatacctaaactttcgcttcagccaattctggaaaattcggtgaaatatgcggcagaagttacgatgaagccgtgtctgattgaaatccgggcgagaaaaaagggaaaccgtctgattctttgtgtttgggataacggtcccggaattccggaaccaatattgacacaaatcagggaacgaagggtaccaggcaatacgggaatcggccttctgaatattgaagagcggattcagatgctgggggaaccagggagcgggttaaaaatatattcggcaaaaggacggggaacatggattacactgtgtatctgtcaaccaggaggtgaatgcagttgaaataccgggcactgattgtagacgatgagcgcatcatagtaaatggaatcatgagactgccgatctggcttactctggatatagagcctgtcccggccatgaccggcctgcaggcactggaattaatggaacaatcccggtttgatctgattatcactgatatccgtatgccggaaatggacggactggaattcatctcccaaatgagaaaagtgtatccggacatcccgacggtagtcttatcgggctatgactctttcgcctatgcgaaggaagcgatccattatggagttgtggattatctgttaaagccgatttcacagttagacttaagtgacacaatcaccagaatttttcatgggatagaagaaaagaaggaagcgcggcagcaggaagagatgcttcggggaacggtaaaacagacgatccgggacgccgatgcccagcagttggaaaacggcttgctgggaggacgggaaaacgaccggattgaccgtttgctgggatcccgttatattctggcggaatgtattccctgtgacatggaggaagaaaatctgggaggtcttaatctgctgttagaaaatataaagcagattgtactggggccccgcagggataccggggcagtcgttacactgtttatgggtcacgttgtattcgcggtaaatgaggaaaccatggattttaacaggctcctgtcagagttcagggactggagtgaaaaaaacgaatttccattttcggtatcctgggttttggctggccctagagatattctgtctgaccgctacagccttctgaccagaatatcctcataccgcttctactatgatgaattttgtattttatccgagaaagagatgaaatctgcggacggagaaccgtgctttgaggcgctggaagaggctgtaaaaaagggaaatgcagagtccgctttaacagaaatggagaaagtaatcgatgatctgcgtctcttaaacaagtctccggaagagacaagaacctactgcgtcagactctaccttatcctggcgaaatataccaacgagcatgttcgtgaaaccggaattgttaaattactgatgacgagtgcctacactgactttaacgggcttgcggccatgcttcgccagcttttaacccggtgggagactggtaaatcagaacagaatctggccagcttcagcagtattgtgagaaaagccatgctgtatgtacatgaccatctggatgacgaagaactctctatcgctgcagtagccggaaccgtactctttattcatccggattattttggtaaactcttcaaaaaagaaacagggattgcattcacaagatatgtgatggatttacgcatggaccgtgccaaaaagttaattgccaagcggccggacatcaaagtctatgaactgtgcgaagccactggctttggcgataatccacactatttcagtcaggtttttcgctcttgctgcgggtgtacgccgagtgagtataagcgtgcgatggggcatatgaaataatggagtgttccaattggatcttttggttttttagattcggttttaaaaggaaaatacggtttttaacaggcgtgaaggcctcgcgttggcgaggccttcctttaagcgatttaattcaaattatccaacgcctgaatcaacgccagaatcgtaagggactgcccataagccatcggcgcgatcaatatatttttataatgttccctgtcagcccccattccggttccgcctgacacattcagcacggtcccgtccttgtcaatctgattcataacagcccgtacgcccttccaggcacagtccagacaggaatcatcgaggatcccaagcttgattccctttaagattcctgcggtgatggcagcggagccggacacctcctcgtaactggtcggatcatcgagaacggtatgccacaatcctgagctgctctgcagcttctttaacgtatgaacctggctcttataggtgttcacaataaattcccggacacctgcatccagactgcccttaaacatttccaaatactcgaggattcccaccgtaaaccagctgtttccgcggcaccagaagacgcctccgaaattatcccgcgtattgaaggtccagccatggtagaaaagaccggtttttttgtcgtataagtatttgatatgtaagagaacctggtggatggattcactgatccagtcctggcggttgtatttctggcccattcggtttaagaagagaacggtcataaacagggtgtcgatccacatttcattttcatttaaccggacgcccaggcggtcgccgttggcgctggtgacgtgctggaagccgccttcctcggtgcggggaaggtttcgcatcagccagtcggcccagcttaagcagagagattcgaattccggatcggggcagagctcggttaactgtaccagtgttaacagcggtgtggtggtgttgatgttgcgtgagggaagtccgtcggccatattgcccttaaaccagctgcataggaactcacggtattcgtcctttttttcaaccatcataatcttgtagagaccgtagaggccgacgccctgcggccagtcccattcgctgattccgaagtcgcggcggaagaagccgatgctttcgccgccatcctccagttctttttcattttcagggccgccgagagtcaagagtttgttaacgaccaggtccagctttcgggtgatttcttcttttttcagttcctgcatgagtaggagactcctttcttatagaaaaataatgggttttattatataatgtttccagatgatacaggcgaagcgtaaacagcagccagacaggaggtgcaaggcatggaagccgttatctattacgccaggactgatggtatcgaactggaacgcatgatacgcaagggacgtttcaatatgcacgtaaagcattttcataaccagtatgagatcttctatctgctggaaggggaacggcgttttttctttgacaaccgttcttatctggtgaagagcgggtctctgattctggtggatgaaaattcgattcatatgaccatggctggcagtgaacaggagtttggccatgaccgcattatcctttatatagagcgggacaagatgaaggaattcgaccagctgtttccgaacctgaatcttgtcagattttttcaccagcactatggggtatttccgttaaatgaaaagcagcagaaggattttatcgatctctatatccggcttcaggatgaatttgacagcaggaagcggaattaccgggcaatgattgaaacggatattatccagtatttcatacgttttatgcgtgaaaatcatacgccggccatggaagataccgatgtaaatgctcccgccaaataccggaatatctacgcggtggccgattatatctcggtacattttgatgaagcgattacgctggatcagctggccgaccggttttttatcagtaaatattatttaagccgcacctttaaggagattacaggttacggcatcagtgagtatatgaatattcaccgcatcagggcggcaaagcggctgctggaggagaccgatatgagcgtactgcagattgctcataagcttggatatgagagcatcacgtattttgagaaggtattcaaaacatatatgaccatgtctcccttaaagtatcgaaaaacattgaatacggtaacatataccaacggaccggcggaagaaacgtaaatgccggtccgttgagctgtttatgcaggcgatgaaccgatacggacggattaatccagcaggcccagtatgctgggcagccaaaggctgaatgccggcacataggtgataaacagcagtgctgcaaagattgctgcgaagaacggcagcagtcgttttaacacgtcttccacctccagctttgccacactgcacccgatgaacagcacgttgcctaccggcggtgtgatggttcctacggataagttcataacgatcatgacgccaaactgaaccggagtcatgcccagagccgttacgatcggaaggaagatcggggtaaaaatgagcagggccggagccatgtccatgaaggttcctacgatcagcagtaaaatatttaatataagaaggatgacatacttattgttggagatgccgagcaccatgtggctgatggcctccggaagtccggtgaaggacatgacaaaggagagcacggaggaagctccgataatcagcatgacgatcgtggtcatgaggcctgtctccatgaggattcccggaatgtccttcagtttgatggatttatacagtaccaccgataagaaaaacgcgtaagcaactgctacgccggatgcctcggtaggagtgaagtaaccggacagaatgccgccgatgatgatgacaattaagaacaggcttgggatcgcgtcccagaccgtctttaatacgactttgccggtgagcttttctgtctgatacacgtaatgatgttttttgccgtagaggaaggcaacaagcatacagaggccggcccataagagtccgggaatccatcctgccatgaagaggactgccacgctggtaccgccgctggccgccgaatagacaatgaacgcggtggtgggcggaatcagctgtcccaccggtgcggtggcgacgttaaccgctgctgcaaatccagggtcatagccttcttccttttccagaggatttaacacgccgcccatagccgtagcagcagccacaccggagccggagatggaaccgaacatggcgttgcctgcgatgttggtaagcgccagagatcccggaaccttgcccaagaccagcatggccaggttgataagccttctggcgatgccgccgctgctcatcaagagacctgccagaatgaagaacggaacggccagcagtgtaaagctgtccatgccgcctacgattttctgggcggatacgaacattccgaaggtgggggtcaggaatgcaataatggtgatcagcgcggatgcgatgatactataggatacgggtacggaatatgccagcatcagaaagaatacgatgaccagcattaaagctgcagaaagttccatttatgctgcctcctttaattgtctggcaaaccggattaaacggtctgcactgtagattaaggtgagtacgccgcagatgggaagccccacgtagtagagcggcatagggagctgaagcgccggtgaaatctgccctgctgagttcatggttaccatgatgccgccggcgatgaatacagttacacagagaatcataacgatgatttcgattaccattttcgtgaagagagatcctttcagggaaaatgtttttgtgatgatattgatggatatgtggcgttcctgaccgtaagcatacggaactcccagcatggtcatccagatcagggcataccgcaggaattcttctgtgtatttactggggttatttaaaagaaaacgggtgatgacctgccagcagcatcccaggaccatgagacccaccaggaaggcgatcagataacctaatattttatttaacgttttcatgattactcctcccctgcatactgctcaatatcgtcgtaaagttcctgatagaaagcgcctttagccttatattcctcatgaaggggctgtacggcttcgataaaggcggtcttgtcaatatcataatagatggtcatccccatcccttttgcctcttcgatggcttcttccatcatctgacggtatttgttcttaaagttttcgttgcttctgtttaagcattccaccagataattctgctgctcttcagtcagcctgttccaggtttttgtgctgataatatagacatcaggcgtgtactggtgttccgtgtaggtataagactttgccacctcaccgtgtttgtctacggtgagagccagctcggtattctccgcgccatccaccacaccctgctgaagcgctgtataagtctcgctggcagccatgggagtgggggaggcgcccatcagctccagcattcgcatagatgtgctgctggtcatggagcggatctttttcccctttaaaacggcggggctgtcggccttaatatcttcttttaaataaatgtttctggagccattggcatagtatccaatgaccaaaaacccttcgtcctcattcatacggaaaagctcccgcaccttttcactcttctccatggcgttgtaataatgcccctcacttgtgaagaggtagggaagggaaaagatggagtaacagtcgttaaactgtcccagcatgctggagctgaccttggccatgtccaaaactcctgccttgaccatctcgacggcagactgttcggttcccagtacgccgctggggtagatgtcaatttccatattcatggaaggatcctccgctgcaaatttcgccactttggcgatacagtccgcgatctctgaatccttggactggttatgagccatcttgattcggatcttatcgctgtaatggttaccggctacggaaacaaagatacttccggctgttaccactgccgcagcggtaaggacaattccgagcgtttttttaatgcttttcataacagacttctccttcgtattttaatatgccgcacaggcgcagtgctcgtgtacaggtcttaaaaccttgagtttacgcactttttatcacgatcacattgtagcatggataaaagattttatgttatccgatattgcgctataaaaagaaaaatcaaactatattgtggtcagatgaaggctgaaatgttacttttcatccttacattgcaatttttgccgtatttccttataataggaggacagaggttcaccggaatcagtcaggaggaataaataagaatgaaatctttagtaatagcagaaaaaccgtcggtggcccgcgatattgccagggtccttcgctgcggaaaaaatttaaacggcgcgctggagggcgatcaatatattgtgacctgggggctgggacatcttgtgacactggcggatccggaggattacgatccgaaatataagacgtggaggatggaagaccttcccatgatgccggatcagtttaaactggaagtgattaaacagacaggaaaacagttcagtgcggtaaaagcacagcttcaaagaaaagatacaggcgaaatcattattgccacagatgcaggccgggagggagaactggtggcccggttaattttggagaaggctggctgccggaaaccgatcaagcgtctctggatttcctctgtcactgacaaagcgataaaggatggatttgcgaagctgaaaaacgggcatgaatacgacaatctctatgacgccgccatgtgccgggccgaggcggactggctggtgggaatcaacgccaccagagcgctgacatgcaagtacaatgcccagctgtcctgcggccgtgtccagactccgactctggcaatcatagccagccgggaggaagagatcaggaattttgtgccgaagccctattacggaatcgcggctaagagccagacaccgccgctcaccctgacgtggcgcgacgaaaaatcaaagagcttccgttcctttgataaagaacgggtggaagggattataaagaagatcgaggccggcagtggccaggggcttgtcaccgaggtgaagcgcattcccaagaagacgtacgcgccgcagctctatgatctgacagaactacagcgggaagcaaaccggaagtttaattactcggcgaaggaaacgctgaatatcatgcagaggctttatgagaaccataaggttctgacgtatccgagaacagattccaggtatttaagctcggatattgtgccgtcaatcaaggaacgtctggaggcctgcggtgtgggtccgtaccggaagctggcgggacgtctgatgaatcagaagattgcggcaaagccgtcttttgtggatgataagaaggtctcagaccatcatgccatcataccgacggagcagtttgtgcagctggatcacatgacagtggaggaacgcaaaatctatgaccttgtagtccggagattcattgccgtactctatccgcctttcgagtatgagcagacggaactcacggtagagctggcaggtgaaaattttgctgcgaaaggcaagatcgttaagaacgccggatggcgggaggtctatgacggacaggacgatgacgaggatgacgaggaggcggctgagcggctggatatacgtgctcagaagctcccggatttaaaacggggtgacaggattccaaagctttccgtcacgatgacggagggaaagacgaagccgccggctccgtttaatgaggcgacgctgctttccgccatggaaaatcccactgcctatatggaatcaaaggataaagccatggcgaagacgctgggggagaccggcggcctgggaaccgtcgccaccagagcggatattatcgagaaattattctccagctttttactggaaaaacgggggaaagacatcttcctgacttccaaggcgaaacagcttctcaccctggtgccggaggatttgagaaaaccggagctgactgccgactgggagatgcggctgtcgaaaattgcggatggaaagctgaaacgtgccgccttcatgaaggatatccgttcctattccaatgaattgatctcccagattaaaagcggagatggccagttccgccacgacaatttaacgaacaccaaatgccccgtctgtggtaagcggatgcttcttgttaagggcaagaacagcgagatgctggtgtgtcaggacagggagtgcggccacagggaaaccatagccaggaccagcaatgcgcgctgccctgtctgccataagaagatggaactgaggggaaaaggggacagccagatatttgtatgcaaatgcggttataaggaaaaactgtcgtctttcaaggagcgccgggccaaagagggcgcaggcgtgtcgaaaaaggacgtgacgagatatttgaaccagcagaagaaagaggcggaagcgccgattaactcggcatttgcggatgcgtttgccaaattgaatctggataagaaaaagtgacacagccttaaaccaaagaaaacttgcaggaaaacaggagaaaggtggggatataaggtcttttatgaactggaagtctgtgatataattgattgcagttatacggttgtgcctttcaaagatattctgagtttcagaatgttaaaaagaacatggtaaaaatgcggaatgatatggaggagaaggatatggattacaggacatatttgaagaactacccggacaaagacggccggtttggcccttatggcggcgcttatttaacggatgaactgattccggcttttgaggagattgcggatgcgtaccagacgatctgccattcttcccagtttatcaatgaactgcgcagaatcaggaaggagtttcagggaagaccgacgccggtctatcactgtgaacgtctctccaagagtattggcaactgccagatttatttaaagagagaggatttaaatcacacgggggcccacaagttaaaccactgtatgggggaagggcttctggcaaagttcatgggaaagaaacgtctgattgcagagaccggagcgggacagcacggagtggctctggctacggcggcggctttctttggactggaatgtgagattcatatgggcgaggtcgatattgcgaagcaggctcccaatgtaacgagaatgaagattctgggcgctaaggtggtgcctgtgacacacggtcttaagaccttaaaggaagcggtggattccgccttcgagtcgtatgcgaagaattataaggactccatctactgtatcggttctgctctggggcctcatcccttcccgctgatggtgcgtgatttccagtctgtcgtgggatacgaggcgagagaccagttttatgagatgacgggcatgttccccgatgaggtctgcgcctgcgtcggcggcggaagcaactccatcggcatgtttattccgttcctggatgatccggtggatatcactggcgtggagccgttaggcagaggggaaaagttaggcgatcatgcggcttccatgaagtttggggaaaagggcgtcatgcatggatttgagagtattatgctgaaggatgaaaacggggaaccggctccggtttattccattgccagcggtctggattacccgtcggtagggccggagcatgcatttttacatgacctgggacgcgtgaaatacgaaaccgtcagcgacgagcaggctatggaggcattctttaagctgtcccggtatgaggggattattccggcaatcgagagctctcatgcggttgcctatgcgatgcgccgggcgaaggagatgagacagggatcgattctcgtatgtttaagcggcagaggcgataaggatatcgactatgtggttgaacattatggatatggcgatcagtttttagattaactgagaaactggcgtgtattgtgaagggaggctggtcaatggcctcccttttattttgtataaccggaagttataaaagatatataaattaaatataaacaaagtataaactttttattgatttccatacggtaaagtgataaactccatttcatcggaagttaggatgaaaaaagtaaagatttttctccggagcttctgaccagacacagaagaatctgtctggttgatgaaaaaggagagacagagtatgaatggtttaacaatgatgatacttgccgttgcagtgctgggcggtgcgtacctgatctacgggagatatcttgcaaagaaatggggcatcaatccggattccaggacgcccgcttatgagatggaggacggtgtggattacgttccggctgataccaacgtggtattcggtcaccagtttgcgtcgattgccggcgcgggacccatcaacggaccgattcaggcggcgatgttcggctggcttccggtcatgctctggattttgctgggcggcgtgttctttggcgcggtacaggattttgcgtccatgtatgcatctgtgaaaaataagggccgttccatcggctatattatcgaactctatattggaaaactcggcaagcggctgtttctgctgtttacctggctgttttccattctggttgtagcggcgtttgctgacattgtagcgggcaccttcaacggctttgacgccaatggcgccactgtatcagccaacggagcggtcgcaacgacctcgcttctgttcattgcatttgcagtgggactgggcttctacttaaagtatacgaaatttcccaagatgcttaatacgctgtttgcgattgcgcttctcgttctggccgtaggcctgggtctggcatttcctgtctatgtgccgcagagcgcctggctgattttcgtatttatctatgtgattattgcctgtgtgactccggtctgggccctcctgcagccgcgggattacttaaacagttatctgctgattgccatgattgtgggatcggttctgggtatctgcgtgtataatccatccatgaatctgccgtcctttacagccttcaagctgactgcggcaaacggaagcgtctcatatttattcccggcactgttcgttaccattgcctgcggcgctgtatccggctttcattccctggtagcctcgggaacggcttccaaacagattaagaatgaaaaaaatatgcttccggtatcctttggggcgatgctgctagagagtcttctggctattacggcactgattgcggccgggtttgtggccacacaggaagggcttccggcgggaacgccgccgcagctgtttgcacaggccatttccatctttttgacaagcattggacttccggaatccgtttgctatacgctgattaccctggctatttccgcatttgcgctgacaagcctcgattctgtggcacgtgtgggacgtattgcgttccaggaattctttacggatgacagtgttgcaccggaaaatcagaccatgctcaataaggtcctgaccaataaatactttgccacgatcctgacgctggtgctctgctatgcactttcccgtgccggttacgccagtatctggccgctgttcggttccgcgaaccagcttctttccgcgctggccctgatcgcatgcgccgtattcttaaagaagacgaaacgccagggtgccatgctctggggaccaatggtgatcatgcttggcgttacatttacagccctggctttaaagatcacggaactggtaaccgcgctctccggtcagtttgtcttcggcaatgcgctgcagctggtatttgcggtgcttctcctgattctgggcgtgattgtagcctttgaagggattaagaagctgatcggaaaggatgagacagcagagaacgaagaggctgcagggtcaaagaagacggccggaaatgtagttgcctgataacggaaaacgcagctatttcttctctacggcgatccagacttctacaaggccattttctccataatattcaatatctggcgcgtttgatttcattcggccggtgatatatcccctgttcagcggtttgtattgaaatttcggcagccactttgtgattgcctgagcttccgtttttccaattgtttcgaacgtgcaggggaagaccgcccaggttctggccggcacttcataggatgtaaattcaccatccgcctcagtatcgctcgagaccgctatcagataatcaaatatcctcggatcggtggtatcggtattgtaaatattaatgccaaacagtccatggggctctttattggcgcgcggccataaggctttttcatacccgtccgctttgaagctggaccagtggcgggggatcactgttctcccctggcctctttgattggacgtccgcactccatagccgacaacgcggaagctgccttttttctcgattcgaaacggcggttctgtatttttcataattgcagttcctttccttccaataagctattgttaaaatttaagcagttatgtttgcctcattcagcagcagcgtttttacgaatgccctgttttcttcgctgagtaaaaacaggaaggcgctgctgcggcatttttgcaggcgctgcccttttaagacaaagtcgtagcccatgggacaccgggaattgcaggcggcaggatccagcatccgcttgcatacaggcgcatcctgaatggcctttgccactccctccgggatatcgtcgaaaacctccatatagtccgccatgtggttgggatagatgcgggccatcagcccttttttacggaatacgtaattgagtatggtctttttgttcttaagataggaaacgacaaagccgcttttggcctgtctgatctcagccctgcagccgagctttgtcaattcctcatgcagttccctcactaattcctgattgtctttctcgacagtgactaaaaagtcatcatacgtacaggtttcacccatgatccagttcctttctgtgctcttatcgttcctctataatcggtatccatatctgtgctttataagtatcgctggtctgatcaccgtcactgtaccattctaattcaggacagggcgcgtgcttaaagggatattttatcagccattcttcgttaagatagttccagccattgtggatggactgcggtatgcttccccggcagtcaaagacggcccatgaagctttccggatcgcggtttcttcaaagcccggaggcgcttcctgatcgcattccaccataatagaataggtggtctcgtttaattgttcgtcaaaatgagtaaacagcccgaagattcctttattttttccgcgatccagcgaagacagtgccgccagagcaccgtctctttgacattcattccaaaaggccggtatctgtgcgtaatgttcgccgtttctgcaggaaaaagtcctgctttttccgacaagccgaaaggcctctctctgttcgatatgccaggaatactgctgtctgtttgacatctgcattttcggcgcaatttttaattctgtttctttgtcccgcgcctccttgggtgtgacgccatggaattgctgaaaggcttttgtaaatgaggtaggcgaggcgtagccatacttatagctgatatcaaccaccttcaaatccgtgctctttaagtcatacccggccagggtcagttttcttgaacggatatactcggaaaaactgatcccattcatataggaaaataccttctggaagaatccaaaggaacagcccgcgatttccgccaccacgttttcgtctatgggttcttcccgccgctgtaaatgatcttccacataatcgatgattttttttaatttctcattccattccattttgagagctccccgtctttctggttgtctttttattttaccatttataaaaactattttcctcttattattggtactgaacagataatttatgatacagatagacttctttgccattttgtggtatcgtatttttgaacgagcgaatacatttgattaccggaggctgttgaaatagcgatatttcggggcttctttttagatgaaaagcaggaggggttatgagcatcagggtgatagcagtggacaattcagaggaacttctggagaaaattaccagaatcttaaaggagatggatgacgtcgagttttgcggcagctttggcgaagcaattgcggcgattcaatatgtgaaagagaatccggtggacattgtgttttccgatgtggtgatgccggatatcagcggcatcacgctggcagccaagatctatcagcttccggatccgccggaggtcgtgctgctgtcaggaataccgggattttccctggaggcatggaagatccgcgcattcggatttattattaagccgtatacgagagggcagattgtggatatgctgaaccggtaccgctgcgagaaagccgcggaaaaggttctttcataaacgacgagaggagaagacttgcaatggaagcagatattctgttatttatggggcagagcaacatggccggacgcggtgattacagactggcaccggaggtactgccgggagcggcttacgaatacagggcggtgacggaaccggatacgctggtgccgcttacagagccctttggtgtgaatgagaaccgggagggcggagtctttgaacccgggatgaagaccggctccatggcagccgcgtttgtaaatgcgtgttaccggaaaacagggcgtccgattatcgcggtatcgtgttccaaagggggatcgagaatccaggaatggcagccggagactccctactttaaagatgcagccgcaaggtaccaggcatgcttaagctttgtacagtccaggcagatcgctgttcattcgaccggaatggtctggtgccagggctgtacgaatgcggacgatggaatggcaaaggctgagtataaagaaaagacaatggcattttttcaggcggtcaagtcactgggagtcgataagatcttcctgattcagattggaaaccacagagaattccctgaccgttatgttcccatgcaggaggcccaggaagagatcgcggaggagatggaagacgtgattatgacttccaggctgttccgaacattccgcgatcgggggctgatgaaggactccttccattataagcaggaggcgtataatctggtaggagaagaggccggggccagaaccggagaaattttaacaaaagaagcaggtaaaacgaaattataatagaacaggtattacttatgttgattggccaatctccattcccgtggagactggccatacgtttttttaaaggccctggaaaaatgcagctggctgggataacccacacgtgcactgatttccccgatgggaagattggtcgtctccatgtattcgcatgctttagccatccggaaacggatcaggaattcctgaggcgttacggaaagaacatccttgaagattttgccgaaatagcttcggtttaagttgcagaaggcagcgatgtcctctacggtgatgtcattctggtagttgtgttccacaaatgaaacggcttctctggcataaaaatcttttaactgaccgccgaccgctgtcatacggcggttggaggacttaatcagcgcatcgagagccagatagaggtggccgatcaaatggaaggatgactccgtcgtatggccggcgatatagatcatctcgtcttttaagacctgctccatagccggattattgctgttgtagaccggaagatcaaaggacaggccggacagagcgatgatctccggcgcctttaagccgtcgaattccacccacgcgtactcccatggatccagggaatccgcgatgtacgtattggtctggccgggtgaaattaagaagccctggccggcgtgaagatggtattcggtatcttttttgctgctgtcggtggaaattaagagcccctttccggaaatgatatagtgaaacagatagtggttgcgcgccgccggtccgaaggagtggtgcggatcgcatttctcccaaccgtactgaaacagggtacaatcgacgaaatttttatcggtaaacagagcaaacgaaaaattagacaaaaaagcacctcctctccagaaaattctgggaattaattataaacattatataccaaaatgcgaggtgacttcaagatatttcgcacaaggaggcattttggtatatttgtatcagggtatttccatttacggtaagaatagcaatgtgctaatatatagttacagaaacgaagacataactacataatgtgcacaaataaaagaaaaattcattggccgatgaagaagataagatggtaataataacgaaaactcagaatgattcaggattgcaaggaggaaattaaagtgagcagattgtggaaaaaaggtatagcagttaccatggcagcgacgatggcagtatctttaacggcgtgcggcggcggaaattcttcatcaggcggaaataaggaagcaggagaaacccaggctgccgatgcaggcggaaaattaaatgtagcaatttgggataatggccagaaaccggggctgggtcagattcttgccgatttcacgaaggagaccggaatagaggccgatttacaggttattacgtgggacagctactggaccctgttagaggcgggagcctcaggcggcgacatgcctgacgtattctggatgcattccaacgaggcgaccaagtatatgtccaacgatattcttctggatctcacggataaggtggcggccagcgaaaagctggagatggataagttcccgtctgacattaaggaaatgtaccagtacgacggaaagacctatgcggtaccgaaggatatcgacaccattgccttatggtacaacaaggatatgtttgatgaggccggaatcgcctacccggatgatacctggacctgggatgatttatacgacgcggcggtgaagctgacaaaggacgacggaagccagtacggaatcgccatgaacccttccaacgagcaggatggctggatgaacgtgatctactccatgggcggaaatgttatctctgaagacatgaagaaatccggtttcgatgacccgaacaccatcaaggcgatggaatacgtcgataagctggtaaaaaatgcaatgccgccggccgccgttatgtcagagacgggcaccgatgtactgctggggtccggcaagattgccatgctgtcccagggctcctggatggtggctgcatttaaggacaacgaatacatatcccagcactgtgatgtggcagttctccctaaggatgcccagacgggaaaacgtgtttctttatacaacggtctgggatgggcggcaagcgccaacacgaaaaatccggaagcggcgtggaagctgatcgaattcctgggaacgaaggatatgcagttaaagcaggcacagctcggcgttaccatggcagcctacgaaggtgtttcagatgactgggtaaaaaacacggataaattcaatttacagccgtatctggatatgatgaacagcgatatcgtattccgtccgcattccagaagcactctggtatggtggaacatgatgacaaccgagttaaaagaggcatggtcaggcaatcaggagatggatacggtatgtaatacgattgcggaaaaaatggatcagatgctggcagacgagtaaagccccatacgagaaggagggatttctgtggcgaaggaaacagatttaaaaataaaaagaaagattacgagccgggaaaagaacgagtttttatgggggtgggcgtttatcctgccgacgatgatcgggctgattgtactgaacatctatccgattatcaagacgatctatgagagcttcttcaagacaggcgattttggaaaaggcaacattttcatcggcctggccaattaccaaagggtcttaacagacccggaggtatggcagtcgctgcttaataccttcaaatacgccatcgtggaagtaccgttttccatcatcattgcactggttctggccgtgctgctgaaccggaagatgaaggggcgggccgcttaccgtaccatcttcttcctccccatggttgcagcccccgcggcgatcgccatggtgtggagatggctctttaactcggagttcggccttttaaataatgtgttcggtaccagtataaactggatctccaacccgaatatcgccgtctattcgatcggcgtcatcggtgtgtggtccatcatcggctacaacatggtgctgtttttatcgggacttcaggagattccgaaggattactatgaggcgtccaatatcgacggcgcaagcggtatctaccagtttttccatatcaccgttccgcttctgtcacctaccattttcttcgtgacagtgaccagagtgatcggcgcgctgcaggtgtttgacttaatcttcatggtaatggacagaaacaatccggcgctctccaagacgcagtccctggtctacttattctatcagtattcctttgttcagaataacaagggcctcggttccaccatcgttgtagtactgctggcaatcataatggtgatcacagtattccagatgaaggcacagaaaaaatgggtttattataattagagagggggagacgaaacatggaaaaaaagaaaaaagcggcagccatatcgattcacgttgttttgatcctggtaagcattacaatgcttgtgccgtttatctggatggcgctcaccgcatttaagacatcaacagaagcaacttctgtcaatccgttcgtcatcttcccggccgtgtggcagacggataattttaagacggttattgataatatgaatttcctgcagctgtatgtcaacaccatcctgctgatcgttggccgtgtcgcggccgcggttctcacggcgacgatggcggcgtatgcgtttgcaaggctggaatttaagggaaagaacgtcatgttctccctggtattgttccagatgatggtgccgggacagattttcatcattccgcagtacctgatggtgagtaagatggggcttctggataccgtatttgcgctgattttcccgggacttgtgacggcgttcggaacgtttttgctgaggcaggcgtatctggggcttcccaaggatttggaagaggcggcgcgcctggacggctgtaatatcggccagacctttttgtacattatggcgcccctgacacgatccggtatggtggcactcggtatctttaccgcggtatttgcctataaggacttaatgtggcccatgatctgcaacaagacggtgatgccgctgtccgccgcgctggcgaagatgcaggggcagtatacaaacaattatccgcagctgatggcggcctccctgatggcctgtgtgccgatgattgtgatctatttgatattccagaaacagtttattgagggaattgcaacttccggcggaaagctgtaggatagaaaactgcaggataacggctgagggaaaggaatgtgtgaaacgatgaatggattgagtgaagacagtattttcggtcaggtattcggattcctgggaaagatgatcgcgttaaatatcctctggatcgtgacgagtcttcccatagtgacaatcggggcctcgaccacggccatgtattacacggcgcttaagctgcataaggatgaggatgtcacggtctggaaatcatttcttcacagctttaagcagaacttcattcaggcgacagccatctgggctgtgctggccgcagtgggagcccttcttttcatagaaggaagatggcttctcctgtcgggcagcagttcctccatgttcctttcctacggcctgattggtatcgggctgatcgcgggagtgctgctgctttatatatttccggtcatcgctgcattttccaataccctgggaaagctggccggccatgcgttttattttgcttttcataagccgggatacttaatcgccacggcggccattacatgccttcccatgtactttaccatgatggatgcgaagcttttcccggtctatcttctgatctggctcatgtgcgggttttcactgacggcttacggcaatgcatggttttatttgaggctgtttcagccgcaccttaagacggctgaagcaggctcaaacgcttcagacactcttcagccggagagtggacagtaaaggacaacaataatataattcaaggagatcaggttatggctatcattatgaatcaggtggagcaggtaattacactgcagacgaaacggtccacttatcagatgaaagtgggggattacggagttctgcttcatctctattacggcgccagggtggaagactgtacgatggattacctgcttcacaaaaaagatgttggattttccggaaatccctacgatgcgggggaagacagaaccttttcgctggatacgctgccgcaggaatttccttcttatggagtaggggattaccggaacacttgcgtgggtgtgtgccaggcggatgggacacgggctgccgatttccggtatgtctcctgtgagattcgggacggagcacacaaaattccggggctgccctgtctgtttgacgaggacgagaagggagaaactctggtggttttcctggaggatgcagcgtcttccctgaaattggagctgcactacgttgtgtttgcagaacgcgacatcattgcccgttccgccagaattaccaacggaggaaacggtgcggtcaggctggagaagatgatgtcggcctgtctggagctgccgaacggagcatgggaggtgattcatttccacgggcgccacgcgatggaacgcaggctggaacgccttccgctcatgcatggaacgatggaggtgggaagccggagaggaacctccagtcatcagcataatccgggtgtgattatatgttcccctgatacgacagaggaatacggagactgctacggcatgtccctgatttacagcggcaattttacggcggagatcgagcaggatcagatgaattcggtccggttcgtctgcggaattaatccggaatcttttgagtatctgctggagccgggagaagcttttgatacgccccagctcatgatgacctacagtggaagcggactgggccgcatgtcggcgaatttccattccattatccgtcacaatttatgcagaggaaaataccggtttgccaggaggcccatcctcatcaataactgggaggccacctattttgattttaatgaagaaaagatcctttcgattgccagacaggcctcggagctggggattgagatgctggtactggatgacggctggtttggcagccgcgacagcgatgacgcagggctgggcgactggtttgtcaatacagataagctgaagggaggactggctgacctggttcgcggaatcaacggccttggcatgaaattcggcatttggatcgagccggagatggtcaatgaggacagctgtctctaccgggagcatccggactgggccctgacgattccgggcagaaagccttgcagaagcaggaaccagctggtactcgatatgtccagaagtgatgtgagagactatatttttgattcgatttccgcggtcttaaagagcgccaatgtagagtatgtaaaatgggatatgaaccgcagtatctgtgatatctacagcgccgctcttccgaaggagcgccagggagaagtttaccaccgctatgtgttgggagtctatgatctgatggagcgcttcacatcgacatttccggatattctgtttgagggctgcagcggaggcgggggccgttttgatccggcgatcctgtattattcgccgcagatctggtgcagcgatgacacggatggtattgagcgcctggagattcagtacggaacctccttcttctatccggtctcggctgttggatcccacgtttcagcaatacccaaccatcagacggggcggaaaactccccttaagacgcgtggggtggtggccatggccggcagcttcggttatgagatggatttaaatcttttatcaccggatgaaaaagaggtggtgaaggagcaggtggaagattataagaagtattatgacctcattcacaatggagattactaccggctcgtcagtccgcagggagattctgatttcaccgcgtggcagtttgtatccggtgataaggcgaagaccctggttcatgtggtgatcacccatgtgagggccaacgctcctgatctctggtttaagcttcgcggcctcgccccggagaaatgctaccgtctggaggaaaatggccgtatttacagcggcagcgccctgatgaacgcggggatttccattccgatggtgatgggcgattatccggctgtacagatggaactgacggaagtttgaccgtggtgagtgattcgcggctttgtgaatggaattgcaatcaataggatacgcggctgcagaggagacaaaaagcctctgcagccgtttttttgcgtttaccggactctttacaggcggttttgtttttgggctttctttctgtgggacaccggacaggatgtgaactgtaacctgtctgccgggaatagacaggcggaaacaggaaaggatagaaagatagaacgaaatctggtatgataagagcgtaatgccggacaggcgggaaagggctggtgaatgaaatggacagtaataaattcagaattcagatggaggaagaagaaaagaaggagcgtcagtggcgggaaatcgtggactactatagcagccagagggatgccgggagccaggaaaatatcgtggaaatgctgcgggaggtacaggaactgtacggctatatcccgtcggagaagaccggagccatggctgaggcaacaggcgtaaaacagacgcttctccttcagctgatcaagctgtatcccagttttaagaaggcgccttacggtcactgtattacggtctgcacgggggcgcgctgtggtgacaagggttccgcggaagtttttgaggcggttctgaaagctgtggaggcgagagagtccggtgcttttaaaatcgtgatgaaggaatgcttaaagcagtgcaagaccgctccgaatctgatggtggacagtgattcttacggctgtgtaaagccggatgaggtcgcctcaattttgagtaattattgatggatacagcagaaaatatggggctgacgcaccggattcttactgattgcaggcaggagtcaggcgggacagtccctgattttttgcccctttctcatagacgaaccagagtggctatgttataatattaaaatagcgaaaaaagaaccctttttcctgcggaacctatattctaaggagacagatatgaaagaaaaaataaaagtaaaggggcagctgagggcttatatgcagtggccgctgtatttgtcggcgatgctgattatcacaaatgcgataatcggagcggtcagcgtgacagccgggattatcatggctgtgtttacgctgctgtatatcgggatcgctctgtggatctatacctacagaaaaaagcggcttttaaacggcctggtggagttttctgcggaatattcctggatgcagaagcagctgcttaccgacctggagctcccttacgggattgcagatgagagcggacgggtgttatgggggaatactgcgctggcagaagtgctgggtgaggaaaaaccatttaaaaacaccaggaaaaacctgtcatcgatttttccggagatcaccagggaaatcctggatttggaagaagactccgtgatactccactgcacatgtgacgaccgcaagtaccaggtccagttgaaggccgtttatatgaaggattccatcgaggacatagcagatgccatcggtacggaggacgcgggtcagaagctgatcgcggtctatctgtttgatgagacggagattcttacttataagcagatggtcaacgaccagaagatggtggccggcctcatctatctcgataactacgacgaggcgctggagagcgtggaggaggtacgccgttctcttttgaccgcattgatcgaccggaagatcaccaagtacatcaccgcgatgaacggtattgtgaagaaactggaaaaggataagtattttattgcgattaagcagtgttatattcaggagttaaaggataaccgtttttcgatcctggaagatgtgaagacggtgaatattggcaatgagatggcggtaaccttaagtatcggtctcggcatgaacggggagagctacagccagagctatgactatgcccgtatcgccatcgatatggctctgggacgcggcggtgaccaggccgtggtaaaggatggggagcggattcagtattttggcggcaaggcgcagcaggtggagaagactacccgtgtgaaggcccgtgtgaaggctcatgctctccgggaactgatggagacgaaggaccgtcttctgatcatggggcaccgtctgacggatgtggactcctttggcgcagcggtcggtatctaccggatcgccacagccatgaataagaaggctaatattattattaatgaagtgacttcctcggtgaagccgatgatggaccgctttaccggcaacagtgattatccggacgacatttttatgaccggggccagggctgccgaattagtggacaataacaccatcctggtggtggtggatgtaaaccgccccagtatcaccgatgcaccggagcttctgagacttgtgaagaccatcgtggtgctcgatcatcaccgtcagagcagtgagatcattgacaatgcggtgctttcctatgtagagccgtatgcgtcttcggcgtgtgagatggttgcagaggttctgcagtacattgccgatggaatccgtatcaaatcggcggaggccgatgcgatgtatgccggtatcgtcatagacaccaacaattttacaaaccagacgggtgtccgcaccttcgaggccgccgcattcctgcggagaaacggcgccgatgtcgtgcgtgtccgcaagctgttccgcgacgatcttgacgattacaaggccaaggcggaggcggtcagggaggcggagatctttgagggctgttttgcaatcagcacatgtccgtctgagggcattgaaagtcctacggtcgttggggcccaggcggcgaatgagctgcttgatattgccggaattaaggcatccgttgttatgacgttttacaacaacacgatttacttaagcgcccgttccattgacgaggtgaatgttcaggtcatgatggagaagctgggaggcggaggccatcggaccattgcgggagcgcagctgaaggacatgagtcttgaggaagcgagagaccgcgtgaaggaagttatcaaagacatgttagagaagggagatatatcataatggaagtagtattattagaggatgtaaaaacacttggaaaaaaaggtcagattgtcaaggtgaatgacggatacgcgagaaattttattctcccgaaaaaactgggaatcgaagcaactccgaagaacttaaatgatttaaagcttcagaaggcaaatgaggccaggctggcagcagagcagctggctgcggcaaaggagcttgcagctcagcttgaaaagtcatccattacggtttccatcaaagcgggagagggcggaaaggcgtttggttccgtctcttcaaaggagattgcatcagcgatcgcgagccagctttccctggatatcgacaagaagaagctggttcttccggagccgcttaagacgtttggagtacatgaggtcccgatcaagcttcacaaggaagtaaccgggaagcttgcagtcaaggtagtagagagctaggaggcttaagacatggatgatgccctgatcaaacgggtacttcctcacagtgtggaggcggagcagtcggtaatcggttccatgctgatggacagggaagcaattatatcggcttccgagatcataacggcagatgatttctaccagcaccagtatggtgtgatgtttgaatccatggtagagcttttcaatgagaacaggccggtggatttaattacgctccagaaccggttaaaggaaaaggatgtcccgcccgaggtcagcagtcttgacttcgtgcgggacatcatcacgacagttcccacatcggccaatgtaaaatcatatgcaaacattgtgcgggagaaagctgttttacggagactgatcaagatcaacgaggacatagccaacacgtgttacgtaggaaaagagccgctggaaacgatcctggcgacgacagagaagacggtattcgacttactgcagagtcggaattccggcgatttcgtccccatccggcaggtagcgatgaacgttctggaaaagatcgaagaggcctccaaaaaccagggaacggtaacgggaatcccgaccggctttatcgatctggattacaagacatcgggtttacagccctccgactttgttctgatcgccgcccgtccttccatgggaaagacggcgttcgtattgaatctggtcgatcatattgcagtaaaaaaagggctgccgtgcatggtattcagtctggagatgtcgaaggagcagttagtaaaccgtatgctggcgatggagtccaacgtagactcacaaaagcttcgaaccggaacgctgtccgactccgactgggatgcggttgtagaaggaatcggagtcattggcaattcaaagctgatcatagatgacacgccgggtatctcgattatggagctgcggtcaaagtgccgtaagatgaaattagagtatggattaagtgtagtaatcattgactacttacagttaatgagcggaagcggaaaaggcggcggagacaaccgtcagcaggagatctcagagatctcgagatccttaaaagcgctggcgagggagttaagtgcgccggtaatcgcgttatcgcagttaagccgagcgtgtgagacgaggcaggatcatcgtccgatgttgtcagacttacgagagtcaggagcgattgagcaggatgcggacgttgttatgttcctgtatcgagacgattattataataaagatacagatatgccgaatatagctgaggtcattattgccaagcagagaaacggtcccataggaaccgtcaatctggtatggagaccggagtttacgaagttcgcaaacatggccaagcaatgagcaggatagaaaaagaggtatggcccgcgcggaaaacaagctcgcaccatgagtttgttttccgcgcgggccatacctctttttctatggggcgaacgccccccaggaatacgaagcaggaaggttctccaacatgatcggatcagatacagctttcgtagaaccttcctgcttcgtattcctggctcctgcgggctagaatcccctccatcccacccacgcgccgacgggcgccccgccccgtccagcccgtccattcttatcccacctcccttaatctccttctctcccccattgcaattccccccaccccatgctacaatagaatcatattaaatcataccacctcacccagtaatttctaattcatcaatctaaccacccacccactcgtatcttgctacaaatatcccatttaaaaaccatgcaggatatgagcaccactgttcctgcataatgaaaacgaaagagaggaaacttatgcaggagaacaaaatatacaaagaaagtaaactggacaactacgaagaaaagcgaaaaaaggttagtttctttcatctgaccagtgatatatttttcagtaaagtaatggaagatcttcaagcctgtcaggaggtaatacaaattctgacagaacaaaagttaacagtaaaaaaagttaaaacccaatattccatacgaaacatggagaatcgttccgtcatccttgatgtgctggcagaagatgagtccgggcgaattgtcaatattgaaatgcaccctaaggaagatgaagatcacgtccgccgtgtccgttatcatttaagcagcattgatatgagtttcttagaaaaagggacgagttatgacaccatacctgaagtctatttaatctacatcacagaacgggattttatcggggaaaacagaggtattaatgaagtagagcgcatcgtaaaaagaagcggaaaaagaatcgacaacggagttcacgaattgtatgtgaatttttccggaaagaccgacagcgcggagcagcaagaactgctgtcctatatggtaaattcagacagcaactacaaaacagaaacatttcccaatctggtaaagcgagtaaaacttttcaaagaaaagaaggagggaatcaatattatgtgtgatattattgaccgggagagggcggaaggaaaaaccgaaggaaaagcggaaggcaaagccgaagtaattgcactaatccgcaggaaatatcaaaagcaaaacactccggagcaggccgccgaagcgctggaactggaaattgattatgtaagaaaggttatgaatatgattgcagcggatgaagaccagtcaaatgaagccattgccctgcagcttctccgggaagaaatgtagtatgcagcagagaaagattatgaagctcttcaaaaatatttttcagaatgaatcataatccttctcctctccgcataagatataaatagtaagttatgaaactatacgaaccaaaggagaggatatagctatggctgagatacattacttaatatcggacgcatctaaaaaggtggatgtagagtcccacgtacttcgctactgggaggacgagcttgagcttgcgattccaagaaatgagatgggacaccggtattacaccgaagcacacatccgtttattccagcagatcaaggaactgaaggaaaaaggataccagttaaaagccatcaaaacagcgcttgataaaatcatggaagacggaaaagatccggtgataccggacgagcttctggaggaatcagtgacacgggccttaaaagagagtgcggtggtcacggacagcggagacggagagacgggacttgctgaagtacagaacacggcgcaggtaatgatcgcacaggagaaaatggagcagttccaggaaattatgaaccatatcattggacgagccctggaggtcaacaatgaacagctgagccaggacgtcagcagtattgttaatgacaaggtcgtaaaagaactggaatatttgatgcgggtgaaggatgaaaaggaagaagagcggttcaaacagctggacgagcttctccggtcgtatcagaaagataacaaagggcgtgccgaggctgcagcctcgaagatcccgttttttaaccgtaagaagaaattcgggagaaacggaaagaagctttaaagcagcagaaatcccaggataaaaccgtaaagaaccgtaacgaacagaatgataaagcttgtgataaggaagatacagagatgaaaaataaaataactgcaataagcgtatgaaagcggtgtgacttcaatggtcaggccgctttttttgcggccctgcaaatgacatcaaaaaacttccgttctccgatcaataaccatgcttttgaaaatgaatccccccaatgctggttataatattaaaaaagagaaaggacggtctatgcagacatgatgacggatacggaaacccaattggagaaatttaaacagttcctgatcgatgaggaacgtgcagcggctaccattgaaaaatacaggagagatgtacaggcgtttttcacctggctgccggagaaaaccgaggtatcaaaggagatggttcttgaatataagagaaagctggcggcacagtataaatcaaccagtgcgaacagcatgctggtggcattaaaccgttttttcggcttctgcggaaggcgcgatctccaggtcaggctgttaaaggtccagcgtgtctcatttcgggaacgaagcagggaaatgagtgtggaggaatataagcggctggtccgggcggccagggagaagaaggacgagaggctcagcctgttgattcagactctttgcagtaccggaatccgggtcagcgaacaccgctgtataaccgtagaggcacttcgcagcggaagtatctgtattgacggtaagggaaaagaacgggcggtctttctgccgaaaaaactgcagaagcagctgaaacattactgtaaggagagaaaaataacgacaggccccgtttttatcacaaagagcggaaaaccgctgaaccgatgcaatatctgggctgagatgaaggcgctgtgcaaaaatgccggaattgaaccgcagaaagtgtttccccataatctgcgccatctgtttgcgctgacgtattacaggcttgaaaaagatatcgtcaggcttgcggatattctggggcatgccaatattgagacaaccaggatttatacctccacgacagaagaagaatgtctccgttccctgtcccggatgaagctgctcctgtaacgcgcaaaaaaatatcacataatcgatattatgtgataacaggcatacctgacaggctgctacataatccattatgaaccaaaagaacgcgttttgcaataacaagttgtatggaagcttccataataaaacacaaaaatgaatccggatccaatggaattgtttgacgacccagactctctctgttttggtgtgcttttttatattatgattgggttatgagccatatatcagtccggtccatctgcaggcggcccgattccttatcacataatatcgattatgtaacacgatggacgagaaatacgtcagataaggagggggaatttgtttcatatagtaatagaggtaaacggaatgccgccgcagccggatcagcagcctccagatccgcagcaggcgaatctgcagcagaatatcgactttatgaattacagcagaagtatttacgaaatccgccagacgcttctgaaaaagcaggaaaaagagcataatatgcttgagtacaacgggaaagagacagaaaaacacagatgatttttagctgccggacgttcagtccggcagtatttattcctgtaattttattctcggatcatttcccggtctgtcattaaattttatcaatacctgtttttgcactttgtatagtgcaaaaatacaatttgaatacttttatctaaaagactatactgtgatttgtcagggaggtgcagaatatgacaaccgtattagattgtattgaaaggattcctaaaagtctgaaaggaatcagagacagttatccggagcgcacgaagaatattgcggattatctgtcagggagaggaataaagaaagttggacggcttgtttttattgccagcggttcttcttacaacagcgcccatacggcgaagctgtttattaaaaatcagtgcgggatcgagacggaatttaagtatcccaatattttcgttcattatgaagccgatacggaactgagccgtgaggcaaaggatctggaatcgacggtatatgtggtgatttcccagggaggcgagaccaagcttgtttatcaggctctggagaagatccggaatgcaggcagaccctgtatggcgatcactgcagatgaggaggcttccattgcaaagatggcggatatccacctggacatgggatgcgggcaggaagaattcatgtaccgtaccatcgggttttccacatcggcggccgtctgtatgatgctgggacttgccgcaggtgtctataacggaacggttaccgccaaagaggaggcagaatatcaaagagattttgacgccatgattcagaatcttcccgccgtggaagcggcaacggagagctggtatcaggctcacaaattttcactgttaagaagaagcaaaatgatgatggccggaaccggagatctgtatccaatcgtaaatgaaggggatattaagattatggagatggttcccatgatgaccaggagctttgagctggaagaatttattcacggccctcagaactcttttgacgatgccacactcttccttattttacatcacaagggagaggatgatgggaaggcgaaggcgattgcccgcttcatcaaggaacagatcggcttctgtgccctggtaggcgaggaaccgctggaggagcgggatctattcatcagtccggccagccgttacttcttcggactggaatacgtgaccgtgttccaggttctggcataccgaatggcggatgaccgcggaagagatttacacagaggcgtcaacgcggtagtcagcaagtacatcacaaaaacattgtaaaacagagtgaaaaatggtaaaaacataacggcagagcagtaaaggaggaaataaaatgaaacgaatgctcatcgcggcccacgcaagatttgcggatggcctggaaagcgcgctgtccctgattatgggaaagcgggaagacatcacctgtattaacgcatttgtcacggaaacacctctggaaacacagatagacgactatgcggcatctcttggagaggaagaccaggttctggtgatcacggatgcatttttcggtagtgtgaaccagaaaatcatgggaaaacggctgaaaaacagcctgatcgtcaccggggccaatctgcctctggtgctggaactcgtcactttgctggatggggacgccccgatcacagcggatcagctgaagaacacagtggctctggccagagaacagcttatggttgtggaaatggaagacgccgtcgattcctcagatgactttgatttctaagataagggagatatcgatatgatagtaaaattaagaattgatgacagacttctgcacggccaggtagcttacagctggaaatcggcgctcagctataacgccatcgtaatcgccagcgacgcggctgcggcagatgagtttcggaagggcgtgatcaagatgtgctgcccggaaggcgtgaagctggccaccagaagcgtggaagaagcggcgaaactgatcaataacccgaaactgaaggatatgaaggtatttgcaatctgtggtagtccggccgatgccaacggccttttaaagaaactggaggagaagccggtagttaatctgggaggcattcagatggcggacggtaagaagctgttttccaaggccgtctatgtggatgaagaggacttaaggaacttagatgagatcgcggccgcgggctataccatcgaggttcaggaagtgccatccacggcaatggcaaagtatgcggacttacgtaagaaattctaaaaagggggaaatgaaattatgcaggcagcaatcttagttggactcgcaatggcagtattgtggttcctggaaaaattaggcggtacacctatggtgatccggccgatcgtggtgtcgccggtgatcggcgcactgctgggagatttacagaccggtgtcatggtcggggctactctggaactggtatttatgggcgcgattcagatcggagccgcggttccgccggacgtactggtcggcgcaggactcggtacggcgtttgcaatccagtccggacagggcgccgatattgctctggcactggcgcttccaatcgctattctggcccagtcattgaaggttatcgtgtttattattcgaagctggtttatggatcttgccatgaaactggcagaggcaggggacatcaagaagatgcacgccttaaatatcggcggacttctgcttcagtgctttatgtatttcgtagtaggctttgtggctctgctcttcggttcaccggcggttgaggcatttgtaaacaatattccgcaggtgatcttaaatggtctctctgtagcgggcggactccttccggcagtcggttttgcactgcttctgcttccgatgatggagaaacgcaatgcgatttacttcgtatttggatttattctgatttcctatttgaatctgccgatcatggcggttaccatcatcggtgtcgtgctggcgtttgtcatctgctatgaaagaggcgcgggaggaaatgtgacagcggcggcagccgtaagttcagaggaagaggaggatttgttcgatgagtaagcaaaaaatgtctgctgaagacaaaaaaatggtcaatggcctgttctggaattcattcctgctggaggcctcctataactacgaaagacagcaggccctgggcttctccgtggggatgtggccggccatcaagcgtttctataaaacaaaagaaggacaggcggaagccttaaaacgccatatggcgatcttcaacaccacacctcatatggtatccgtcatcagcggcgttacagcagccatggaaaaggaagccagtgagaacaaggactttgacaaggatatcatcaataacgtaaaggtcggcctcatgggaccgctggccggaatcggcgattccttcttctggggcacactgagaatcatcgccgcgggcatcggcttatcccttgcacagcagggaagcgttctgggtgcgattctgttcttaattattttcaacgttccgcatctgctgatccgttactacggcactgtgctgggctatcagttcggcgcgggcttaatgagcaacacgaagagcgcaggcatcttaaagatgatttccaagggcgcatcaatcgtcggtcttatggtaatcggcgccatgagtgcctccatggttgcgatgaagactccgcttacctttaccatcggggagacggcatttgaactgcagggatacttagatcagattttcccgctcctgcttccgcttttgtacaccctggcgatgtttggcctcttgaaaaaaggctgcaaatcaactacaatcttattaattactattgcagtaggtgtgatcggttctcttcttcacatcctttaatcctggcaggtttggaaaggtcagaaattcatggttgaggcaagaaccagatatgttatcatgataaaaacaatgttaggcaggaaaacgtacgtgacctcggctgctctcgcagaagcagccggggtttctgtgcgcacggtaaagtatgacttaaaggagcttcagagcttcttaaaggagtatggcgtggagatcgaatcgaaacgttcttacggctaccgcctgctggtgggagacggctccgacatggaggggctgtcgaaggcgcttcgggccaatctgcggaaacataagggagaggtgttccgctataattttcagagggtgatctatatcatcaacaagctgctgatcggaaagccgtactataaggcggaggagctgatggatacgttttacatcagccgttcgacgctcacccaggacttaaaccgcgcccggacccttcttgcaaagttccgcctggaaattgacgtgaacctgcgccggggaatcggcgtcaccggtgatgagctggataagcgcctctgtatagcagaatacttcttccggtacgatgataagctgcaggttatggtgcagaggcgggctgacggcgggaagtatgactgggatgcccagagggacactcttgtccgtatcgtctgggaggcatgccgtgccaataagatccggctgtcgccgtttctggccgtggatctggccagtcacatgtatgtcagtgtgctgcgcatgaaggcaggctgcggcatcggggagctgccgggccataccatgacagtggaatatgtgagggagcggtacgcggcaggggaggtcgcggatcagctggaaaaactctattccgtatcgatttcagagaaagagcgggagtattttgccctccatatactgagtaagaaaatgccggacagcgggcctgtgggctccggagagcacgccacgttaaagcagtgtgtgacggaaatcatgcgggaggtaaaggataactttgaactggattttaccaatgatcccgtgtttctcgattttttatattccagcattgaacctatggtcttaaggctcagaacgcatctgattgtcagaaatccgcttctgtttgagaatctgcgccgttatttatttgccaccaaggtggcccactcggccagcggaatcatagaaaagctgtttggcgttcagatggacaataatgagtttgcctatctggtgcctgcattcaacatgatcatcagtacccatgagaagcggaagaagtttaagatcggattctgcggtgacttggggctctcggaggctctgatctactataatgagctttcggagagtcttcccagggatggctatgaactggtgtggctggacagataccacaataccggttatttaaaccagctccagtatctgatctacgtcagtgactaccgtcttccgtcagagctgccgtattatgagatacaggacggggattccaccagtgaggtctgcagtgcaattgcggaatataagctggagcaggtacagatagaacagtatttaaagccggaattcggcatattcggtctggaggggaaaagccgggaagaggtcatggagaacttataccgctgtctggccgcccgcggcctgattgccacggagctggactggaaaaatgcattccgggccaatgaggtgggcaatgggatcgcccatattcaggacctgggaaggattcttaagaatgccggctgttacgtctgcatcttaaaaacacctatcctgtgggagcaggatatcataaaagtactggtgatgatcaagacaaagcgggatggagacaagaatttgtccctgctctgccgcatcgtctccaattgggcatcatcgccggaaaaggtggaacattttctgaaatcgcagagctatgatgtgttctgcggggatattaagtcggaatgcctgaacatatgcttccattccatcatctgatgaagccgggctgcggacccgtgtggtgcagatacggggacggatgcagctgcaacatataatatctatgaaaagagtgattgttatgaaggaattaacacaagcaaatcagacttataaaggaatcatattcacggccgtatcagccgtcatatttggatttacccctgttctggcaaggatttcctacgacggcggagcgaatgggatcacgatgacattcctgcgctgtttcctgtccctgcccgtactgttcctgatcctgaagataaaagggattccgctcagggtggaaaaggcgtggagaatgcctgtgtccgtatgcggcgtgttcggggcttttgcaactacggtgacgctttatatgtcctattcatacatacctgtgggaatggcgactacgctccatttcgtgtatcctgtgctggtgactgtgggctgcgtcctgatttttaaggaagggatcacggtaaaaaaggtgctggctctgctctgcggagccgccggcaccctgttgtttctggaaaatttttctgcgggctcgggcagcggcgcaggaatctttctggcacttctgtccggcctgttctacagtgttcatatgattgtcatggataaatccgggatcaagaacatgtactactttaagctgtccttctatctctgcctgttcggcgctgtcctgtcgggaatctatggaggagtgacaggacagctgacgctccatctgaccggccaggcctggttcttcgcctttctggtgtccctctgtacctctgtgggcgcgatcagcttattccagctgggaatccggtatacgggtgccgtggcggcagcgatcctctctaccctggagccgatcacaagtgtgattctgggcgtcctggttttaggagagctgtttaccacgagaaagatcgcaggctgtgtctgcattctgttcagcgtggtgctgattgcggcagcgggaaagaagcgctagcgtgcgccggcggcctttgcaaacgcggcgaagagcctggaagcggcttcattcttctcccataagtattccggatgccactggacgccgatgaaaaacggataatccggcatttccaccgcctcgaccaggcggtcggaggagaaggccgaggcggtgaggctgggagccacgtcctttacggcctggtgatgcatactgttgaccgaaagcgtctccgcccccgtgatctctgccagccggctgcccggtttgactgtcacggtgtgggacggaagcgtgtaggcgaacggctgtgtatgcgccagcgggaagtcgctggttacctggctgggaatatcctgccagatggtaccgcccagaccgatatttagcagctgtacgccgcggcagataccgagaatgggcttgcctgtctccataaccaggggaaggagcgcaagctccatctgatccctttccgtggaaacactgccgcagtgatccagcgtctcttccccaaagaggaaggggtggacatccgggcctccggtaaagagaaacccgtctaacgtgtccacaagctgctttaaatcttcctcagacgaggtcagcggaagcaccacgggaatggcgccggcggctgtgaccgcctttaagtaggtggggcgcatctgaatgtcatgattatctgtgttgtgtgagggagtaagcccgatcagtggttttttcatggagatacctcgattcatctgattttgtttttatcaatattcttatctgcccgcggttctttgacggaaccgcgttcttcttacttattctattggtactcctttgattttagtatctgcatgcgaaaatgtcaaacagagagtggtgctaaaatatcgataagatacggtcgcatcgcttgcttaatgaaacgtatctaccgtataatcatggtaatgaaatcccagccatcgtccgggcatgtctccgggaaaacggggagcggggatggagataaaagcatcggaagtgtccgtgccgctgtcaggccttaacacctggggagcggttttctttacgtggctgattaataaggtccatagccgttccctgcattttgcgtattccggatcatccgccagattatggcgttccatgggatccgtctccagatcaaacagcagcaggctgctgccgattctcgtgtaaattagttttttccggttttccatcacacagaaatttgtatgaaggctgtccccatagaaaattctttcatcctgtctttttccgccgatccacttcaacaggttttctccgcgtttctccttcggagacgggagtcccgccatggccagtacagtgggaaatacgtctgccagtgtgatcacacggtcgatccggttgttatggacaatcccacgtccggccggagggacgatgatgaacggcacgtgggcggagccctcaaaaaacagattcttttgggacatgtaatggtctcccagcatttctccgtgatccgaggtaaataaaatccaggtattttccaaaaggccgttttcccttaacgcgccgaacaggcggcccagctggtaatccacctgtgtgatgcaagcgtagtatgccctgcggctggcagcgatctgttcggggccgaagagatgcatatccgtattttcataagaaccggccaggaatccctggggagtgccttccagagtccgggaccagtcaccgtataccggttccggcatgggaatctgccggtacagttcccagaaatcccggcagggatcgaaagggggatggggctttgtaaagctggtccacaggaagaacgggcgcaggggatctctggtctcgatgaaatcgatggcctcatccccaatccaggtggtcatgctgtccctgacatcgacggtggaaatcacgggctccatgagacattcgccgacaccgtggactttgggacgtatgcggtcgccccttttgtcgcaggagcgcatgtagtctaagggcagggacatctgctcgaagccgtagcaggccctggccggttcaaagtgcatctttccttttgcacacgtctgatatccggcatcggtcagcacagccgggagcgtcagccgtcctgctgtctgcgcttccataaaagcccggtgatccgcgttggatacgacgccgctttcgtatccgtcaattcctgtcatgatggtggtcctggagggcacgcagatggggcaggaggcgtaacagctggtaaagctggttcccatggcagccatataatttatgtgcggcgtaaaaatactctggttcccccaggcgtttatggtatcgaaacgctgctggtccgtggtgatcagcagaatattgtcccgtgcgtctgactgcatttgtcttcgttcatccattattctttcttcctctctttcggtgctgcgttcgtttcatctctgtgttcagtataaaaaatacagaggggattgtctatctcagaaacgttagatataccggtaaaaaggtgagatgaaaaatcacggagggaatgaaaataataaaaaatacatgtacaatatgcacaaaagtgagactcaaaaatttcaataatacctaagatttacaggatactatataagaaatcatagatagaaaagtaaaaatgcatagattataatgttttttagatatgacaaagaacaatgaaaaagaaaaaggaggcatattttatggcagatatgaaaaagaggccggggaaaaagcggaagtggaacagggacgatacggagttaaccatactggcatttccaaccgcagtctggtatatactgttctcgtttttgcccatgtttggtattgtgattgcatttaaaaagtataccattaacgggggatttctgcacagcattctaaccagcgcctggtgcgggctggacaacttcaaattcctgttttcatccggggatatctggatgatactcagaaacaccattctctataatatcaccttcattatcttaaacattgtggttcccgtgaccatggcgctgttaatcggacagcttcacaaccagcgcatggcgaaggtatttcaaacggccatgtttctgccgtattttctgtcctgggtggttgtaacggcgctggtatgggcgtttttaagttttgacaaaggaatgttaaataacctgatggaagggctcggtcaggaccccagacagtggtacatggttccgaagctgtggcctggctttttgattttcatgtatctctggaagaatctggggtacagcatggtcgtgtatcttgccaccattaccggaatcgataaaacgtattatgaggcggcctgcatcgacggggccagcgtgtggcagcagatgaaatgggtgacgcttccactgatgcggacagtcattatcatgatgtttattatggctgtcggccgtattttctactctgatttcggcctgttctatcaggtgcccagagactcgaattccctgtataacgtgacgtatacactggatgtatttgtatacaaacagctcatgtcgtccaccacgggaatggcgtcggcagccgccttcgtccagtccgttgccggctgcatcaccattcttgcggccaatgcggttgtgcgaaatgttgaccgggaaagcgccatgatttagcagggaagactgtataacaagaagactcagccatgataaaggaggaatactatgtcaaaaaaacagaaagaagcagccgatgtacagaatttcaacaggatatccagaagggcgaatattctgctgaatatcatgtttctgattctggccctgatctgcgtgataccggcggtgctggtggtgtcgatctctttctccgcggagcagtccattaccgattacggctaccgcctgattccaaagattatatccctggatggatacggctacctgctgaagcagggggcgttaatcatcagggcgctgggcgtgtccctgtttgttacgattgtgggaaccgtccttggaacgcttctcaccacactgatgggttatgttttatccagaccggactacaaactgaatggatttctgaccatgctggttttcattcctatggtatttaacggaggcctggtttctacatacttcatcgtatcccagtttctgcatttaaagaatactttgtgggcgctgatcctgcccctgtcggtatcttcctttaatgtggtcatatgcaggacgtttttcaagacgaccataccggaggaactgatcgaatcggctaaaatggatggggcgacgcagtttaagatattctttcagatcgtgcttcccatctccctgccggttattgcaaccattggactgtttctgtgctttgcctactggaacgactggtaccagtccatgctgtatatagacaaccagcgtctctattccctgcaggcgcttttgaatgccattatgaccaacatcaacatgctggcgcagaatgccgccaccatgggagcaagtatggcggatttggtggcaaatatgccgaaggaagcggcccgcatggcgattgtggttatcatcgtactgccgatcgcatgtgcgtatccgtttttccagaaatactttatctccggtctgacggtgggagccgtcaaagggtgattgcagccggaggtttacaacttgcttatcaggcgggattcccgttgataatagaataatcaggaaagaagaggattgtttatgaagaaaacagatgtatggaaaaaagcggcggcggccggtttagccgggctgctggcagtcggcacaatgaccggctgttcagcgaagacggataccaaagaagcggaggctcctgcgggagacactgcacaaaaagacggggcggccgcaaaggacacggcggccggtacggcagatggagacattccgactctggtatactggacggtgggaggaaccacacccagcgattttgaccaggatatggacgcgatcaatgagtatctggcggaaaagattcacgtaaagctggatttgaaagtggccggctggggcgattatgagaagaagatgaataccattatcaactcgggcgagtatttcgacatgatgtttgtaaataacacgaattacagccgttttgtgaaaatgggcgcgtttgaagatatatccgataagctgcagtccacggcgccggagctttacgagatgattcctgaacagctctggaagggcgtgaccatcggaggcaaggtctattcggtaccgacctataaggattcctccatggcacagttctggtattttgacgaccagtatgtgcagaaatatcacattgatgttaataatatcaggacgatgcaggatctggataaaccgttccgcgacatgaaggagggagagggcaaaggcttttatccgcttcagatgtcacagggcagcccgttcaatggtttctttaatgagtatgacggcctgaccgccggtctgcagcctctcggagtgaaggtggatgatcagaccagaacggtaatctgtacactggaacagccggatattatggagaacttaaagctgcttcaccagtggtatcaggatggcatcatcaatccggatgccaatgttctgactgagccgcagaagaagctcccgtttgcttccgcacagggctggtccagcgcggttgcgacatggcaggtattaaacggtgtggagaagtatgacgcgtttaaggtattcggtcctctctattccaccgataccatccagggctccatgaatgccgtttccattaattccaagtataaggacgagtgcttaaaattcctgcagcttgtaaatacagactccaaactgcgcgatatgctggcatacggagtgccggataagacgtttgtatatgtgggagacggcgtgataaagaagcagacggatacatggccgctggcggcgtatacacagggaaccttcttcaacatgtccatcacggaggatgcggacccggatcagtgggatcaggtaaagaagcagaatgaagaggcggtttcctcctcctgcctgggcttctctcttgatttgaccaatatccagaatgagatgtccaactgtctgaccgtgtggcagaagtataaatacgacttattaaccggagcttccgatccggagaccgcggttccggccgtgattcaggaattaaaggccgcaggcttcgacacggttgttcaggaagcccagaaacagattaatgaattttataactaaatgaccaatataggacagaccggatgcggataaaggcatctgcttgtgaatcgcagataacgactgtataataaatgagatcgacagaaaacaagtacgaacggacagagggaaaagcttatgaaaaagacatcgggttcattcttgaaaatcagcgtatacagaaggcgttttacaggcacggtctgttctgttatatttatagccctgttttgcctgatctttgcactctgcttttttacgaccatatgggcggacaaccggtggcaggaggtgcagtccggctttatgacgctggagcagcagaagagagaccgggcggaacagctggaaaattatgtgaacggcatctatgcgaaggcgagtctgatggaggatacaaagactctgtttgaaagcatcaccagccaggattataccaaccgcagagaggaaaacagcgcgcgttccagcatgcagatcgcatggctgcccggcgacatgcggaagctgtttgtaaacagccagctaaaggtaaatgcagtcacgatacggtcacccgaggggttaaaggtgatatggctggacaataattccggaaatatgcgggtgagctacgggatcaagggagaatggcaggtgctggacagaccggaaagtgacacggtgctggaatcctttgaggtgagaaatccggaatccattatgaagaatctcggaacgatgactttttacggctcctccaaagatctgtataaaggcagcagccaggcgtatgactgggctctgatgaaagggaacatgacggtttatgagcatgtgaagggagaacgggagagggaatggattctgactgcgtctggaaaggaggcttttcagggctggtttctgtggaacgggaggctgcctgtattctattatgaattcgtcaactcctccggtgacagtgaatacatatcggctgtggacatcgtttcgctgtggcgcgccaacggggagggagccgcgacgctggcggtaaccgtcctggtgctggcggcgggggctgttatcattacctttttcaatctgcagggggaggcgcggttcctctcccatattatggatatgcttaagaccatggagcacggttcttttatagaggtgggaaccatggccttaaagcggggcggccattacaatgagtacacgatgattgccgacgcattgtcagaggtgagtgtcaagctggatgaatacatccgaaaggagtatttgctgaagctgaagcagcaggagacggccatgagggcactgcgccatcagatcaatccgcattttctctataatacactggaaagcatcagggccagggcgcttattttgaaggacagggagacggccgaggccatcgaggggctgggccggctttaccggacgctgatccgctgcccggaggtcatacccctgaagaaagaggccgggcttctggagatgtatttaaagcttatggccctccggtttaaggatacctttgtataccgggttgatattgaagaggaggcgggagaggtggaaaccatcgcgttctggctccagcctctggctgagaatttctttaaccacggcatggaccgggagagtgaatttaatcttctgatgctggaggcggtgaagaaagagggcggaatcctcgttaccatgtcggacaacggcctggggattccgaaggaccggcttctggaaatcagaaaaaatatggtggagggcggagatgatcccggagctgacatcgggctgcgcaatgtctacatgaggctcaattatttttatggagaggccttcaccatgaatattgaaaatcaggaggcaggcggactgaaaatagatattttccttccaacgctgccgggaaaggagcaggccgcatggttacagttctgattgtagatgatgagcccaatgtcctggaaggggtaaagcgtcttctggactgggagaaattaggcgtggggcggatttggactgcgaaaacctctctggaagtcatgtcgcgcatcatagactggaatccggatatctgtctggtggatgtcagaatcggcaatgacatgggatatgagctgatcgagtgcttaaatggccttggtatccattccaactacatcatgatgagcggatacgatgattttcattatgtaagagaggccctccgctgcggagcgctggactatttgctgaagccggtgggagccggggagctggaggcgtgcatccgcaaggtgatcgtggaacagctccacgggacgctgccggaagcggagcagaaaaactgcgaccctatcttaaagatcgagtacgaggccatgtcgcctctgatccataagattgtcctgatggtggcggcggagtacggcggccatatctcactaaagatcatagccgataagttccgcatgaattccacctatctgggtcagatctttataaaggaaacgggaatgaagttttcagaatacttaatgtgttaccggctttccatggccagggagcagatcgtgaacagcgatgagaaaatagcagtgatcgcatcctccgtgggttacacaaatatgaattatttttatcagcaatttaatcaatattaccataccaccccgtccgagatgagaatacggggctcagaaaggaattgacatatgatttttgcaagggagagggcggaggtaatcgccgacaagctgaagaaattaatggttgtccggaaattcgaactggacagctggcaggtaaaggaaggcttttttttgcggccggaggaggccgaccgggcggcggaaagctgggaaccgtttgacagccgtctgatgcactggtacgggccggaccgccattactggtttcggaccgtatttactgttccggaggagtatggcggaaaaggcttatggcttcggatcaggactcagattgaggagtgggacgacgccaagaatccgcagtttctggtatttatcaacggagaggcggttcagggagccgatatgaaccacagggaggtcctccttgaccgggcggcgacagcgggagatacggtgacggttgatctgcaggcgtattcggggacgctccatccggaatttcgcctgattgcggatatagaggaaatctcggaaccggtgaaagacctttactacgatatacaggttccgttatgggccatggaccggatggaccagaaagggaagacggccattgatatcctgaccgtattaaatgataccatcagccttctggatttgcgggacgtctattctgacgaattttaccgttccgtggaggaggcgcgggcctatattggaaaggcgctgtatgaggacctggcgggcgatgatacggtgattgccacctgcatcggacacacccacatcgatgtggcatggtggtggaccgtggcccagtcccgggaaaaagcggcccgcagcttcgccacggtattgaagctgatggatgaatatccggagtaccggtttatgtccagccagccggtactctacacgtttgtgaaggaacggtatccggagctctatgcggagattcagaggagggctctggaaggacggtgggagccggaaggcggcatgtggctggaggccgactgtaatttaaccagcggagagagtctggtgcgccagtttttatacggcaaacggtttttcatggaggaattcggcgtggacagccgggtcctgtggctgcctgacgtattcggctattccggtgcgctgccgcagatcatgaagaaatgcgggatcgattatttcatgacgacgaagctgtcctggaaccagttcaacaaggttcctgacgacacgcttttgtgggaagggatcgacgggacaaaggtattgactcattttatctctactctgggtgtgggacagagcgtggaacgcttctttaccacatataacggaatcctgcatccggatgccattatgggcggctggcagcgctatcagaataaggagatgaacaacgatattttaatcgcctacggctacggcgacggaggcggcggccctaccagggagatgctggagacgggcaggcggatggaaaagggaatccgcggcgtcccgaaggtgcgtcaggaaagttcccttacctactttacggagcttgaagatcgggtgaaggacagcagacggcttcccgtgtgggtcggagagttctattttgaataccacaggggaacgtacacctccatggcccggaacaagcggtccaacagaaagagcgagctgcttctcatggatctggagctgctgtccgtgctggcagagaaaaagggcatggcctacccgaaggaggaactggaacggctgtggaaaatggtcctgctaaaccagttccacgatattctcccgggatcttcgattaaggaagtctacgaggtgacgaagagagagtatgaacagatcgcagaggagggaagtgcgctgctgaaagcacgggaggaagccgtggcaggagcaggagacggtgtgaccgtattcaatactctgggatttccgcgcagcagcctgacgatccttccggccggagtgacggcgttgacgaatcagggtgacgtgctgccgagccaggagatcgggggcgtgcggtactcccttacgggggagattccatccaagggatacgcggtgtacggcgcggcggaacatggcgtttcggacagcggaaagacagagccgttctccgtattaaagactgcagagggcctcagtatcaccacgccgtttgcaaacgtggatatggctgcggatggaagctttacaagccttttcgatctgacagccggccgtcaggtgctgaaagagaacgaagcggggaaccgcctgcgggtatacgaggataagcccatttactacgataactgggatattgacgtattctatacagaaaaatactgggatctcgatgagccggcgtcagttgaagttacctctgtggggccgctgtgccttcagattacggtgaagcgcagcttcatgcattcccgcatgacgcaggacattcgcttctacgcccacagtcccagaattgattttgtcacatgggtggactggagggagcaccagtatctgctaaaggccggattcccggcagatgtacacacggatgaggcggcgtttgacatccagttcggcaatgtggtgagaaaaactcataccaacaccagctgggacagggcgcggtttgaaagctgcggccataagtggatggacgtgtcggaaggcggatatggcgtcagcctgctgaatgactgcaagtacggccattccgtccgcggaggccggctggaactgacgctgatcaagtcgggtatcgaaccgaatcctgacacggataacgaggagcacgtctttacctactcgctctatccgcatcagggaacgtggaaggaagcggacacccagaaggaggctgcggatttaaatcagccgcttctcgcagtgaacggcggcgtgcccgggaaaacttacagctttgcgggcgtggagggagattccgttgtcctggagaccgtgaagaggagcgaggacggaagcggcgttatcctgcgcctctatgaaagcaggaatcagagggtgaatgcgaaagtgaaccttttttgtacaccggcgaaggtcatggaatgcagtctgctggaagagccggacgacggatcgtgtggtgtcagaatggagcagaatggctttgcatttaccatcaggccatacgagattaagacttttaaggtggtgttttaagcgatgaaagtaattctgtttgatatcgatacgctcagagccgatcatatgggctgctatggctacggaaggaataccacgcccgtgatggatcagattgcgaaggagggggtgtgctttgagcggtactactgccccaatgccccctgccttccctccagggcctccatggtgaccggactctacggaatccatagcgggatcgtgggtcatggcggtacggctgcggatttacgccttcagggggagacgcggagctttacggatcaggtgtcggagaacgggctctttatgcagtttaaaagggccggatttcacacggtttcattttccagttttgcggaacgccactcggcctggtggtttctctcgggcctggatgaatattacaatccggggcttaggggaggggaatccgccgagatggttacaccgaaggttatagagtggctggagcggaaccgggagaaggatgactggttccttcacgtccattactgggatccgcatacgccgtaccgtaccccggagggagaaaaaagcaggtttcaggatgagcctctgccggatgactggatcacagatcagatattttgtgagcatctgcgccacatcggcccccacggcgctaatgagatcaatatgtggaatgatgagacgttttccagatggccaaagcatccgggcagcttaaagacgaaagacgaggcaaagcatttcattgacctttacgatgacagcgttaagtttaccgatgacaatattggtctgatcacgtcgtggcttaaggaacacggactttacggagaagatctggccattatcattaccgcggaccacggagaggatctgggagaattcggggtctatggggaacacggcatggcagatgagccggtctgccatatccccctgattatcaaatggcctggagcagagggaggacgccgtgtttcggggctgtatgacaacacggatttacttcctacggtgaaggatcttttaggtacagagacgtccggggattaccggtatgacggagcctcctttaaggaagcgctattcggcgggaaagacggcgggaagccttatgcggtgctgacccagtgtgcccacgtctgccagcgcagcgtccggtttgaccattatctctacatccgtaccatccacggcgggtatcaccttctgccggaggagatggtgtttgatctggacagcgatccccatcagctgtataatctggttaaagaacggccggagctttgtgaccgcggagcgcggatgatattagactggacggaccggatgatgaagcagtcagattcggatcaggatcccttatggactgtgatgcgggaaggtggtccggagcactgcagaggccgtctggagtcttatgtggagcggcttaaggagaccggaagggcatacgggataccgcttcttgagaaacagtacagcagcgaatggaaacaccgaaaaagaagaggagaagacagatgaatctaataccgcagccgaaaaaggctgaaagaagagagggagagtttacaataggctatgggagctttcttgtgctggaagagtcctgcggaccgcttctgacaaggcaggcagggctttttttggaggctttggaaggcgtgattggttaccggccggctctgaccagagggaagggcagaggcggggacatgatcctgcgtcagaacgatgcgccgggccagggatataccctggaaatccggccggaagaggtggttatcaccggcggagagaaggggctctggcacggaatgcagacgcttctgcagatagcggggcagcagggggccgtgcttccggccatgagtatctgcgatgagccggatatcgaaaaccgcggattttaccatgatgtcacaagaggaagagtaccgaagctgacctggctgaaaaagctggctgaccggatggccttttataagctgaaccagatgcagctctatattgagcacacatttctgttccgtgatttcagtgaaatctggagagatgacacgccgctgactgcggaagagatcctggaactggaccggtactgtctggagcggggcatagagctggttccatcactgtccaccttcggacacctttataaggtgctgggctcgaagcattacagccacctgtgtgaactggagggctctgaggccatgcctttttctctgagaggacgtatgcaccaccacaccatcaatgtgtcttctccggagagcgccggttttattaagggaaagatccgggaatttgcagccctgttctcctccggacaattcaacatctgtgccgatgagaccttcgatctgggaaagggaaggagcagtggacggaaggaggagctgggggttcacagactttatattgattacgtaaaggagttatgtgagttcgtgatttcctgcggtaagcggcccatgttctggggcgacgtcattaccggagcgccggagcttttaaaggagcttccggctggtaccgtctgcttaaactggggatatgcgaaagatcagagggaggatgagacccgggcgctcgatggggccggagccatccagtatctctgtcccggcgtgtgcggctggaattatctgattcctctgcttgaagatgcctacagcaatataaaaattatgtgtacttatgcccggaagtacaaggctgccggggttttgaatacagactggggcgattttctgcatatcaatcatccggaattcagtataccgggcatgatctacggagctgcattctcctggaatacgcagattccggactttgaagagatcaacagacagatttcggaaatggaatacggcgattccaccgggcggttagtgggtgtgctggcaaagacccaggcgcttaacggcttcacctgggagacggcggtccggtttaaggaacttaagacaggagctgcaccggaatatgaggaggaccacagacagtatatacagggacacatggaagccctggagggcgtggatgataagaaccgccgtctggaggaggttaccggggaactgtacggacttctgccccatatggacagccgtaaccggccggcggtgaaggcgtttgtcgtagctgtcgaaggaatcggtctgtttaacgagctggggaagatcatcgcagagagggattacggtttaaaatatggtgagaaaccggattcctgggagctggcggagcggctggaggtgtggctgtaccactataaggagctgtaccgcagtgtcagccgggaatcggagcttggaaggattcaggagattgttgtgtggtatggtgactatttgagggagcagagataagatggatcgctatctgatatttgatttgggagggacttcggtgaaatatgccgtttcggataaagacggggcgtttgacacggccggggcttttgcaactccgagggaaggcatggagagaatgcttgaagagatggaacgggtatatgaggcggtgcagacgggaccgggagtgacagaggcggcgccttccggcggtgactcctgcggaacgcggattgtgggagctgcaatcagctctcctggagcggtggacatccgtacgggcatggtgggaggcatcagcgcaatcccgtatatccatggtattccgcttgcagaggcggtaagccgccgcctgaacggaattcctgtcaccatggaaaatgacggaaattgcgcggctctcggtgaactgtggaagggggcggcagccggcaggcggaatatggtttccgtggtgtgcggaaccggaatcggaggcgcgatcgttgtagacggccgggtataccggggaagaaccaacaacgccggcgagttcggcaattatctggtgaaccgggaaggcggccggaagagaacgtggagttcctataccatggtgaaccaggccgtaagatatgaggaacggacaggaaggcatgccgacggcagagaactgttccgcctggcggaggccggagactgcgatgccgtccgtctggtggaggagttctatgaggctatggctgtcggcctgttccagatccagtttacacttgacacggaactgatcgtactgggaggagggatcagcgaagctcccttcgttatcccggaaatctgtcaacggatggaacggctggctgaaaatacggagttcggctttctgatgccggagatcgtcccctgccggtttggaaataaggcaaacctgtatggggcgttgtaccatcatctgacagccggatatgcataacggttaaacggcggggcccgctcatacatgcatcacatgcatcgcaaaaacaagtcaaagaaccagcagaaataaacggattacacgattgcaggaggacaaaatggactatcagttcagtaaggattttctatggggggcggccagctccggtccccagtcagagggaagctttccgggggaccaaaaagcggagatggaatgggattactggtttaaacaggccccggagctgttttacgagggagtcgggccgtccgtggcctcggatttctatcacaaatataaagagtatgccggacttatgaaggagatcggtatgaattcctaccgcacctccattcagtggagccgcctcatcaaggattgtgaaggaacggtaaatccggaaggcgccgcgttttataatgcagtgatcgatgaactgcttagccgggggatcgagccgatcctgtgtcttcaccactttgatctgcccatgtactgggtggagaagggcggcttcgaaaaccgggaaacggtggaggcatttgcagcgtatgcggctcaatgctttgcactgttcggagacagggtgaagcggtggattaccttcaatgaaccgattgtcatcacggaaggcggttatctctatcagaatcattatccggctgtctgcgatgcgaaaagggcggcgctggtatcgtatcatctccagcttgccagcagtctggcggttaaggcgttcaaaaagagcggcagggacgggcagatcggcattgtgctgaatttaacgcctacctactgcagagagccggagaatgaggcggacaaaaagagtgcggagactgccgacctgctgtttaacaaatcattcctggacccttccataaaaggggagtatcccaaagccctggtggagctgctgaaagaagaaggaatctgcccggagaccagagaagaggacttagaggtgatccgcatcaatacggtggattttcttggcgtaaattactatcatccgaggcgggtgacgagaagaagcactccatatacaggccctctcatgccggagaagtatttcgaggaatacacatacgagggacagaagatgaatttttccagaggctgggagatctatgagcctgccatctatgaaatcgccattcatctgcgcgacaattacggcaacatcccctggtatatatcggagaatggaatgggagtgcaggatgaggagcggtttattggtgcagacggcaccgtggaagatgattacagaattgaatttatacgggatcacttgatctggcttcataaggccatcgaggagggctgcagctgctttggctaccatctgtgggccccctttgactgctggtcgtggaagaatgcgtataagaaccgctatggcatgatccgggtggatataaaggatcactgccggctttcgataaaaaaatcgggaaggtggttccgggagacagcggggcggggcggttttaacaagttctgaaaatatggccgcgattatttcttagaggttcccatatgccggtatagcccgtaacttcggactgtaccggcctttttcgtcattgcttattttccagctgatactcttcatattcttttgtgtagtggtcgattttatgggcaaccttctcaagatgctgctgcatttcttccatgcgtttttctacctcacacttgtgtgcgatcagcaattcacaccgctctttcagcgtctccggtccctggtggctcaaattaacaaagtcgcggatctgcctgatagacatatccgtgtttttcaggcacgaaattaatcccagcagctccagatcctggtcggagtaactgcggatgccgctttttgtacgcgcgacattgagcagcagcccctccttttcgtaatatcgcagagtgtttggactgagatgtgttttttctgctgcaagtttgattgtatatcccatataaggacctcctgtctctggtaaacgttcaatgaaacggtcaaatgaaaaaaagccttgacttagcgttaacgctaagagttatgattatcatacagtatcatttgattatctgtcaagaaacgaaacaggaggaaaaacaatgaaatcattaactgactgctacaagctcgccaatggggtggaaattccctgcatcggtttcggcacgtggcagacacctgacggggatgtctgcgtatcatcggtgaaagctgctatcgcagcgggataccgccacatcgataccgctgaaatgtatgagaacgaagacagcgtgggcaaagccataaaggaatgtggtgtcagccgggaggagctcttcgttacctcgaagttaaacaacaccgaacacggctacgaaaagaccatggcggcgtttgaggggacgatggaaaagctgggacttaagtatctcgacttatttctgattcactggccgaatcccatcgccttccgtgaccactggcaggaggccaacgccggtacctggaaagcctttgaggagctgtacaaagccggccgtgtccgcgccatcggcatcagcaatttccggcagcatcacatcgaagctctgatggaaactgccacagttcccccgatggtaaaccagatgaagctttgccccggggagacccaggaggaagcggcggattactgccgctccagaaacattctgttggaggcctacagccccctcggaaccggccagatcttccaggtgcccgagatgcaggaactggccaggaaatacgggcgttccatcgcccagatctgtatccgctggagcctgcaaagagggtatctgccgctgcccaagtcggttaaccctgctcggattcaggagaatgccaatgtcttcgactttgagctggaagcgtcggatgttcagctgatagccgacttgaagggatgcgtgggatacgcctctgatccggatacaaggacattttagtaattaaggctgtttaagagaattttataaaacaaaaaggagcatggtctgacacccgacgggtatcgttccatgctcctttatgtatttaattattcctcagaaatagcgcctacaggacaggcaccagcacaggttccgcagctgatacaggtatcagcgtcgattacgtactgtccttcgccctcagaaatcgcactaactggacattcgccttcacatgttccgcagcttacgcatgcatcactaataacatatgccataataaattacctccttatattctatacatttgcctatattctatactataaatgtaaattattcaagtggaaaatgatgtagtttttgttcaaaattaggagcagaataaatccggggtaccggctcttctgtctttaatcccgtgaaggattattttttttgctcccacagcctcttccctggacatcggcggcacgtcttccagaggatagaggatgccgagattcttatattttaccttgcccatgtcgtggtaaggaagtacatccagagcctttgcgtattttaacgttccgataaaacggcccagatggtataagtctttttccgagtccgtaagccccggtacaaccacgtggcgtatccacatgggaacctgcttctgatcgagatactctgcaaactgcagaatattccggttcgagtgaccggtcagcgcgcgatgcttttcatcgtcaatctgctttaaatccagcatgacaaggcgggtggaggcgagtaaacggtccagctgctctaaatacgcctgatctgaggcgcggaaggtgacgccggaggtgtcgagacacgtatgaatatccctccggcacgcctcctcgaagagctctgtcacaaattccatctgaagaagcggttctccgccggtcaccgtgatgcctccgccccggtagaaggggcgggaagcctcgtactggtccagaatttcagagaccgtcatggcggttcctccatggagagaccaggtgtcggggttatgacagtactggcagcgcatgggacagcccttggtaaagaccaccatgcggatgcccggcccgtcaacggtgccgaagctttcaatcgaatgtatctgacctgtcgtcatgaggaaaacgcctgcctttctgatggaacgtatgtgggaagaaggacgcggattagatcgcgtcgtggaacgtacgggagataacctcgtcctgctgttcctttgtaagtttaatgaagttaaccgcgtagccggaaacgcgcacggtcagctgcggatagttctccggatgcttctgggcgtccagtaaggtctcgcgggtaaatacgttgacatttaaatggtgtccgccttcctgtacgtagccgtctaacagggaaaccaggttatcgatctgagagtcgctgatgtttgtatttgccatgttcttttcctcctgtaatggtaaaaattaatagttgtctgagaaatccgttccactgttttccgggtcttcctcatcgctgtccataccctcgaacagtgtgggcacgctgcaggccagattcccggctgcgcagtccagggaattcatggtggtaacgttttttgcagtggtggtatccgcgctgacatttccgtcttcatccgagcggatattcatatgaccgccgccgccggacataaatgcatccagcatggcgacgatatcgtcaatctttttttcatcaggggctgccataaaagcacttccttcctcgatttaaatgttgtctaaatccacttccagatcgccggtaaagatctgatcttccttgccgagcgcgccgggcacgatggagaaggtattggaaataccatcctgtgcatctttaaatggaagctttgcaacggaagccagagaagcaacggctccgtggctgtcgcggtggtgcatcgggttggctcccggagcaaatgcctctcctgcctttctgccatccggtgtcgcgccggtattcttgccgtatacgacattggaggtgatggtcaggatcgaggtggtcgggatgcctccgcggtaagtgtggttgccctttacgtagttcataaaggtgtggacaagatcactggccagctggtcgacgcggtcgtcattgttgccgtacttcgggaaatccccttctacgatataatccacgacgatgccgttttcatcacgcacagtctttaccttagcgtatttgattgcggataaggagtcggccactacggataaaccggcgataccggtcgcaaaccagcgggtgacctttttgtcgtgaagtgccatctgcacacgctcgtaggagtatttgtcatgcatatagtgaatgatgtttaaggtgttgacataaacgcgggccagccatctcatcatgtccttgtatgcctccatgacctcgtcaaaatcgagatattcggaggtgatcggacggtacttcggacctacctgcttctttgtcacctcatcgataccgccgttgatggcgtataataagcattttgctaagttggcgcgggcgccgaagaactgcatctccttgccgacacgcatggaagacacacagcaggcaatggcgtaatcgtcgccgtgggtgactctcatcaggtcatcattctcgtactggatggaggaggactcgatggaagtctttgcacagaatctcttaaagttttccggcagtctggtggaccagagaaccgttaagttcggctccggagcggttcctaaattctgtaaggtgtgtaaataacggtaagacattttggtgaccatgtggcgtccgtcgatgccgacaccgccgatggactcggtaacccaggtcgggtcgccggagaacagctcgttgtattccggggtacgcgcaaattttacgagacgcagtttcataatgaagtgatcgacgaactcctgaatctcttcctctgtaaatgtgccctccgccaaatctctctgtgcgtagatatcaatgaaggtggaagtacgtcccagagacattgcggcaccgttctgttccttgacggctgccaggtaacccagataggtccactggatggcctccttgacgttcgtggccggcctggagatatcgaagccgtagatagcgcccagcttctttaattcacccagtgcgcgaagctgctcggacagctcttcccgctcacggataacgtcagagtacatgatggtacgggtggtcgctttctgctcttccttattctcaatcagacggtcaatgccgtataaagcaacgcggcggtagtcgccgatgatacggccgcggccgtatgcatccggaagaccggtgatgatgtgattggagcggcaggcacgcatctcaggcgtgtaagcgtcgaatacacctgcgttgtgagtctttctgtgaacggtaaagaattccttaatctccggatcaatggtgtagccgttgtccgcacaggccttctccgccatgcggatgccgccgtaaggctgtaaggaacgcttgaagggcttgtctgtctgaaaacctacaattttttctttatcctgatcgagatagcccggtccatgggaggtgatggtggaaacaactttcgtatccatatccagcacaccgccggcctctctttcttttgcggacagatccataacctgggcccataaatctttcgttgcctgggttggacctgcgaggaaggagtcatcgccgtcataaggggtatagttcttctgtataaagtctctgacattgatttctctttcccagacgccgccgctaaaatctctccactctggtctcataatgttgtacctccgtcgaatgcttatttataagtaaaagtaatgaatgagtgccatcaaaagttattattcatacaacttttgtatgaatacattatagttgaatactgtatacacgtcaagtccctgtaatgataaaatttttacaaaaatggctggacaatcccttgctatttcggaagaaaagtattatattataaaaacagtatgtacatttttaaaggaggaatacacgatgcagattagtaaagatatgttaattggcgctctgatccagatggatgattgcattgcaccgattttaatgcgcgccggcatgcactgtcttggctgcccggcttctcagggcgagtctttggaagaagcatgcatggttcatggaattgactgtgatacactggtttctaatattaatgaagttcttgcagagagataaggaaactttttattcataggggcaccggccatttttgatggccggtgttttttatgtgacaggaaagtgtccctgttacataaaaagccctccggtgctctatcaggaaaaccgggccaatgcagccttaccatatgttatgacaagatggcgagatgttatacattagaaaatacaggataagcgtttgtaattactttacatatatgataaaataaatatcagattaaattatacaaaataaacaaagggtgttgacaaacatgttataacatgttattataacatcacagacaaggaggaacatatggaacaacccatcaggcttgacaaggattctaaggtaccgatccatcaacagctgtattcctatataaaagaaaggatcgtagaaggcttttataaagagaatgagaccattccgtcagagaaagagatgcaggagatgttcgaagtcagcaggatcacagtccgcagagccatatcagatctggagcatgacggctatttaattaagcggaaaggacgcggaaccatcgtatgcccacagaaaaaggagcgcgatatgtctgttttcaacagcttcagcggggatgcgaaggtcaagggtgacaaaccgggctctattattcttcaatgcaaggaagtggaggcgagcgttaaaattgcggagatgcttcaggtggagaccggggaaaaggtctattttctgaaacggctcaggctgttaaacgggcggattattgccctgaatgagacgtatgtcagcgggcggcttggctttgcgatcagaggtgaagattttgattccgcgacgtccctgtatgagtatctggaacagcatgggattgtgcttggaagcgcggatgagacgctggaagccaagatggcgacttcggagattcgcagggagctgtttttggaggagagccagcctctggtttacaaagagcgggttacgtatgatatgaacggaagaccggtggaattttctgagaattcctacttgtcagattcttacaaatactatattcatattaccaatgtaagaggggagggaaatacaggtgaaaaggtatgatttccattcacatctcgggaagaccagatccggagacgcgaataatgcggatcagctggtgcgggagcttggtgaatttggaatcacaaaggtggggatctgttccttatcgggaaacggcatgcggccgcagaatgatcttgtctatgaagccatgtgccagtatccgggaatcgttgaaggatatgcggatattgatcccaaggcgccggatgcgtttgatgagatccacaggacgctgggcgatttaaggatgaatggagtaaaattcatggcatggaagcacggctacgcggtggagaactgccccagtctgggaccggttattgatgagattggaaaatacggcgtccacattcagattcatggaggagcgagtcctctgtgcacgccgttcgtctggatcgatcatgcgaagcggagaccggatatgaggtttgtatttactcatgtctgcgggagagaatttgggtacagctgcatcgaggcgatccgtgatctggacaatttctgggtggagacgtcggccaacatggaaattgatattcttcggaaggctgtggaggtgctggggccggaacgaatgctgttcggaaccgactggccatataagccgaccaatattgagattgagaaattgtatcatttagggcttagcgaatcggagctggaacttgtattttacaagaacgccgagaagttatgggaaaggaaggagcagcaccatggttgtaacacacatgagaattgatgaccggctgattcacggacagattgtaaccgcatggatatcggactcgaaagcagaagaaatccttgtggctgacgatatggctgcaaaggacccgacgcagcagatgctgttaaagctggcagttcctgcaaagattaaactggcgattgtgacagttgaaaaagcggccgaacttttaaaggaagaccagtccgatacaaaagtacttctgatcgtaagaaatccaaaaacggcattagatttatttgaacggggctttactattgagagcgtcaatgtggggaatatcagcaacgcccgttcaacagtggggagaaaacgccttctgccttatatttacgtggagcctgaggatgtggagaatctaaaggcgattgcggaaaagaatataagacttgatgtgagggcggtgccaaacgataagtccatagacggacttgcgctcatttccaaataggagaagggagaaacgtatgagtttgttagtgaaagctgtccttgtagcgctggttacatggctgacattttttgataagtattgtacgcagttctttacatacaggccgattgtaatcggcccgattatcggactgatcatgggggatttaaagatggggctgatggtaggctgtaccatcgagctgatgttcttaggacaggtatttgtggggacggcacttccgccggaggagacgttcagcaccatcattgcaactgcatttgcatgtatctccggcagtacggaggttgcgctggcaaccgcactgccgcttgcaattctggggcagatgggaatgtatttccggaatatggtgctctgcgtgtggacccagcacaggctggaggccgctgttgaacggggaagcagaaggggcatcaccatgaactgcctgattttgcccaatgtcttcaatttcgttcttttctcagttcctgttttccttgcaatctacttaggggcaggaccggttcaggcgattatcaatgcgattccgaaggtgattatcgacggtctggccgtaggcggcggaatgatcggtgcggtaggacttgcgcttcttttgaagtgtattaatgtaaagcatatctggtactatttcctgattggattctttttctccagctttttgaacatcaatccgattggaattacgctgattgcagtcgtatgtgtggcgatggcctattatcgtgagatggacagggaggtggcataatggcggagaataccgatttaacaaaactcagtaaaaaagatctgatgaagatgtatatctattcccaggcatttgtaagcggcttcaactatgaaaaacaggaagctccgggctttgcattttccatgatgccggtaatcgaaaaagtatacaaaaatgaggaagacaagaaagaggcgtacagacgccatacagagcttttcctgacagaggccagactctcccatttcgtcatcggcgtgaccgcggcgatggaggaacgcaacgcgaatgaacacgacattgatccggtcagcatcaacgccatcaaggctgctttgatgggacctttggcgggaatcggcgattccctctatcacggaacactgcgtccgattatcgcgggcctggcggtatccatggtgattgccagcggatataccagcatggtgggaccgctgctctttgttctggttatggctggcgtcggacagcttctgcgctactttggtatcttcaaaggctacgaaaagggcgttgaatttgtcggtgcgatgcagagctcaggcctgatcgacaagatgacgaggctggcgggaattgccgcatacgctgttatcggcggcttcgtgtacaaattcgtaacgattaacgttccatggacttataaggcaggcgaaactgtggtcagccttcagtctacactggatggcattgttcccggcattcttccgcttttgtatacactgctgatgctgtggctcatggataagaagaaaatgaatccggtaatcctgatgttagttaccatgctggtcggaatcgccggttatgcggttggcatcttaggatagccgggaggtagaagatgattattgattatcattcccatataaaatgggaccgggataccaatcaatatgatacggaagcactgctcctggatatgcaggagaaccagatagacaaacgcgtcgtatcggcactggccggattttccataagagaacagaacgatgcggtggcagagctggtaaaggcgcatccggacagaatcgtgggttctgcggtgatcaatccgaaggagagggactgtgtggcagagatggaaaggattgcggcctccggctgttttaaaaccatcgagctggattccatggagcactgctactatccggagacgatgccggtccttgacacgattattgaaattgcagtggcgaaccacatgcctgtgaatgtattcacaggctggggctgccgcaccatgccggcgcagtgggcgtattacgccagacgccatccggatatgacgatggttcttcttcacatgggaaccacggattttggatatggctgtgtggagcttgttccgcagtatgagaatctgatggtggaaacctcctgcatgtacgaatttcctattttaagaaaggcgttcagtcagattccgaaggagcgttttttatttggaagccactatccggataagcttacggtgtgttcggtccacaccttcgacttacttaaacttccggaggagcttaaggagtgtatgttttataaaaatgccgggcgtctgctcgcgtgaatgaggaaatagaatgaagagagaagaagttcgacaactgttgaatgaccaggcgtccaggctgtttgacgatatcgtaaacagccgtgtcctgggtgccaacaatcatatacgcatgattggggaaatcatgcttctgactgctgaggacgagtcggaaaatgggaaaagtgtcctttataaggtgagagaaacggcccgtttcttcatggaaacaaggggacagcagagccgggcagtctatcatgcgatccagtattatatcaagggtctggatgagcttgaaaactgtggggaagaggagatccgggcccgcatcacggagcggataggcgcttatggagtggatgccgcaaaggatatggacacgctggtctcctatggcgttcatatatcggagaacatggataccatcatgatctttgactattccagcacggttgaccgttttgtggcggagctgggaagaaaacgcaccatctatattccggagagcagggcgcttgacggtgggaggcccttcgttaaaacggcgctggaggcgggccatgaggtccattttattcctgatacgacgatgcttgtggctctgaagcagtgccaggcggcatttatgggagccgagactgtctatccggatggaacggtttttaatacggtaggatcagatatcctggcgatcctgtgccgggagatccggataccgctgtatgtgctgacgccgatgataaaagtagatacaaggcctgtatcaggctatatcaggctgtctcccatgccatttgactacggtccccgtctggcgggagcctgggagccggagcttcgggagcaggtggattttaagggaatcaagcttttggagatcgctccggagtacatccgtgcattgataacggagaggggaattattccgtcttctgcctttttccatgaggcgatggaatacgcccgttcattagaggggagatgagaggtatgatgcggggaaaacaatttccggtggcactggccatgatacagccggaaccgtttccgggcagctttcgccacgaaggaaagtcatttgaagagattatagatatttcgctgaacgagattgagatgattgaggccaacggttttgacggctatatcattcagaacaggaacgatgcccctgtcagacagcatgcgcttccggagactacggcctatatgaccgccctggcaagagagtgccggaggcgcttcccggatatgatacagggaatcctggttgactgggatggcgtggcctctcttgccgtggcagacgcggccggctccgattttatacgggtggaacacacctataccggtgtggaagtcggttatgcggggatgatggaggcacagtgcgtggatatctgccagtttaagaagcgtattgggtctgatattccggtatatgcggatgttcaggaggttcattacgaacagctggcaggaaagagcatcgttgacaatgcatgggatacgataatgaatgcatttgcggacggactttttttaggtggaaaaagctgtgaggagagtattgagatcataaaatgtgtgagaaaacgcctgggcgaaagaattccgattttcctaagctccggtgcaaccggagataatatcagcaaaatcctgcagtattacgacggagtcagtgtgggaacctgggtgaaaaacgggaacatgagaaatcccattgatccggtacgcgccagacagtttatggagggggtaaagtcggcaaggaagctgcgcggggacagcggagatgaggggatgttatgataggaatcattgttgcgggacatggaaattttgcatcggggattaccaccatgctggaacttgtagtcgggaagccggaacattatgagtttattgattttttgcagggagaatctcaggaagctctggaggaggattacagggataaactggataagctgaaagactgcgaaaaaattgtaattatgacggatattaccggaggttccccgtttaagtccgctgttacttatgcggtttccgatgacaggctgaatgtgatttcagggacaaacgttccaatgctggtggaactgatattcggacgaatgaattccgatgacagtgaggccctgattcagtcggccatggaagccggaaaagcacaaatcatacgatttcataaggatatgctatgaaactgataaaaaatggtataattctgactgcagaaactgaatttgaaggagatatcctggttgatggagaagtgatacgggcagttggcaggggcctcgatggtttggcggatgacgtcatcgatgcgtccggcaaatacatattcccgggaggggtggatgagcatacccatttcggctccttcggaggacggctgtttgaaaccacagaggcggcggcagtgggaggtacgacgacagttgtcgatttcgcgcctcaggacaaaggcgattctttaggagctgcaatagagaagcatgcggcaagggctgccggagtttcctgcgtggactttggctttcattccatggtcatggatatgcaggcggatacggcagatcagctgaaggaacttccggaacacggagtctcctgtgtaaaaatgtttatggcttataaaggaacgcctttctatatggaggacgcttccatcctgaaagtaatgaatgagagcaggcgtcatggcattaccatgatggttcacgcagaaaatccggatatgatatcgttttacacagagcgattaaaggcggaggggcgtttggaaccaatcagccacgccttttccagaccaccggttacggaagaagaagctgtgcgtcatgcgattgtaatggctcgtgtggcggaggcacctctttttatcgttcacgtatcgacgagaggagcgatggaggccatccgggatgcatatgccggaggccagtctgtatatggggaaacatgcacccattatcttgtgctggacacctcgtttctggctttgccggattttgaaggcgcaaaatacgtctgtgccccgcctctcagaaccagggagcatcagcaggcattgtgggaagggatcgacaagggctggctcaacgcggtcagttcggatcactgtgccctggcaggcggttttgaaacgaaaaaagagggattgggggatttcacaaaaataccaaatggaattcccggcgttcaaaaccgtatttccgtactttggagtcagggggtggcgaaagggcgcatctcaaaacagcgctttgtagatctgattgccactgccccggccaaaaactcgggacttgcaaagaaagggcagattgcacctggttttgatgcggatttcgtgattttcgatcccggttaccgggggattatgacacagaaggataatctggaagggattggatacggggcatttgaaggctttgaaatgatcggacgtccggaacaggtatttttaagggggatgctgattgcagagaatggccgttttacaggaagagaaggctgcggacgccggatttttgcaaagccgtacgctgcggcgtatgaccattaccggtcagaaccgttataatcaattgcttccggctgcattgacatcaaagagggaatgtgatagattaaactctgacaggagtgattattttggaacgaattatcatagatgaattaaagaggcgaatgaactctgtacagatggtaccggtgaaacattgtacggagcttaaactggaagcgtgaacgcttttttctttcgccggaaaacagagagtacagcggcatacagcagtatgcctggtttttgtacctgttttccgtaagagaagggatcgctgcatatccggggctgtggacagtgttttgtccgcagcctttttttgatatcatgcgaggaacgtgctttttgtgatatcgaaaagccctgcggattcgttcttgattactcatggaaaggattaaataaaatgaatcaattaaactggaaacattccattgcccgttttttaaccgcacagacgatctccctgtttggctcctcgcttgtacagtatgcgatcgtctggtatattacgctcacaacctcatccggaaagatgcttacaatttccactatgtgcggcttcctgccgcagatagtaatctccctgtttgctggtgtctggatcgaccggtatgacagaaaaaagatgatcatgctttcggattcagccattgccctgtccacgcttcttctggctgccgcatttctcagcggacataagagcgtctggtttttgttcgctgcgctggtggtgcgttcagcgggaaccggcatccagactccggcagtgaatgcaatgattccccagatcgttccgaaaccatatttaatgaaggtaaacggcttaaacagcacgctgtcttcgatgatgatgtttttatcaccggcggccagcggcgcggttttgtctgtggctcctttagaggcggcgttgtttatcgatgtgctgacagccgtgatcggtgtaggcattactgccaccatccatgctgagccatacgaaaaacgctgccttcccggtactgccggtctggaagaaataagagacgggttccgttatctgaaagacaatcaattgataaagagactgctccttttccagatcaccatactttttctcgtcagtccatcggctttcctgacgccgctcatggtgagcaggacgtttggcagtgaggtgtggcgcctgacggccagtgagatgacctacagcctcgggatggttctgggcgggatcctgatcgcctcctggggcggatttaaaaagagaatgaatacaacgctggcggcgggggctgtctacgggctgatcatgattggcctgggaaatgccggcgttttccttctctatcttctgtttaatacagccatcggcattacctcgccgtgttacaatgcccctgttaccgtaacaattcaggaaaaagtatctcccggcatgcagggaagaatctttagtttcatgcagatcgccacgtcctgcgcactgccgttgggaatgcttgtgtttgggccgctggcagatcttgtgccggtccagtatcttttaaacagcgcaggactgatgatcctgattatatgctgcatcgtatggaaagcaaacggcttttccgtcgaatcagccacagaaaatatagaacaacctttatgacaaccgatgcagcagttcatgcctctgtccggtgccccgcagtccgctccgggcgggggctgaactgtaatgccggttggaaaatcggaccgtatgaaaaataatagttgcatacgcaactaatttatgttaccatatacagcagcgctgaaagcgaaatgactccgtccggcgggaaggaaagctggcggaatatggaggtgggagacgtgaaggaacaccgggaaatcgggaagtatatctcgatgatccagaggttgagcaacatttattttgcaaatgaattatcctcttatcaaataggctgtggacaacagttttttttattgcagatttttaaaaatccggggatcagcctgcaggagctggcttccaatggaagctacgacaaggcgactgcgaccagggctgtgaagaagctggaggaagaggcgtacgttcggacggaaaccgacggagaggacaagcgtgtccgccatatctacgcgacggaaaaggcgaaaagggtggtggatataaccagaaacagtgtggataccctgacagaggttctgctggaaggatttacggaggaggaacgcgactctgctgaagcttttttgatccgcatggcggataattcatacagacatatcatcgcgaacaaaggaaaggaatgatgtaattttatggaacagattaaagtagaaaaaaagggcaatccgctgggataccgtccgattggagcgcttcttggacagtttgcgctgccggccatcatatcgatgctggtaaatgccatttataatattgttgaccagatctttatcgggcagggaatcggctatctcggcaacgcggcgaccaccatcgcattcccgatcgtaacgatcattctggccatgtccaccctgctgggcgccggaggcagcgcatacgcggcgatcaagctgggagagaagaaggaagaggacgccgagaagacactgggaaccgtctttatcctgaccctgatctccagtgcggttgtgatagtgctcggattcctgttcatgacgccaatgctgaagatctttggcgccacagtcaatacgatagattatgcaagacagtatacctcaattatcctgatcggtaccccgtttaacatgctttccgtcgtcttaagcaatatgtccagaaccgatggaagccccgcgctttccatgtacgcccttctggtaggcgccattttaaacacgattctggatccgatctacatctttgtttttcactggggcgtcagcggcgcggcaatcgcgacaatcacatcacagatcatttccgctgtggttctggtggtctatttcctgaaaaagggtaaaaatatgcgtctgcgcaggaaaaccttccgtctcgacagtgagatctgtgccagagcgctgccgttgggaatttccagcggtattactcaggtggcatccacgattttacaggttgtgatgaataattccctggtgtattatggaaatcagacaacggtaggcggtgacgcggctttaagtgccatggggattgtgaataagatcagcatgatcctgatctccatctgtatcggcatcggtatcggctcccagccgattcttggcttcaataagggggccaatcagccgaaacgtgtgagaaaaacatacttgctggcaatttcggcagctaccggggtatcgatactcggctggctggcctgtcagattttcccgggaccgattttaagtttgtttggaacacaggatgcagaatttacacagtttgcagtcaaatgtttaaagatttacatgctcggcatttttacggcaggattccaggtggtatcaaccagttacttccagtctaccggacagccgctcaaagcgtcggtgctgtccatgcttcgtcagctgcttctgttaattccgctgattctgatcctgccgctgaccttcagcctggacggaatcctttacgcggggccgattgcggacgtggcatcggcggttattgtaagcctgtttgttgtctatgagcttagaaagctgaataaggtgtgcagcgcgtcagaggcgtgacggacgcgcgtttacgaaggagacgaagaacatgagttttaaggcatcgatggcgggatttctggcccggctttgtaaggcggacaggaagatggcggaaaatcttcagaacccactcagaaacacgggggctctggacatggaacgctttacgaagaaggtgcgggtgaaaaactgggatatcaggggatttaagggagtcaccgtgaacgggagctaccccggaagggggcatatcctgatgcttccgggcggcgcgtattccctggaaccggggaagcaccaccggagaatcgcagagcgctttgcgattctcgaccacatgaaggtgtcggtatttcagtatccgctcagtccggaatatacggcggtggatgtccgcatcattctaatggaggcctatgagaggctggtgagagagtatccggaagatatgtttttcctgtttggggactcctccggaggagggctggcccttgcatttttgcaggaactgcgcgacaggggaggctgtcccatgccggccaggacggcgatggtgtctccctggctggatatcagcctgacaaatccaaagatcaagattgccagaaagacggaacatattcttccggcagaagcgctgattgagactggaaaacgttactgcggcggtctcgacaaagaggatccgttcgtttctccgatctgcggaaccatggacgggctgggaccggtgctgatgttttccggtgaagaggagattttgacgccggactgtgaacttcttgctgagaagatggagaaggtgaccggcacggagctggtcttccggaaagcggcaggcatgtgtcacgactggattcagattccgtgcagggagaccgatgtgacgctggatttaatagccgggttcttccaggaagcgctggaggcgggataacggaatgaaatcccgctgctgcagaaagaatctgctgacttataaaaaacaacccggagacgcgatgcgcctccgggttattctttgtgtgatgaagtactatgaatcaaaggggacgggtcagagctttgccagagactgaagggcatggccttcaatcagcacctcgtaatgttccctgtagtacgcttctgaagcgtaatcctgccggatcttggtgccgtattccgcaaggatgttacagacacggctgaagtcgagtgaactctccaatgtattctttatgaccaggtaatactgtctcgcttccggctttttatataatgtattctctccatcgtagacctgtaaagcggcacgggctgcctccgatatctggtcgagactctggaaacagtaaattctcatggtgctggcagctgcctcctcctttggagcgggagcttcttccttatctttcttatctgcgcctaaaagtcccaggagaccatcggcgccttctaagagttcgcttgccagatcgtttaacatggtgtcctgatcatcgtcagacataggggaaaacttggcaaaacgggtgtccagctcttccgggtcttcgatcttggtgatgacgagcatgacgctttcgttggacagaggaatcgcttccaccatgagaggaatgtcttcggcttcaaatcccacttcgttagatgctttctgaatcatctcgcggaacagactgcgggctttttcactgccataagccagttcgcccaaattcaagtttcggacacttaaatcgaaactggtcagtgtacagcgaatctgattttcattaatacgttctatcttcataggatcacttcctgttcttttaaaatgttgaatgattgtttacatacttcctcaacataactatactatataatataaccaaaaggcaattactatgtgaaaaaatttatataaatttaagggatttatgaaaaaaggttgaaaaaatgggcatgatagattagaataggctctaagaggcgatattggacaggcaaaaaggaggtgggtaaattaaacaccgttttgtttggaaaatatcagctatgccgtatccttgggaccggccgtctcggaaccgtttttctggcggttcatcttggactttccgagtaccgcgcgatcaagcgcgtgccgaagagttttctggaatatgatcagttcaggcgcgaagcattaattctgaaggagctgcgccatccgggaattcccattgtatacgatgtagaagaagacgagaattacagttatttaatcgaagagtatctggaaggagaatctctctatgacctggttaaaagccagggatatctgccgcagaggctggtcatccgttatggtatccagcttactgacatcatgaactacctgcatctcgcaggaacaacccccctgttatatctggatttacagccgaggaatctactggtgtgccatggaactgtgaagctgatcgactttgaccatgccgccttttcggatgaggcaaacgcggccgcagaccggtatggaaccgtcggctgcgccgcaccggaacagtacgaaaaaaacggaaaactggatgaacggacagacttatatgccattggtgtgatcctccactatctgtataccggtgtatttccggcggtgccctatgaaccggttccatcgatgacgccggagcttgccgccatcatccggacctgcctggagcaaaaaaaggaaaggcgcttttcctcggcatctgaactgaacgaacggttaaagcagctggagcaaaggggagccgctgcaactgcctgtctgcaatcacctcttactatcgcgcttgcgggaagcaaatcgggggccggaacgactcatatagccgtcggcctgtcagtctgtcttagaaatcttggttatcccaatctgtatgaagaaaaaaacggatccggtatgggagcggggctcggtgcctttaccggcgctttgagggaccgctgcggtctgatgcagtaccatggctttgtatggaagccggcttacggaccgggtgttaagcttcccatgccctcctgcggccttgtgattgccgactatgggcatgaggtggaggcggctctggccgcggaaccggatgcactgatcctggtctgcgacggccgggagtggagccggggagcggcggaatccgcgttgaaatgcgtggcggagcgccataccccttatgcagcagtctataaccatctggcggaatctgcaagagtaaagcctccggaggggattgagcagagccggtgctttcgggcgccatattttgcagatccactgaaagaaagtgagggtaccagggaatttttctgccaggtgctggattcgctgaaatctgcctcagaggcgggaatggatgcgtccggaagatggagctgcatgcggatttcccgatggaagcacccggccagggtactgcgggaggcagccggaagagccagacgaaaaaaacggaggggcgtgtcatgaaaatgaagcccaaaaaccgtgtcagccggacaatggcgcccaaaaggggcgcggcatttgcagaacagcgtctgattggattaatcggggcgggaccggctgtgggggtgacccatacagcggtcatgatggccggatacttaaccggaatctgccgcaggcgctgtgcggtgctggagtggaacggcagcggaacgtttgaccggctggaggagagctgtcttggaaaaaggaacggaggccagagcagaagctttcctgtcctggacgtggattactacagaaatgcggggacagagactctggtgttgtgcaaaaagctccgttatcaggatgtaattgtggattacgggacagttttagaggggaatcaggaggaatttttcagatgtgacaggcaatttcttctcgcgggcttaagtgagtggcagacaggggcgtttctggataccgccggatcatggaagagagccggtgcaggctgggagactctcgccgtgtttggaagcgaggagaccagaaagaatatggaaaaggagctcggactttcaatccggcggattccggtttcagtagacgcctttgctgtcacggaagctgtcatggaattttatcagcagatattatagcggcaggagggctatgtgtcacgaacagaagccttgtggaaacctggcctgccgcttctgcgcatggaggacagtatggatgagaatggaaaagacagttacatagcgggaatgaaacgataccgcgaaaggggaattcccatcgtgatcgacggcgagaagtgcacggagccggactggaatcgtatctttgaggcgagggaggacaattcgttttatatggccgattttgtctcagatgagaagaccgggaagctgacggagatccggtttgaccgggtctaccacagatgaaatcatacggggcgcgcagataccatcttcagccatcagccagggaaacggcgcgtcagggcgggacaggggaaactgtgacggtacggcagcagctggaagcgaaggctgaactgttgcgggaatttttgcaatgtaatgaaaatgtaagcaaattcccgttgaagtgtggtatagtataatccaaaggggtttttatgacttacatccattacaggaggaatgcaaatgaaaaggagagtggtgccatttctggtggcactgggactgattgtactcgtaattgcgggtttttttggtatcaggctggtggaacgttatacgccttccaaggagcaggcggacatcggcagactgctgggggtaagcggtgacaatgtggcggtgtatttaaataatgagctgcaggaaacgaaagggatttatattgaagaacagacttatctcccgatcgaatgggtcaatgaaaatctgaatgaaagattttactgggataataatgagaaactgctggtctatgcgcttccggagtcgattgtctatgcggatcattccacgaagggaagttcagggaagcccttgatctgggttaatgacgaaggggtgtatctgtcactggggctcattgccaactacacggatatccggcttgaggtctttgacctggcggagcataagcgtgtcttcgtgaacaatgactggtcagaagagacgaaggctgtagcggacagcaagggaaatgtcagggaaaagggcggaatcaagagtccgatcatcaccagggttgaaaaggggtcggaggtgactgtgctggagaccatggagaagtgggataaggtgcggaccgtggatggttatatcggatatgtggagcataagcggttgggcgggagccggagtgagactccggtgagcagctttgtggctcctgtctataaaaacatctctctggatgagccggtatgcctggcctggcatcaggttacgaagccggaaggtaacgcctcctttgataatctgatcgccaatacaaagggactgaatgttatttctccgacctggtatgagctgactgataatgagggcggattcaattcctacgcggatgcggcgtatgtgcagaaagcccatgacatgggactccaggtgtgggctctgattaataatttcagcaatgatgtgcagaccgaggtactgctgtcgaagacctccacccgccagaagctgatcgggaagctgatggccgaagtggaacagtacggtttagacggactgaacctggatttcgagggaattaagaaagaagccggcgtccattacattcagtttatcagagaactgtcagtttcctgccggaaagagggcattgtgctgtctgtggacaattacgtcccgtatgcagggaatgagttctataaccggaaggagcagggaattgtggccgattacgtcatcgttatggggtacgatgagcattacgccggcggcgagccgggatcggtcgcttcgattggatatgtaaatgatggaatttccaatacgttaaaacaggtgccgaaggaaaaactgatcaatgccattcctctgtatacgagagtctggaccgaggaggcggatggcaagacgtcatcggtagctctcggcattgccagggcaaaggaatgggcggtggagaataacgtggagctgttctggcaggaggaactgggacagtattatggggaactgaagactgaggaggggacgaaaaaagtctggatggaggaagaacgttccatagggcttaagatggatctgatcaggaagtatgatctggctggagtggcctgctggaagcttggcttcgagcccgccgaactgtgggatgagatacgcatggatcaggagtagaacatcgcaaagagacaggaaggttcagagttatgaaaaagagaacagcattgtatgcggcgctgatctgcacaatgatgaccgggtgttccttaaaaagcccggtttcggagacagtgaaggaaccggagagcactacggagacggaacgtgcggagattccccagacaccggccgagacaacggtgccttcgaccattgaggaatttccccacgaggcggaggaacccacggtaaaaccgccggaacagaaatttgaggagggctgcaggattcttctggcttcggatatccattacctctcccgcgggctgacggattttggagacgggttcaagtataaggtggaacacggtgacgggaaagtggtcaattacatctgggagatcacggatgcatttattgaagctgtgaagaaggaggacccggatctcgtgattctgtcaggggatctgactcttaatggagagagggacagccacctcgatttcgcaaaaaagctgaaggagatcgaggacgccggaatccctgtcatcgtcattccgggaaatcacgatattaataatacggcggcggcccagtttacaggcgcacaggccctgggaacggcacatatcggcccggacgacttcgcggagatttaccgggatttcggttacgatgaagcggtgagccgggataccgcatcgctcagctatgtataccagattgatgactataaccgggcgctgatgctggatacgtgtcagtacgaaccttataatcaggtaggaggcatgatccgggaagagacgtacgactggattgaaaaccagatggaggacgcctgggacttagggatgaatgtgataccggtggggcaccacaatctgctggatgagagcgaggtctatgtagaggactgtaccatcgaacacagcgagcagctgatcgatcagctggacagctgggatgtgccgttattcttaagcggacatctccatgtacagcattttatgcgggaagatgaggactacgggatctatgagatcgtcaccagctctctggcgacaccgccctgccagtatggaatgctggattacggggacgacggaagctttcagtatcacacagtgcctcttgatatggaagcctgggcgaaggagcaggggagcacggataagaatctgctgaattttaaatcgtactccacagattttttgaaccgggtattctataatcaggcgcaggatgaatttgaacgcatgaatcaattcgacagtctcacgaagcgtcagaaggaccagatggcaaaggtgtacgcagagattaacgcagcctgctatgcgggaaaggccgtggagataaaggataaggcgacggaaaaggatggatacaagctgtggggggagaatggataccccagtatcttaagccagtacctggaatcgattgtcagggacgccacgaaagactataattcgctgaaagtggagtaaagttagttcttttttattttgccggcagatataattcaataagaatacgaatcaggcaggcaaagtgaaactatcaaaattggaaccgtatctggcggtactgctgctggttatggtctatatcgtatcccgccaggcaggccggatggcggcgggagtcaacgtagtctccgggaaagatcggccggtcgtggtgatcgatgcgggccatggaggcaatgaccccgggaagatcggtgtggatggcagccttgagaaggatattaatctaaagattgccaggaaggtgaaggcctatctggaagcctctgacgtccaggtggtcttaacacgtgaagacgaccagggcctctatacggaaaaggacagcaagaaaaagatggcggacatgaaccggcgctgtcagattatcaatgagacgagtccggcgctgacggtaagcatccatcagaacagctaccacgaggagggaatctcaggcggccaggtgttttactacaagggatcggaaaaagggaaaaagctggcggagacgctgcagaagcggtttgacttcgtcctgggcgacaagaatacgagagtagccaaggccaacgacaactatttcctcctgctccatgtgaagacgccgattgtcattgtggaatgcggtttcttatcgaactggaatgaatcggccatgctgaattccgaggagtaccaggaccggctggcctggacgatacatatggggattatggaatatttgaacgggagataacatattgacaaagaaatggggcgctgttttgtgaaaacagcgccctgtgtctgtaattccgacagattccggaggtattatccggtcgtaatggcggataacggggttcctgctacagcaggaatatgttatgcctccggcattcttcgatcatgtcgttcggccagatgctcgcctgtacctcgcctacatgggcgcggtttaagaggagcatacataggcgggactgaccgataccgccgccgatggtgtaaggcagctggccttctaacagcatgcggtggtagggcagagagcggcggtcttcacagcctgctttcttaagctgttcctccagggacttctcatccacacggattcccatgctggagatctccagggcacagtttaagttctcaaaccagaagagaatatcaccgtttaactgccagtcatcgtagtcgggagctctgccgtcgtgaggctcgccgctggccagcttatcgccgatctgcattaagaaaacgcagccgtattcttttgtaatcaggttttccctttcctttggcgtcttgcccgggtaacggtcttccagctcctgggaggtaataaaggtgatctcctttggaaggtggttgactgcgttcgggtacttataccagacctcgtgctgcatgtgcttgataatcttaaagatggttcggactgtctctttcaatgtttcgatggtacgatcctcttttgtaatgaccttttcccaatcccactggtctacatagcaggagtggagattatccagctcctcatcgcgccggatcgcgttcatatttgtatagagcccctcgccaggctgaaagccgtattcgtgcagggccattcgtttccatttggcgagagagtggacgacctccaccgtttcgccgggaattcctgctatatcaaactggacggggcgttctacgccgtttaaattgtcgttcaaaccgctgctcttctccacgaagaggggggcggagattctctctaagttcatttcctttccaaattccttctgaaaggtgtcgcgtatgtatttgatggcctcctgcgtctcacggacggtaaggtgggggtcatagttttctggtatcatgagtgccatttcattgtcctcccggtataatatcccttttatggtatcattattacagaaattccgcaagtattacaggggagggaagcttaaaaagttgcatggttccgggcgttgtgctatgataagcagtaagtatgaagaggaaaagtcataagagaagagagcagagaaagatggtaacagaacgaattataatagaagatacaagtcagattgatttgaaaaaacttgaaaaggcggcagcaattctgcgggagggcggtctggtggcatttccgacggagactgtatatggtctcggtgccaatgccctcgatgaggaagcggcaaaaaagatttatgcggccaaaggaaggccttcagacaatccgctgattgcacacatcgcggatttttctgatttgaagcctctggtagcggagataccggagacggcaaagaaactgatggaagcgttctggccgggaccgctgaccatgatatttccaaagagtgacgctgtcccatacggcacgacaggaggactggatacggtggcggtccgcatgcccagcgaccctgtggccatgacgctcatccggctgtccggcgtgccggtagcggcacccagtgccaatacatcggggcggcccagtcctacgacggcggatcacgtatggcaggatatgaatgggaagatcgatatgattgtggacggaggtccggttgggatcggtgtggaatccaccattatcgatgtgtccggccaggtgccggttattctgcgcccgggtgccgtcacacaggagatggccggtgcggtgctcgggatggagatcgggctggatccggcgattacaggcgatggcccgatgaaggccgatgtgaagccgaaggcgccggggatgaagtataagcattacgcgccaaaggcggatctgacactggttgaaggggagccggccgaggtggcccggaccatcaatcatctggcaaaggagaagctgcaggcggggtaccgtgtggggattatctgtacggacgagacacgggaactgtatccggaaggcatggtgagaagtctggggctgcgcgccagagaggagaccattgcacataatttgtatgccgttttaagggaattcgatgatctggaggcagattacatctattccgaaagtttttcggccgaccaccttgggcaggcgattatgaaccgtctgaagaaggcggcaggataccatatgattcacgggggatgcgcagaggaaggcgcagaagccggtcgtttacagtaaaggaggagacaatgctgatgactgagaagagagaagattatattacatgggatgaatattttatgggagttgccatgttatcgggaaaacgttccaaagaccccagtacgcaggtgggagcgtgcatcgtaagccaggacaataagattctgtccatgggatataatggatttcccaagggatgttccgatgatgaatttccctggggcaaggagcatgaaaaggatgatccctataatgccaaatacttttactccacccatagtgagttaaacgccattttaaattacaggggcggcagtctggagggctcgaagctgtatgttacgctgtttccgtgcaacgaatgcgccaaggctatcatccagtcaggaatcaagaccattgtctacggcagtgacaagtacgacggaacgccggctgtcaatgcctccaagcgtatgctgaatgcggcgggagtgcggtattaccagtatcagcccacaggccggaagatagaaatcgaggtttaagttcaatatgaagtgtttgcttgcggcgctgaatgccaaatatatacattccaaccccgggatatacagtctgaaggcctatgccatgggacggctggaacaggattctgcctgccttaagcgggaaatctcggtggaactgggagagtatacgatcaataaccagatgggagatatcttaaaggacatctatttaagaaagccggatatcatcggcttctcctgttacatctggaatataacctgggttatggaacttgtgcgggacctgccgtccgttctcccggaagcggagatctggctgggaggtcccgaggtttcttatgacgcggccgatatcctggagcgggagccgaatgtcacgggcatcatgatgggagaaggggaggaaacctttctggaagtgctgaagcattacgcggagggcagaagggacttctttacgatcgatggtgtggcctgccggaatgagaagcgggaggtagtcagccggcctcttaagaaggctgcggatatgagcgccattccgtttccgtatgaagatttgcatgattttgagcataagattgtctattatgagagcagcaggggctgcccgttttcctgcagctactgtttatcctctctggataagtcggtcaggttccggaatctggagctggtgaaacgggaactggatttctttctggaacacagggtgccccaggtgaagtttgtggacagaacctttaactgcagcaagaagcataccatggaggtctggcgtcatatcacggagcatgacaatggggtgaccaacttccatttcgagatatctgccgatttgctcgatgaggaggaactggaactgatggcacagatgcgtcccggattaattcagctggaaatcggcgtacagagcacgaatccggataccatccgggagatccggcggaagacggatttgaaccgcttaaaatcggtggtggagcgaatccacgggtttggcaatatccactgtcatctcgatctgattgcaggcctgccttacgagggatatgaaagcttccgaaactcttttaatgaggtatatggcatgaagcctgatcagctgcagcttggatttttaaaggtgctgaagggctcttatatggctgaaaatgcagaagcttacggtctcgtctacagtgcaaaaccgccctacgaagtgctgggcacgaaatggctcgactacgaaagtctgctgaaattaaagggcgtggaagagatggtggaagtctatgaaaacagcggtcagtttaccgttaccatgaaagagctggtgaaggaatttgacacgccgtttgacttattctctgaactggcggaatattatgaggcacacacgctgactggagtcagtcacagccgcatggcaaggtatgagatattagacgggtttgtggcggaacacataccagataagctggaactgtacagaaggctcatggtatatgacctgtatctcagagaaaatctaaagagccggccggattttgccgaagaccagaccccatttaaagagaagatacgggaattctttgcaaaagaggcggtgaatcatcgatatttacgtgaaggatacgaggactttgaggcgaggcagctgattaaaatggctcatcttgaagtgtttggaggaaagacggcagtgctgtttgactacagacagcgggatccgctgagttataacgcggcggcttttgtgattgatgagttctttcattgagaggaaaataaacaggatatggcaaagagagagacgaaagcggagtttaaagcgcgtgtggatcatgtgctggcagctcttgatcaggaatatggaacggagtacgtctgctacttaaaccacgagaccccatggcagctgctgattgcagtgatcatgagcgcacagtgtacggatgccagggtgaatatcgtgacggcggacttattcaaaaagtatgactccatcgaaaagtttgcaaatgcagatttaaaggagctggaaaaggatatccactccatcgggttttaccacatgaaggcgaagaatattatttcctgctgtcaggggctgctggaacggtttggcggccaggttccgcggaccatcgaggaactgaccagtctggccggcgtcgggagaaagacggccaatgtcatccggggaaatatctaccatgagccaagtatcgtggtggatacccatgtaaagcggatctccagaaagctaggatttgcgaaggcggaggatccggagaagattgagatggagcttatgaaggtgcttcccaaagaacactggatcctctggaatatccagattatcacgctggggcggagcatctgttttgcgcgaagcccgaagtgtaaagaatgcttccttcgggagtactgcccgagtgcggagcagtagggggagcagatggtaaattcctatgttgcggtggacttggagacgacagggctggatcccaaacgggacaaaattattgaaataggagctgtgcggattgaggctggcgaaatcacggctgaatttgagtcgtttgtaaatccgtaccgcatgctggaggcgaagacgagaacactcaccggaatccgtgaccaggatgtcgttcatgcgccggggattgaggaagtgcttcccgtttttttaaactttgcgggggaactgccgcttctggggcacaggattatctttgactacagctttttaaagcgggcggcggtcaatcagggggaatcgttttcaagagcgggaatcgatacgctgacacttgcccggctgtttatgccggcggaagagaggaagaatttaaaggcggcctgcggctggtttgggatcgatcagagagaaacacaccgcgccatggccgacgcggttgcagcgcaccagctttatcaggcgatgaaaaagagatatggaaaggaacgcccagatgcattttccgaaaaaaatcttatttataaggtaaaaaaggagcagccggcctcaaaaaggcaaaaagaacacttgcaggatttaataaaatatcataaaataggcttaactgtgcaaattgaccacttaacccgcaatgaaatctccagaattacggataaaatcatagcacagtatggaagaatatgagagaggtgaatatcatgattaactttaacgataaaaaaaacaggaaggtcgtttccatagttcttatcgcagtggtaattctgctgatcgtagctatggtactgccgatgatgatgatccgctagaagaggaaagcggcaggcagcaacttgaaaattgaggaatgattatgaaaaacgaaaacttggcagcaggccttgctgctgtggtgctggcggtggggctgacactggccgttccggcaccggcgcgggccgatacccttccggacggactctatgtaggagaatacagtctgggaggaatgacagaagaagaagccggcgaaaagattcaaagtctggtaggcgagatggagaatcaaaagattacgctggtcgtggatggagagtccgtggaaactacggcgaaggaactgggctttcactggtccaataccgacgcggtaaaccaggcggcagcttccgtaacgggagggaatttaatccatcgatatttaaacttgaaagacatcgaacataaccatgtcgtcataccattggagaccgctttcgatgatggtaaggtggcggcattcgtagaggagaaatgtgcttctgtcgtagcagagccaaaggatgcgtcgatcacgagagagaatggtgcgtttgtcatcactcccgccgtggttggaaagagtgttgatgtgggagccacgaaagcggctcttgatgaggcgatttcaggcggacttaaggaaccggtgaccgtgactgctgcagtggctgatgctcagcctgccattacaacggaggcgctgtcaaccattcaggatgtgctgggaaccttttccacggatttctccagcagcggtaactcccgggccaccaatttacgggtgggtgcgggtaagatcaacggccatgtgctgatgccgggagagacgctctccggttacgaatgcatgcatccgtttacaacagccaacggttacgccactgccgccgcctatgagaatggccaagtggtggacagtgtgggaggcggcgtatgccagatatccacgacgctttacaacgcgtctctccgcgcagaactggagattacgcagagacagaaccactcgatgatcgttacgtacgtgaaaccctcggaagacgcggcgatcgccggtacttataaggatttaaagattacgaacaattacagcactcccatctatgtggaaggctatacgtcaggcaaaacactgacctttaccatttacgggaaagagacgagacctgccaaccggacatttaagtttgtgtcggaaacgctggcgacgatggatccgggaccgccgaaggaagaggtggacccatccatggagccgggtaccagaaagcaggttcagtcagctcacaggggatataagtccagactgtggaagtacgtctatatcgacggagtggagcagagcaaagagattctgcatacagacacatacaacgcctccaaggcgattgtgaaggtcggaccggccgctcctgcagtaaccgtaccgcttccggaggagacgactgctcctgtggagactcagccggccgagccgtcgccggtggaaggggagaacggaggaccgggtgtgactctgccggaggcagcggcacaggaacctgctccggcaccggagcccgaagcacctgccgtgtctcccgtaccggagcctgaagcagccggtgcggcacctgccgtgtaacgggagtcaggcatgaggaagattgaaagagagaataccggccgtatggagccgggacagaatctggttgtggcaggatatgcgggatacgccggcacggtggagattgtgaggcagaagcgcggagaactgcttacatggtttacggaaagctatttagaccggattatggaaaatgaagatggaacactgagtgggaatctggaacggtggaaggcatttggagccacggagtgtgaaccggcaggggagggcggaatactttccgccctctggaatttatccggggcatacatgacgggcatcgaattttcgctgcgccagattcctgtcaaacaggagacaatcgaagtgtgtgagcggtataatttgaacccataccggctttattcagacggctgtctgctctttgtcacagacaatggcggtgagatggtactgtccctggaacgggagggaatccatgccgcggtgattggacgggtgacggaaggaattggaagaatcatcagacacggggaaagcaccggctatttagaccggcccgcggaggatgagattcataaagtattataagcagtcatgataatcaatcattttaatcaggaggtaaggttatgagagaaaagatattggcggttattgaaaaaaacagcagaatcgacttaaaagatctggcggttcttctgggggaaagtgaggctgcggtcgccaatgagatcgccgagatggaaaaagagcatatcatctgcggataccataccctgattaactgggataataccagtgatgaaaaagtggttgccttaatcgaagtgaaggtaacgcctcagagaggcatgggattcgataagatcgcggagcgcatctaccagtacagtgaggtggaggcggtctatctgatgtcaggcgcgtatgactttaccgtatttattgagggaagaaccatgagacaggtggcacagttcgtctcggagaagctctccccgatggaatcggtattaagcacagcaactcactttgtacttaaaaagtacaaggaccatggcaccgtactcgctgaagagacgcaggatgaaaggatgttgattaccccgtgagaaatccattatcagaaagaatcgtagagattccgccatcaggaatccgtaaattttttgacattgtaagcgaaatgaaggacgcgatctccctgggcgttggtgagccggattttgagaccccatggcatatccgggaagaaggaatatattcactggaaaagggacggacgttctacacgtccaacgccggactgagagaattaaaggttgagatttccaactatttaaaacggcgttttcatgttacatacgatccggatcatgaagtgatggtgacggtaggcggaagtgaggccattgacgtggccctgcgtgccatgctggatcctggtgacgaagtgctgattccccagccgtgtttcgtctcctatgtcccgtgtaccattctggccaatggtgtccctgttccgattccgctggaggaaaaagacaactttaagctgacaaaggaaaaactgcttcagtatatcacaccgaagtcgaaaatccttgttctgccgttcccgaacaatccgacgggggcggtcatgaccgcggaagagctggcggttatcgcggaaatcgtggtcgaaaaggatctgtttgtcctgacagatgagatctacggggaactgacgtacgggatggagcataccaccatcgcttccttccctggcctgaaggagcgtactgtgctgattaacggtttctccaaggcgtatgccatgaccggctggcgtctcggctatctggccgctccggcagtgattctggagcagatgctgaagattcaccagtttgccatcatgtgtgcgcccaccaccagtcagtacgctgcggttgcggcacttcgggacggagataaggacgtgcagatgatgagagagtcatacgaccagagacgccgtttccttatgaatgcatttcaggagatgggactggagtgttttgaacccaacggtgcattttacgcattccccagcatcaaacgcttcggtatgacctccgatgagtttgccacaaggcttcttcaggaggagaaggtggctgtcgttcccggaacggctttcggcgactgcggagagggatatctgcgtgtctcctacgcatattccctaaagagcttaaaagaggcgctgggacgtatggaacgctttgttaagagattggatggaaaggcatagaacacgatatgaatgttgtattactggaaccggagatgccggccaataccggcaatatcggaagaacctgtgtggcgacggggacgaagcttcatctcatcgagccgttggggttcagactgaatgacaagctgatcaagagggccggactggattactgggataagctggatgtgacggtttactgcgattaccaggatttcctggagcggaatcccggagcaaagatttatatggctacgaccaaggggctgaaggtatattctgacgtggagtatgaaccggactgcttcctgatgttcggaaaggagagcgccggtattccggaggagattctcctggagaatcaggagcagtgtgtgagaatccccatgtggggagatatccgctcgctgaatctgtccaactccgtgtcgattgtgctgtatgaggcactcagacagaacgggtttgagaagatgaccatgcagggacagctgcaccatctgcactggaaagaataggcaggaataaggaaggcggaacgattggtgatattatcgttccgccttctttttaaataaagattctttctgaaatttaaaaatagtaatgcattaaagattggtggatttgggaaggctgaaaataaattctgtccccacaccctcggtactgaccacatcgatattctccccatgggattgaatgatctccttcacaatggcaaggcccaggccggttcctttcttatcctttccacgagacaaatctgatttgtaaaaccgttcccatatcttcttgatactgtccttcgggattccgattccggtgtctttcacggagatgaatattttttcatattttccggaagcctgaatgtaaatggtcgaatcgtgatggctgaatttgatggcgttgtcgatcagattgtacattacctgctgaatctttcccagatcggcgtagaccatctgaatattgttggagaaggtcagatcaaaattgatgtttttctcctcgcacgttccctcgaaggaagccgccgtgtccttaatcacccggttgatatcaaaattcgtgcggtttaaatatcccttgctgtccagtgtgttcagcgtcagcatcccctgtgtcagcttgttcagccgttcggtctctgtgattacccgcgtcaagtacttttcatacatttccggagggatcgttccatccagaatggcctcaaggtaccccttgatagaggtcaggggagagcggaaatcgtgggacacgttagcgataaatgtcttctggtactcttccatcttgttcagttcgtctgacatgtaatttaaggtagccgccagatatcccatctcatctctggtattaacatcgatatgatgggtcaggttcccctgcgcgtattcgtttgctcctgctgtgatttttttcagcggaaagtaaacggtttttgtaaagacgagaaggataatcagggaaaaaccgaatacgacggccagcgtaaggtatacaatatttaaaataccgtctcttgtgttctgcaggacggacaggggcatgtggatgacgacatagccgtaagtcgtgtaattcccggtgatgggggcatggacgctcaatacatcataagtgaactggtcatagaaggtaccgatggtatatgatttattgcccgccgctgttggatcgaagcggtcaatgacccgtccggtcctctctgactggtcgctgtctaccacgatctttccctgacggtcgatgatccagatctgggagtgaaggtagtgggcggttcctaccagctggggataggaggagatcagatccatatcttttccatggtacatgccgctgtaggtggaggcaacctgattggcttcgtcgtacagcaaatccgcctgctcacggattaagtatcgctctgtcattcgggaagacagggtggcgatggaagcgaaccctaaaaggccgaagaccaggtagccgagaataaacttgtaataaagggaatgagtcattgtgattctccattttcattgatctgtatgttcaatccgccggaacgaatgagggtggcgtccggtgttaaattaagtataatactttttggcgattaagtcactacggatttttgaaggaaccggatgatctgaaacgcttaatggcaatgagggcaggagaaggaccgcaaatcacagggatcgcataaaaggaatgctccgtccttccggaaaagattccggttggaggagcatgtcgtgtgttctgaaaatcggtttactttgcaggctggatatcggtgacaatggtatcaagattgtccggtgtgggtaatccgttggtatagcttactgttattttttctccggattttatgtctttatatttttcgctctgtgtctcatccagagtaaagacatatgcttcttcgtcatcgtctgctacgacggtaatcataaagcctttgttttcctccacaactccggtaacagtgccttcgccctcctgggaatctccggtggaaagatcagcagcatcagcttcagcggtgccggcatcattcgttctgtcggcgtcggcggtagtttctgtctttgcagcagcagttgaagcagagccctcgttttttgctgagcatgcagccgcggatactgtgaataccaggattgcagcgatgatgaataatttctgtttcataataatcctccatatgttttttatttacgaggattagacgcggcagagacgtaaaaagttgcagaaaatgaaatatgtgttttattcagtgattaccatagcaggcggagttatccacaataatgtggaaatgtctgtggattaattgttaatatctgaaaattgtaagcttatggatgtggaagatacaaaaatggggattgagagtgtggataacggaaagatgtgtggataaagataaaaatacggaaagatagagcgatatgagaaaaaatatggtaaaataaaaacatgggcatcaggaaatctgatgcccatgtacagctgtattaacagatacttaaaaagcgtgttccgatcctctaatatatggtcttaccgtttcacttcaaatttataaccaatcccccatacagtcgtcagcgcccagctggcatgatctttaatcttttcccgcagacgtttgatatgtacatccacggttctggtatctccaatatattcatatccccagatgtggtccagaagctgttctctggtaaagacctggttgggcgaagaggcgaggaagtaaagcagctccagctccttcggcggcatctcgatggaatggcccatatagatgacggaatagttggtcaggtttacgatcagatcgggatattccacgtaatcgccctgctggtcagtctgggcagctgccggcacggcaggctgctgataacggcggagcaccgccttgactcttgccaccagttccttagagtcaaagggcttgatcatataatcatcggcgcccagctctaagcccagcaccttgtcgaagacctcgccttttgcggacagcatgatgatgggaaccggggactgagcccgcatttcccggcagacagaatagccatccatgccaggaagcatcagatcgagaagaaccagattcggtttaaattccggaaatacccgaagcgcctcttcaccgtcgtttacaataatcgtttcaaaacactcttttgttagataaagagaaatcaattcggcgatgttattatcatcgtcaacgatcaatattctctgtttttctgccatagtccaatcctcctatttaaaagtgacgatcgttacgccggtatccccctcgccgaatacacccagccggaaatctttgacgtacttcagtttttttaggtgcttgtgaaccgcattcttaagtgctccggtgcctcgcccatgtacgacacgaacggaaggcaggtgagccagataggcgtcgtctaagtacttatccagctccggaatggcctcgtcggtggtcattccgatcagatttacctccggagagatggtaaaggacttggacatgcgggcagagctgcttccgcttcctgtctttttcttaccattgccgcttccaagagtggggcctgagacagactgctcatttaacagctccagatcgctcaggttgacgagagagcggagaattcccatctgtacatataaatcccctttggaattggggagagaacttactgttccatttaaattcatgctgagaacacgtacgccgtcgcccagctttaactttttcggatcgatggactgtttcggctctttcgtctgattttttaaggacagcgaggaatctacttcctttagcttgccgcggatacgggcacgctctgcctccagttccttaccgacacctgattcggaagccagcttgtttatctggcggatcgtctggtctgcagtatcttttgcatcccgcagaatccgctgcgcctcctctttggcgtcacggatcatcttgtcgcgccgctcatcgagacgttcttccttctgagtcagcctggccttcagtttttctacttccatcttgtaagactcgatctgaatgcgttccttttcaatggtgacgcggttctgttccagatgggtaagcagatcctcgaaggtttcatccttggcttccagatgcgttttcgcgtcctcaataatatagtcgggaagtcccagcttcgatgaaatggcaaacgcattgctcttgccgggaactccgatcaggagacggtaggtgggctgcagcgtctccacattaaattcacagcaggcattttccacaccgggggtggtcagcgcaaataccttcagctcgctgtagtgagtcgttgccatggtacggcatttcatattgtgtaaaaatgacaggatggcgatggcaagcgccgcgccttcggtaggatcagttccggctcccagctcatcgaagaggcaaagcgagcggctgtcggcctgccccaggatctgtacgatgttggtcatgtgggcggagaaggtactgaggctctgctcaatactctgttcatctccgatatctgcaaatacctcgtcaaagacggagagttcggaaccgtcgaacgccggtatatggagtcccgcctgaccgatgagcgtaaataaccccacggtctttaatgaaacggtcttaccgcccgtgttggggccggtaactaccagcagatcgaaatccctgcctaaatgcaccgtgatgggaacgaccttcgacgggtccaaaagcggatggcgcccgtccttgatgtgaatgattccctttttgttaaaacggggctcactggcctgataatgccgggagagcgccgccttggcaaatataaagtccagtctggtgagaacctcgaaatcggtcagaagttcgtcctgatacgggaccagctgattgcttagatcggccagtaccatctcgatctctttctgttcctggatttccagggcacgtaagtcattgttcagcttaaggattgccataggttcgataaagagtgtggaaccggtggaggactggtcgtgaaccatgcccgggacattggacttgtgctcggatttgacgggaagacagtatcttccgtcgcgcatggtgatgaccgcatcctgtaaataggttcggttggaattcaggatagaattcagctgagtgtgaatcttgtcatgaatattcttcatggagcgccggacgtggtgaagacccggactggcatcatcgcttacttcctcttcagaaaggatacagcgcctgatctccgtatttaccggggtcagtggttccagcacggaaaaaaactgctccagagaatcctccggaagctctgaatcctcgtgccgcccgtatgatttggcgcgggccgcggtagtaagtaaggagctgacggagagaagttccacgataccgagggaactccccacctccagccgttttaaggaggcgcggatatctttgacgcctccgaaagatatgccgcctttctggcgcaccctggtaactgcgtcggtggtctcccgctgagcagttacgatctcatcgtaatcgatggagggtaccagcctgcggcagagttcttttcctgattcacaggaagcgtactctgcaagctgaactattattttatcgtattctaacgtttttaatgctttctgattcatgatttcctttctctgtttccaatataatatcagacgatggcggacagccctgatgggcggtagtgattacagtatatcataaatacagtatggcctgcaatcatataaatcttcaatctcgccgcgtttaagccgttggattggaacgaaaccataaatcagaaaagcgtgctgcaggggatcttatctgagaaatggtgagagctccacacgaacgaaatatccctgttcatgatgacagacagggcaggctttcggggcctgaaggccatggtggatatggccgcagtttaagcagatccatccggtctctgcatcggatacaaagagcttattctgctccatatagtcggcaaacagctgaaagcggtctccgtgtactttctctatttcagaaatgagggagaaggaggagctgatctgcagaaagccttcctgcttcgccacttctgcaaaatttttatagacatcctgatattcctcatattcattgtggcgtgcggactttaataaatccacagtctgatcgtataagtccaccgggtagccgccgtcgatgaaaatggtctcgccttgtaattctttgagatattgatagaaaatctctgcatgctctttttcctgccctgcagtataggaaaatacggcctgtataaccggaagtccttcctttttcgcctggcttgccgcaaacgtatagcggtttctggcctggctttctcctgcaaaagcacgcatcagatttttgactgtctcactgttttttaaatcattcattgtaaagtcctccttggataaattttcatgtgataccaacagtgtccctctaaatccatattttatactactaggcagagactattcacgtccagcccggcctcccacagcccgcttcggctccggtgcattccccggcgcatcctgtgactttgcagggcattagcaattcttaacgcgcataatttttcgttcaggggaaatccccacttgtttgagcgcagcgagtttggggattttcactggtttttagaaaaattctgcacgtttagaagtgcttatgcccgaaaccggaactggaggggccggggaatgcaccggagccgaagcgggctgtgggaggccgggctggatgtgaatagtcacatttggttgactgcagttcgctgtgtttcttatcttttccttgcataaaacagagaagaaacgtataataggtttaggtcttctgcaaaggagggtgtgtatgccggataaaagcgggccagatgataaaaagacggaaccgcgccgttttatcagcgagaaaattgtgaaacagcccagaacaaagagagagatcatgagaagggcagtcgcccttttattaactgcggccctttttggaatcgtcgcggcagttacttttgttgtttccagaccggtggcggaaaaataccttggaaaagaaactacaagggagactactccggtaacaataccgaaggatgacccggaaccatcgacgacggaggagaccgagccgactcaggccaccacaaaggagtctgagcccatcgaagatcttctggagtcagcaatgaaaaagtatccgttcagcatcgatgatctgaataccctgtacgggaatttaagagcggtatcgttaaaagcgggaaaaggaatcgtgacggttcattccgttaagacgcagacagactggtttaataatccggtcgagaattcaggtctttacgcgggagcggtaatctcctctgccaatgaggaactgctggtactgacaccggaaggtgcagttgaggcggcggattcgattcgggtggcattttcagacggtacggaggttcagggaacgatcagacagacggacaagctgtcaggcatggcaattgtgagcgttccgactgcggaactgggaagagcgcttttagaggaagttaaggcgattgaactggggaattcctattccgtaaaacagggagatctggtaattgcaatcggaggaccagccggcatggtgcattccacctgttatggttttgtatcctatatagcgaagaatgttcagatgacggatgggatgacccgtatcatttactctgatttaaagagcaatgcggcgacaggaacattcctcatgaacacgaccggtcagattatcggctgggtgactgacgagtataagagcgaaggcagcgaagatatgactgttgccatggctatctctgactacaagagcattctggagaaaatgagcaacggcaacgcgttcccgtactttggcatcaagggccaggaggtcagcgcggtcatgaatgagagcgggatgccgctcggcgtttatgtagtggatgtgaatgcagacagtcctgcctataatgcagggatccagtgcggagacattattacggttatgggcggtgagaatatcgttaccatgaaggatttccaggtgaagctggaggcgtcgacaccgggagaggtattaccagtaacggtactcagaagcggcagagatgaatataaagagattgaatatcagataaccataggagccaggtaatcttcctggcttctgtgacgcttaaaaaggatatggaggagaacaatgagatatatagagacatttcgggaagggatgcatgtatcggatgtatacttatgtaagaataagcagatagccctgaccaaggcaggtaaagaatacgggaatttaatcttacaggataagacgggtaccatcgatgcaaagatctgggacttgagctctccgggagtggggaatttcgagacgatggactatatctatatcgacgcggatgtcaccatgttccagaactcgaatcagctgaatgtgaagcgggtcagaaaagcggaggaaagcgaatacataccaggggattatcttccggtgtccgctaaaaacatcggtgagatgtatgaggaactgatcggattgattaagtcgatccggactccccattacagaaaactggcagaaagcttttttgtggaagacaaggcttttgcaaaggcatttcagtttcattctgcggcaaagagtgttcatcatgggtttgtaggaggccttctggagcatacactgagcgttgtgaaattatgtgactattatgcagggtattatccgctgattaaccgtgatttgctgctcactgccgctatgtttcatgatatcggcaagacgaaggagctctctgtatttcccgaaaatgattatacggatgacggtcagcttctggggcatatcatcatcggtacagagatggtgtcagagcggattcgtacaattccggatttcccggcgaaggctgctacggagctgaagcattgtattcttgctcatcatggagaactggaatacggttcaccgaagaaaccggctcttttagaggcgctggcattaaacttcgcggataataccgatgccaagatggagactatgatcgaagtgctgaagggtgcgggagataataacggctggcttggatttaaccggctgctggagacgaatgtgagaaagacatcagagtcctgatatatagaagtgcaggaagttctattataaagcacagctgaaaggagcagcagccggaaacgtacggccgctgctccttgcttttacagatggtaatgctggaacagctgcctgcgcagctgttcattccctgagatctccgcgatgagatccagccggttttctttcaaaaggatggagattaggctggccatacggacttccccttctttttccccctccctctttccatctgcaatcaaatcatcgatcgcctgacacatggtatacccctcctctcgtccaggagcggctaaatacttcatcagccgccggttttcacccaaaaggcccatgactgccgtcagggcattatcatccagcatggatatctggtcatggtttgacgtgatatagttgtaaaatttactcttatctgtacaatattttagcataccgaagacctgttgtaaacccgttttgtagaggctcagattttcaatttttctgatatcgacaagattgatgcggtagtcgggaagagcggccagaagatccggaatacattccgtgggacctcttaaatccagcatatcgtagagactttttggaccatcccatggatcctttccacagtacaggaccagtgtgaggacaggctggagtttgtcacggcgggtgatgccggacagaaattccgggcttttggtaagatctttctttttcctgtgttccttttgaatctctgtaagctgttccgtataatccaacgcatcataagtcaggcttcgaatgggcatgccgtaatggatctctccctgagcctcgcagcctgcaacgataaagcaggcgcctatggatgctttcatcgcgatatcgcgccgcctctgaattgtttgtttcctgccgctgcggttcgttatcgcgattccggattctgtagataccggtgacaataattccgcttttaaaatctgttttccatggaaaatctcggcattatacaggtccgcaaaacgggccgggtcctgcagcagctttttaatataaaaatcctgtctgggcacaccaccattcctttctcattttaatttgttgtaggttcgtcatggaaatgccggcagaagtgccagagatacatgagtgataagatggataaattcccataattagactgtgtatttcagtatatcataatcgggctctaaagacaagaaaaaactctttagaagagtgaaaaataccgccatattaattgcaactttctgggcgatgagttgaaaccttctgcaaaccatggtaaactgaacgaaaagggatttaaacagatcgttgatcaggcaggaaacaggtgacgatgcagacgatagactttcggctgcatcatattgtgcggtactgtggtttggagagggggaatgcattcgctgtgagttttgaagaaacatttcataaaataaagggtatcgaaaaactgcttcagcttaatccgcggttttacggctggtgctattttggaaagattcattctatgtatctttacagtgattacgattatgaggagtggttagaaattcagaatcttcggatggtgatggagtcggaggacaaggaataccgcgtgactctcttttttcgggatgtcacttccttctatctggcgcagtctgcagggatcagtggatttgagatcgaatgcagcgatgatcatgcctttggagaccggaggaattttcatgtgtatgattttgaggaaggggatatccggttttactgtagagagatagagatagaagaagtcgtgaacagggaaatgataaagagaaaggaagagagcgcattggcttatcacggtgattgagccattggaacaggcagccgggaggctggaaggaggagcggatatggagtttggtatgccgtttttgatggaaacggatactctggaggagtgtgcccggctgtgcagccaattgggactggattttatagaactgaatatgaattttcctcagtgtcagctgccggaactttcggcagaccggctgcggcggattatggatcaggaacatctgtattttacgatccatctcgacgagaatctgaatgtctgtgattttaatccaaaagtccggcaggcgtatctggagaccgccgtagagacaatcgaactggcaaaggccattggagctcctgtgatcaatatgcaccttgcaaagggaatctatctcacgctgccggggagaaaggaatatctgtttaagcggtatgaagaggagtaccggaggcatattgcggaatttggagagatgtgccgggacgcagtcggtgacgcggcgatacatatggcggttgaaaatacggaaggatttatggaacatgagaggaaggcactggaacttttattgcagcagccctgtttcgggctgacactggatattggacacagccatgccgcggggaatgtggatattcccttttatctgacgtatgaagaccggctgattcacatgcatggccacgatgcaaagggtaagagctgccatctggcgttcggtgatggagagatcgatctggaggaacggcttttgatggcagaaaaggcaggggccagagtggttctggaaacaaagacgatagaggcgctgatgaagaccgtatcatggcttcggaagtgagcggcggcagaagaggagattatgatgctggaactgcacggctggattacatttcgtgaaacgtataagggggtggaggactgtcagttcgaacagatcatgaaggacattctcagaaaatgtgagagcctggagtatcatcaattgaagccgagagccatggacggagagtggtatcttgaaacgacgctgtttgccaaccatcacaacccggaggtggaggaattgtttgaattccttgcgtatgcggcttcaagggcgccgggcagttatggcgtgttctatatgcatgacgatgaagaccggacagggcgggaaaatgaatttcaggtttttgtgatagcgagagggaaaattcgccgtgaaaaggatccgtttctatcaccattcatacctgcggtggaagacgcctgggtatgagaaaaacagaggccggagaaaacgaaagccaatcgtatgacaagaatttactttataagttaaggttcgtgttttgcattgccgttggaatgtttattgcggaacctgctgttgagtacaggtgcaattgatttctgtatggccagcaatgcgattctggaaacattcagcaagaattatgaaatctttaatctgccatatttatttgcaagttcggagacataccacttatgtttctatcctggtggggcttgtgctggtcacgtatattccggctgtcagcatggcgcttccgacgatggccgggctggtcaaataacaaaaaatcaaatatggttttacgcagttgaaaaaccgtctgacacagtgagtgtgtggcaggcggtttttttgtggctccaaacctgctgtccggtgactgcaaacgtttttaaataaaagatttagaatttctttcgttttacacgtcgttcattttaagattgcccatatatcctagtattgcaggcaggaagggaagaattatgcgtgtttgtggcataatacagagaggcagggcttttaggaacccggcgttcatgatatactgtagtttgaatctgtatcaaccataaaatatcaaaaagcgaggagagataccatggaaacaaatcacattctgctggtagaagatgataaggagattagagaaggagtcgagatatatttaaagagccagggctatgaagtattccaggcggccgatggaatcgagggccttaagattctggatcaggaagagatacatctggctatcgtggatgtgatgatgccgagaatggatggcattaccatgactgtcaagctgagagaaaaatacgactttccggttattatcctttccgcaaagacggaggaggtcgataagatcatgggactgaacatcggcgccgatgattatatatcgaaaccctttactccgatggagctgcttgcaagagtcaattcccagctgagacggtacagaaagtacctggatatgctggaggcaaaggaactgaaggaaaagagcaatatttatgtcattggcgggctggagcttaatgaggatacggtagaggtgaccgtggacggaaagccggcgaagcttacgccgattgaatttaaaatacttgctctcctgatgaaaaatccgggcagggtattctctgcggaagagatatacgaacgtgtgtggaatgagcgggcgatcaatacggacaccatcatggtacacgtgagaaaaatcagggaaaagatagaaattaacccgaaggaacccaaatatttaaaggtggtgtggggagttggatacaaaattgaaaaacaggcatagaatcagcgcgctgctgtccgttcttatcgtagtggcggcggctgttatcatgacgggattgtacccgttttttgaaaaagaggcgggacgccatgaggaacccgtatatgaggatcaggcgtttttgcgccatctcgtctttggcaattacgtgctggatttggaacagtcccagtatgaaaacggtgtggtgatttcacctttcgagcaattttttccggaaggcgcctatgaactgaaaaacggatctatggacggattcggggcgcaggcatctgcggtaccggaagggacggatcagccggaagatacggatcggccggaaggtgaggcggcagcggagacggacagccggacaccgcaggtgacagcgtcggcagcgggggagaaccctgcggcatcaggggaaagcatccccggtgcagatgccgatgtccatgcggcggacgaagccgcagtatttgcgggggaagataccatatctttcccggaagagatcaattatgacgctctcacggacgaggagaaacgttatatggccgaggagcggcaggaatacctgcgcaatctccgtcagaactgcatgatggaatacgagagctggaaccggtattttggaagtatcaggaattccatagattatcaggtgctggatgataacggaagcattctgatgaattatgcaaagaacagaaacatcttatccgacgacgattatgtattccgcgttgtgatgcattacgacgaccagggacggatggatgtgatgcagctggggggagaggacacaacatatcttctgaacgtgattcagaagttcggggaagtcgatcccatggaagagtattactgggagcagtacagccatgaaccacagctaaaactggagaatccgaagaacatcacatttgcctacgctatgacggagcagcagctggccgagtattctctggcgagaagctcatcctggaagtcctattataattcgggaatcgtagcagacgtatttgccggcctgggagtttttgtggcattagccgcgtttctgttatcctgctgcgacgtgacacgggcggatgacagcagggtgttccgggctcctcttggagttgtcctgggggttggggccggagcgatcggctttggctacagtctgaccagcctggtggctgtgaccaatcatgggagcctgtattccgggctgatccgtgccaatttcctgccgaaggcagcggatatgatggtgaagctgtggaacgtattctggtggtgtattccgtttgcagtgatctactgggccgtcctttgtatgcgggatgtgttccacatcggattgaagcgttatatcagagaacggacgttatgcggactgttttacggctggtgtgcaggactcttccgaaggctgtatgcgttccttggaagcatcaatctgcaggatcattcggacaggacgatatttaagattgtcggtgtgaactttattattctggctgtattatgcagcctgtggttttttggaatcggcgcactgattatctattcgtttgtgctgttcctggtactgcgtaaatactaccgtgacctgacccggaaatacagaatcctgctgcatgccaccaatcagattgccgagggtaatttggatgtgacgatttccgaagatctcggtgtgtttgaaccgtttaaaactgaggtacagaagattcagagcggattcaaggtggcagtggatgaagaagtaaagagccagaagatgaagacggacttaattaccaacatgtcccatgacttaaagacgccgctgacagcgattattacttatgtaaatctgctgaaagatgacaacgcggtgccggagcagagaaaagcttatattgacgtgctggaacagaagtccatgagactgaaatcattgattgaggatctgtttgaaatcagcaaagccaacagcaacaatgtgacgctcaatctggtcaatgtggatattgtgagtctcttaaaggaggtaagcctggaactgagcgataagatcgaagagtccaccattgatttccggtggaatctgccggacgagaagatcgtcctgccgctggacagccagaagacataccggattttcgacaatctgctgaccaatatcatgaaatacggcatgccgaataccagggcatatatcgatatgaaacgggacgatagcggagtggtcattaccatgaagaatgtatcggccagcgagctgaattttaatccggaagagataacggaacgttttgtccgcggcgaccagtcgcgcaatacggaaggctccggcctggggatggcgattgccaagagctttgtggaactgcagaacggaaagatgaatgttgaagttgaggcggatttattccgtgttattatccggtggccggtagagcagagtacggctgcggaagaagtcaaagaagaactgtaagaagaatttatgagatgcggtccggcagccgggaagaacatttccgcctggtggaccgcattttttattttctgggtcattttgaaaattattttcaaaatgatcttgaaatagagatgggaactggttatactaaggatggccggacagaagactgccggcgataagaaagagagggtgtatggtcatgataatacaaagtaaaaaggtctggatcgcaggccagtttataccagctcagctcgaggtcgtagatggaaagatcactgcggtccgcgaatatggcgaaagatccgtagatcaggattatggaaccaaaaggattgttcctgggtttatcgatgtgcatacccatggagcttatggatatgataccaatgacggggagccggagggcttacgcaactggatgaaacacataccggaggaaggcgttacctccattcttccgactacggtgactcagatgccggatgtactggagaaggctgtggccaatgtggcatcggtggtggatgatggttatgagggagccgagatcctcggaattcatttcgagggaccgtatctcgatatggattacaagggagcccagccgccggaagccatcgcacaggcccttgttgagcagttcaaacggtaccagaacgccgctaagggactgattaaatatattacgctggctccggagcacgatgcagactttgcgctcacaaaatactgtaaggagaccggagtggtagtcagcatgggccattcgtctgcaacctatgagcaggcgctgatgggcatagccaacggtgcgacctccatgacgcatgtatataacggcatgacgccttaccatcacaggaagccgggcctggtgggcaccgcattccgggtaagagatatctatggagagatcatctgcgacggctgccattcccatctggctgcgctgaacaattactttacggcaaagggccgtgatttcgtcatcatggtgacggattccctgcgcgcaaagcactgccctccgggcggcagctatcagctgggcggccacgatattgagatcagggagaatggactcgcctatctaaaggggaccgagacgatcgcaggaagcacgctgtatatgaaccgcggacttcgtattctggttgaggatgcgcttcttccatttgatcaggcgcttaattcctgtacgattaatccggccagatgtctgggcgtagatgacaggaagggaaaactggtggccggttatgacgccgacctcgtggtgctggaagataattacgatgtggcacagacgtactgcaggggaactgcaatgctgtaatggagctgtgccgttgataacaggaaagagagactgtggcaggccgagaaagaaccggtcgagatgccccggtctctctttttattattaatgtaaaaaagcggccccaaaacaggatttcttacgaattccagaatattctgcaaaatcatgacgccaaaaagactttatagtataatgaaaaaaaagaagcgcggttttacagtgagcgaggtgtgatatgaagaggaacctgtattggctgcccgtggctctggcttttctcatcggaatggccgctgcgggctgcagcaataagcagaagccggaggaaacggcttcagaggcagtcactgctgatacccatgaagaggaaagcggggagcgggagacggagagccagactgctgaagagacccggtcctatccggcaggaagcagggaggatgactatattcttccggaggcgcagaaccatatctatacgcaggaggagctgtcggacttaaccagggaagagcttcgcattgccaggaatgagatctacgcaaggcacggccgcaagtttaagagtgatgatctgaattcatatttttcaggaaaatcctggtaccggccttctgtcgatggagatgccttcgatgacagtgtgctgaatgaatcggaaaccggcaatttagcagccgtgaaagcggcggaagagaatgccccttcagaactggtgacatgccctaagatcggcaaagaggattttccaaggattgacggttccacggcgacgattcccctgtcacaggccatttaccgtcttgccgcggatgcgacggagcgggaggcggaacggttgatccggcatgataagacgactcaggcgtatttaaaactgatccgggatcagggaacggatctggttatcgcctatgaacccggagagagcgttaaaaaacgtctgaaggaagagggagataatctgattatcaaaccgattggccgggacgcgctggtatttatggccaatcaggggaaccctgtaaattccttaaccggaagacaggtgatcgatatctattccggtaacatcacgaactggaagacggtgggaggcagcagccgggccatacgggcgtttcagaggcctgtggactccggcagccagaatctgatggagaagcttgtgatgaagggaactgccatggcggaggcaccgcaggacttcgtggtttcggagatgggtgaactgattgaaaaggtttccgcctatgataatacgggggaggctctcggttattcggtctattattatgcaaaaaacatgtatcagaaaccggaacttaaatttatggcggtcgacggcgttatgccctccagcgataccatacgggacggaagctatccctatgtcagcgatttttatgcggcggtcaggaaggatgaaccaaaggattcaaacgcgtaccgcctctttgaatggcttacctcagatgacggccaggcgctgattaatgcgctggggtacgtgggagtaagggacgaaaagaagcttcttccccagggctttgaaggggaagatgaggtgtttcaggcggagattccgctttcaaagggtgaagtcatacttgcggatggagactatctttacggtgaaaatgggatcgcggtgttcgaccgttccatgaatctgatgaaattcatcaggcatgtggagagtcaggcgatttccccgtttctggtctgggacggcagcggcctgctttccatgcaggacactctgacaggcaattacgggctttattccgtcgcagaggagcgatgggtctgtgaaccggtgtacagcgatatctatcagacaaaggacggctatgggctggaacatgcggtatgggtggagtcggggagatcgggggaatggcattacacctacgattatgcggataaaaatggagcaatcacagaaaagggcgtacagtccgacaggaaaatatggggagaagagggaagtgaagagctctactacgatgtgaaagagtttatggagcactacccggagatcgcgatgggactggaagtgacatcggaagccgtctccatttatggtacggagtttcaggagaacattgccgtgatagagaaaggaaaccggaactattactataatatgaggggaaaatgtctcttcgagttcgataagagcggacttcctgccgggaaagagcagatgatgttcccgattattgtaaacgatcatgtggcctttttatctgtctatgatcccgatgggacagctgtttcccgcgactacatataccgggatggcactcttgtgaagacactggaatccggcagtacatccgggaatgtctcggatattgaagaagacttttatacccggacggctggtaattatctttatgtatacaattatcaggatgaaccgtgtgcgaagtttcttatgggatactataccagcgactgacggcggggtcagtcagccggagtgtggttttccaattgcgagacatcaggaaacgatgaaataactgtggaactgcacgctttatttatagaatcagagacaggaaaggtgccgcaggggcatatcatttagacccctgcggcacctttcctgtctctgattctataggatacggacattttttaaagcaccggtctttgcaaattccgtccattcgcagacattcacggcgtgatctccgatgcgctccaagtattttgcgatcatcagaagatcgatgcactggtcggcgtggtcggcggactgttttaagagatcgatcacatcattttttaccttggtaaacagttcatctacgatgtcatcctgtttttcgatggactttgcggcgtcgatatcctgagtgataaaggcgtctatggcgtttctcaccatttcgcgggcggccatggccattcccggtatgtgacgcacgacatgatagacgtgttctccacggattcgaagcacgagttccgcgatatcggaggcatggtcgccgatacgctctaagtccgtgaccacctttaaggcactggacacgacccgcagatcaccggccaccggctgctggcggaggatcagggagaggcagcgggcctcaatggagcgctctaagtcattgatggttcgatcgccgcgtatgattccctccgccttttcaaaatcctggtcctcaaatgcgataaagcactgttcgatggaagattccaccataaagcccatctgcttgatgtcgtcgtttaacagcgtcagctcgtggtcataattgattcttgtcgtcattttaagtaaatcctttctgaaattaagtttacataaattaaaaacagatcatccaaaccgtccggtgatataatcctctgtcctggaatcctttggagaggagaacagttccgtggtagccgcgtattcaacgacctcgccaaccaggaaaaatgcggtatagtcggcaatgcgggtggcctgctgcatgttatgggtcacgattgctaccgtgtacttactcttcagttcatccatcagatcctcgattttcagcgtggatatgggatcgagggcggaggtaggttcatccatcagaaggacttccggctccaccgccagggctcttgcgatgcagagacgctgctgctggcccccggataagccgagagcggattttttcagccggtccgatacctcatcccagagggccgcgccctttaaactcttttccacgatggcgtcaagttctgatttgctgtggataccatggattctggggccgtaggccacgttgtcgtagatgctcatgggaaatgggttgggctgctggaataccatacctacttttttacgcagaagggtggtatcgactctctggtcgtagatgttttcattgtccagcaggacctcgccttcgatttttacattggggacaaggtcgttcatacggtttaaagtctttaagaaggtggacttgccgcagccggaaggtccgataaaggcggtaattttattggtatacagctccatggagatgttttttaaggcgtgattggtgccgtaatataagtccaggccgttggttgctatttttactgtgctggtattcacgattctctaacctccttgttatgagcacttagcggacgtcttttggccgcttacgtgcgatacatgtcatctccacttagtgaggtctttcacgaacttagtagagtgacttgttgaatttgtgggataaatatttggcaaggccgttgatggcgaggacgatgaggagcaggaccaccgcgatgccgaaggcctgatcgtacttggctttctgcatggagaggtagagctggatggtcagcgtcccgccggattcaaagatttttccgaaaaagtcctttgccagtaagtaaccgcttcccgcggtaaataagagagccgcggattcgcctacgatgcggccgatggccagaatgacgccggttacgataccgggcatggcgctggggagcagaatggtgcggatcatataccatttggtagctccgattcccagtgcgccggagcggtagctgtcggggactgttttaagcgcttcctgggtggttctggtgataagcggcagaaccatgatggagagtgtcagtgcgccggttagtatggaatagccaagtcccagcgttgtgccaaagaatacgtagccaaacaggccgaagatgatggaggggataccggagagtgtctctgtggtaaactcaatgaggcagacggccctgccgccttttgcgtattcatttaagtagatggcggctcccacacccagtggagtggcgatgagcagcgtaatcacgacgatatataaggtgttgacgatgtttcccaggattccgaaggtacccctgattgtgctgggaacagtgcttaagaattcccagttgatctgcgggattccgcggaaaaaaacgtaccccataattccgatcagaatcaggatggatatggaggcgcagagatagatgaaaaaggtaagaacggaatcggatacccgcgtctgtctgcggcagatgctgttatttataacagagtctttatggaagggaactgcgatttcgttagtcatgctgtacatctcctttctttaagagcctggtcagagaaatattaatgatcataataaatgcgaacaggacaagaccaatggtaaagagcacctgtttgtgaagacctgccgagtaggacatttccgatacgatcgccgtcgtaaggaagcggacggagttgaagggaagcgggaaattgacggagcttcccgatacaaggctgatcgccatggcttcgccgatggcgcggccggtgcccagaacgatggctgttataatacctgattttgctgctggaagtacaacctggaaaatcgtctgaatctttgtggctcccagagccagagaggcgcttcgcagttcctttggaacggaacggagcgcggattcgctgatattgatgactgtggggagaatcatcagggcaagaaccaggactgcggagattaaattggcaccgcctgtgaactgatgggttgtggagccctcgaaaatcttaagttccagcttatacatgagaggatttaagatcaggattcccaaaagaccatagataacggaaggaatccccgccagcagttccactgccggacgtacgatccctgccagcctgggcggtgccacttcagcgaggaaaacggccgtcatgacgccgatgggaacgccgattaaaatggcgagagcggttcctgcaatggaagtcaggatcacatagagaataccaaaagcgggaactgcggcttccggtttccagacggtgccgaacaggatatcgaggattcctaccttaaaaagcgcgggggtaccgctgatgatcatgtaagctgtgatggaggcaaccgccagaacggcgaaaaaaccacagacggtaaagatgatctgcgccgcatgttccaccgcggatttgctgccgcgtccggcaaagatggagtaagatttcggatgcataagatggctcctttcatttatgcggataaaaggaacgtagtgtctgttaccctgctacgtccctttttatgatgtctgtttcagccgtcgggcttttagtttgccgggattaaaccaacggattttactaattcggtgccttcatcggagtagatgtagtcgaataatgcttttaccaggtcgttctgctcggaaatttctcctttggttgccataacgaacggacggcttaagaaataagatccggctttgatattttcaggagttgcttctgttccatccagctttaaggtcttaaccgtatcgtccagaacgtctaaggaaacgtagccgatagaaccgggagtggaagcaacctttgccataactgcgccggtgctgtctaattcattgctgtatttgcaggcgtcggccacatcgaggatttcctcaaatgcgcttcttgtgccggatccggactcgcggccgatgactacgatcggctgatcagtgccgcctgcctctttccagttggtaattgtgccgttataaatggaggtcagctgatctttcgttaagtcttccacggtgttagccggatcgacaacgactgcgataccgtcgatggctacaatgttttcagcgatgccgttggctttctcttcatcctttaattcacgggaagagttgccgatatctgcggagccgttgtttacggcttccacaccggcaccggaaccgacgaattcagcctgaaccgtgatgttcggatatttttccatgaagatctcactgagcgcggttgcaaatttttccatggaggtggaacctaccatactgatggaaccctttaagtctgcggaagccgcaggagccgctgtggttgtctcagcggaggcagtacctgctgtggttgtctcagcctctgactgtgcggtggttggcgccgcggttgattcggttgtattgctgccgcatccgaccagggttcccattgttaaaactgccattccggcaagtgcaagtgtttttaccatgttctttttcataattgttctcctctttttctgatatgatttcttacatttctttttatctgacatttggagtatactaaggaattgaatcagaagatatcaggattgagtataggttttgtaaaagatgtgtaaagttgtcggattagaggagcttatgaaaatgttaaagagtttttcatactttttagaaaggctttaggcaaacaacaaattttggacacatttgccgtgtatgataggtatcagaaagcccgacagggattgaacatagaagaagccatggtcataaagataagcgcgcttgatgtgaccggcttcgccaaattattacgaacagtttacatagatgaaaatgccgcatgcagaaacccgttcggttctgtctgcggcatttatcgtgtttatgattcttttatatactttgccgcgcagtgtccgcccggagagcatgaattacgggatgccttttgggtatgatgttatgatttgttatcagcagcccattcttgtttatgtgtagtcttttataaactgggctaaaccccaatatagactacatatataaatcagatttgtaaatacaatacggcttatatgttttggtaaagagtataaatgaaagtgttttaagctgcatgatgagattcatagtaaaaaaatcttgcaagtaatgcggagaaatgttatagtatatttaaagaggaacaaccgcccacaagatgggttggcctaatagttgaatagaaaatccaccctgctactggtcaagtttagggtggttttctatgttaagctagcgacaaatcaaataaatgaatgtcagtaacgctaagataaacattccaaaggccattaaatccttaaaatcgaaatgtttcatagacatcacctccatcctatgtagaatgaaggccaacgccaccctgcaacacgattgctccctaaagaaagtatatcatatgagttcaaagacaacaataaataaatgtacgaaattctctgccagcagtccgtttcacggtccgcgcagtcccttgtaaacacccctaaatatcataataaaaagcaacaaaaagtaatagcagcttaaaagcaaagagttatactcataagcttattaagtgatccctttgatacgagtgaaatcaagatgtgtataaaaatcaggtataataaacaaggaatcgccagaaccggcatttgccggaactggcgattcctaattaaggacttattttagagcccctctgattatttttttgccgtcttttctgcagcagattcttttggaaggcatacatttaaaatgattgccaccagagcagccggaacgataccggaaccgccgaagattaagcgtaccggttcaggaaggtatgtaagggcagctgcattggagccaaggccgtaaccgaggccgagggctacggatacgatggtaatgcttctcgtattgacctcttctttggtgatcagctggataccgctgactacgatggaggcgaacatcatgacagccgctccgccgagaacactctgaggcatgatggatacgatggccgccagtttcgggaataaaccgcaggcgattaagaatacgccgccggttgcaatggcgaaccggttgacgatcttcgtcatgccgaccagacctacgttctggctgaaggaggtgttgggaagtacgccgaagagggccgcaaaggaagaaccgaggccgtcacacataacgccgccggccagttccttatctgtggcttcccgtcccatgccgccttccgtgataccggagatgtcacctacggtctcaactgccgttacgatgaacatgattccaatcgggataatggcgcgggcgtcaaacaccagctttacaggcatcagcttcggaatggaaaaccagctggcttcggcaaccttattccagtttaaaacccaggatttcgtcagctctgccgcagctccggtagccggatccgtgaaggtgaaggtattgggaagaaggaatcccatgactgccgccaccacgtaaccgatgatgataccaattaatatagaagatacgcttgcaaatcctttgcagaaatgctttaacagtacgatgctcaaaaggactacaaagcccaggaataaattctccaaagagccgtaatccttagaactgctgccgccgccgaaggaaccgatgccgacgctgattaaggaaagaccgatggagagaacgactgtaccggtaaccacagatgggaagaaacggcgcagaggctttaagaaaaagcccagtactgtctcaaacaatccgcccagcagcgatgctccgagaatggcaccgtaagctgcgacaccgccgcccatgacgccggccacactctggcatacgccgataaaaccggagctggttcccatgacaatgggaagtttgcctcccaccggaccgatggagaagagctgaaccagtgtgacgataccggctaccagcatggcattctgaagaattgccacctgttccgcagagccggctgtgatcccgcacgcgcctgcgattaaaagaatcggtgttaagtttcctgcgaacatggcgagaacgtgctgaagacccagcgggaatgctgttttaagcggcagttttccgtccagttcgtagggagatgagtaatttgtttcctgtttcatatcaatgcccccttttaggataataatgtttccatgaaaactatacataaaatggcagaatttgtcaacaaattacaataaatgatacaatttattgaattttacgtaacagttcagacggcgggaaaattggtgcgaaaacggacgttgaacttgctcataagaccgtctttgcaccaattttcacatcggatgaatatccgatgcttcttgaccggctttttcggtcaagaagatgagccgtctgaactgttacaattttatggcagaatggggaggcggaatcggttgcggaacggtttttcctctgttataatgaaaaaagagttttgaacgatgcggaaaggaactgtggaattggacatactggattattataaaaagctggttgattttctgggagaggttctgggagagaatgcagaggtcgtgctgagagactgccgcaaaccggaccacgatattatcgccattgccaacggacacgtcagcggccgtacgataggggcgcctattactgattttacgctgtccatactggccaatgaagagtggaaagaaaaggattatgtagtaaactatgaggggaaagcggctcctgataagcggctgcgttcttcgacgtattttatccgggaggaagggaaactggtgggacagctctgtgtcaatattgacatgacgccgtatgagcaggtcatggatcgtatccgccagctgagcggcatggggctgatgagcgacggcggccagtcgggaatcatctgttcgggcccagtcgagaatttctctgaagatgtaattggggatatgatgaaaaaagctgtgatcaccgtggtgggatccagcgaagcaaaggtcagggagcgtctgacgcagaaggagaagattgagattatcggagaactgaaccgcgcgggactgttccagctaaagggcgcggtgggcgcggtcgcagagtatttatactgttctgaggcgagtgtataccgctaccagtctaaaattcagaagaagacgtaagaaaagaagcagaagaagaatatgagaagaaatatataagaggatataggtaagagaatacatacaagacgatatacaaaagagaaaatgaagggggatttctgatgagtaagaaatcgatgatcttgatgattgtgactgtgctttgtattatagcaacggtagttctgcggggagttgtcgataaggcggacgcggaatatacagaggttgaggtgagggttgtaagttctgatacggtataccggaagatattagggaaaaggcagatgcagtatgatgtctttgtatcctatctgggtcaggaatatgaactgaagaatgcccacagcagtgcgccctatataccgggacgcagtgtgaccgcctatttatccaagggtaacttgtatgcgaacattgaaggggtcaagacctccacaccagctgcgatggtctactttggcttcctgtttgcttcgtttgccatgctgattactactctttcgtcttttggaagcgggcggaagaaattaaccgctgtttaaaaagggcggcaacatacatttcaactgaaacaggagagaggtccggaaggcaatagtccgggtctctttttttatctggaaggataaattattattataataaaaaaaaatcattaaaatcattgacatatcaaacagaataagataaaattttcctataaaattataaaaaatatataaataaatcggagggaaatcatggagcgtaccggaattcaatattctacctatgtacagattttaaaagaggaactcgtgcctgccatgggttgtacggagccgattgctctggcctactgtgcggctaaagccagggaggtgctgggctgccttccggaacgctgtgtggtggaagccagcggcaatatcgtgaaaaatgtaaagagtgtcattgtccccaacacgggagggctgaagggcatcgaagccgcagcggcggcagggattgcagccggagatgcctccaggattctggaagtcatcgcgggggtgacaaaggagcagaagtcacagatcagggagtatctggatcacgcagaaatctgtgtgaaaccactggatacggatgagattctcgacatggtggtgacggtatacggaggcgggtcctgtgtgaaagtgaggatcgcagggtatcataccaacattgtactgatcgaaaaggacggagaggttctttataaagtgggagccgtggccgccagggaagcccagatggcggaccggagccttttaaatgtggaagacatctacgagtttgcaaagacggtagatttagatgatgtgagagaagtgatagggcgccagatcgcttataaccgtgcgatttcggaggagggccttaagaacgactggggcgccaatatcggaagcgttctgttaaaagcctacggtgacgatatccgcgtcagggcgagagctgcggccgcggcgggatccgacgcccgtatgagcggatgcgagcttcccgtcattatcaattccggaagcgggaatcaggggatgaccgcgtctcttcccgtgattgagtatgcgaaagaactgggatccagtgaggaggagctcttccgtgccctggtgctttccaatttaattacgattcatcagaagacgggaatcggccgtctgtctgcctactgcggggcggtcagcgcgggatgcggagccgggtgcggaattgccttcctgctggggggagattataaaacgatcgcccacacccttgttaatggtctggccattgtgtcgggcatcatctgcgacggcgcaaagccttcctgcgcaggcaagatcgcggctgcggtggacgccggaatcatgggatattacatgtatttaaacggccagcagtttaaaggcggcgacggtatcgtgtccaaaggcgtggaaaatacgatcaccaacgtgggccgtctcggaaaagatggaatgagagagacagataaggaaataatccgtattatgacggagtgctgacagaaaggaaatattcatgagtacaatcgggtttttaggatttacgaaggcggagagtctggcgggagtgattgtgttttttgctctgctttttggaatcagccgtctgccaaagaagaagttttcgtttgcctccagagtgctgatcggaacgggaacgggaaccgtatacggactgatcgtatggggggtatccggccgcacgggggcgtatgcggctgatctgggccgatggttttctttagttgggaacggatacgtctcccttttccagcttttgatcgcgccggttgtctttactgcaggagtgcgtctcgtgattcatacgcctctgagtaaggcggaaacacctctgaccaaatggaaaaaatgggttaatacgctgatgctggcggccagcgccctgatcggcgcctgctttggcctctggttgaaagttggcgcggcaccgggagcggataccgtggtcttttcctgggatgtcggggagggacagaagattaccgattccatcgcgcatctgatcccctcgggtgtcggttttgacttccttaccggcaatgtggtgggaattttcgtttttgccgtatttattggtattgcggcccgcagaatgtccggcaaatatatggatacggtaaagccgtttctcgatttcacagatgcggcgttctccgtgattacgagtgtgtgcaaggccgttatcgcctacaagcccatgggagcggctgcggtcatggccgcatttacggcagcgtacgggccggcgtttctccttatgctggtgaagatgctgctggttctctgtgcggcgtctctggccatgctggcagtgcagatgattctgtgtgcagtttccggtgtgagcccggcggcatttttccgtgcgggaaaggcggcgatgaaaaaggctctggttacccgctccggttcggcctgtcttccggacgctcaggaggcgctggcggccgggctgggtcttaaaaaggagattaccgacgaggtgtctgcttatgcgattgcttcgggtatgcaggggtgcggcgctctgttcccggctatggccgcggtgtttgccgcaggcttaagcggtctgaccatgacaccggcgctggtgttcggcctggtggtggttatcgtgctggtctcctatggaattaccggagttccgggaacggccaccatggcggaattcggagctgtgatgggaagtggaatcaccggcgcggtgaacggcctgggaccgatgatcgctgtcgatcccatcggagatgtgccaaggacactgattaatgtaactggctgtatgacaaatgcgattatcgtagaaagaagggtgagagagtgaaaacagtgattatcggcggagtggccgccggaatgtcggcggcatccaagttaaaaagacttctgggcgatgcggtggaaatcgtggtttacgagaaaggcggagaggtatcctttggcgcctgtggtatcccgttttatatttctgatcatatcaagcaggggaaggaactgattgccaggacggcggaagagtttgccaaaagcgggattccggtaaagacttaccatgaggtgactgccgtggatacggatgcgaagaccgtgacggtgaagaatttgcagaccggagaggtgtttgaggatacctatgacaagctggtgatcggaagcggagcgggggtgcgccatttcccaccgttcgaccgttcttacagcaatttattcgagatccgcgatgtggcggatggaaccagggtgaaacaggcgttattcgatgagaaccagcgccatgtagtcatcgtcggagccgggtttatcggcctggaattgtccgaggcatgcaggcattacggcaaagaggtaacggtagtggagctggccgatcacgtgcttccggcctttgatcccgaggtcagcgaggctctggaggccgagctagccggaaacggggtgaccgtgcgtgtgggaacgatggttcagagcctgatcgaggaagacggccgtatcgtgggcgccgtgctctcaaggggagacggaaccgaagaaatcccggcggatattgtgatcaacagcgcgggcatcgcacctgcaacttcgtttatcaccaatgtggagaaggcgaagaatggagccatctgcgtgaatgagcggatggagaccagcattccggatgtttacgcggcgggcgactgcagcatcatgaaatccgcagtcaccggagattatatgtatgcgccgttaggaaccaacgccaataaacagggaagaatcatcggcgatatcctgggcggggcacagccgaaaccgtttaaactgatcggaagctcggcgctgcggctgtttggcatggatgcggcaaaggtcggtttatcggagaaagaggcgaaggccagggggcttaattacaaggctcatacgattacgggaaacagttatgcgtcctactacggtacggagaagctgaacatcaagctgatctacgacgccgatacgagaaagatcctgggggcggagacgtacggacagggaattgtggttccgagagccaattactatgccatcgctatttatgccggactgacggtggacgagatgggatttatggatttgtgttattccccgccgttttccggtgtgtgggatgccgctctgattgcgtcaaatactgcgaaataggcagtaaataatataatgtataaaggagaaagtatgaaaaacacaaccaagacaaaaaaacgttcctggatcctgcgctttctggataagattgaagttgcggggaacaagcttccgacaccgctcaccatattcttttacttagctgtggcggtagtcatcgtctccggtatcggttcggccctcgggtggagcgccgccggtgaaatgtacaactcaggcagcggtacggtggaggaggccacggtatcgatcgtcagtctgttcagcattaaggggcttcagtacatgctgacctccgcggtaaccaactttaccagctatgcgccgctgggatttaccattgtgattatgctgggaatcggcgtggcggaaagctccggttatttaaacggcctgatccgcaaggtggttaaggtgacgccggctgcgctggtgacaccgatggtcgtctttatcggcgttatgacaaacgtggcggaaaatgcaggctatgttgtctttattccgctggctgccatgattttcaaggcatacaaaaagcatcccctggccggtattgccgcaggatttgccggtgtatccggcggcttctccgcaaacttactgatcggttccgcggatgccaccttatccggtttctccactgcagcagcacagacgctggatccgtcctatacggttacaccgctgggaaactggttcttcatgattgtatcgacgatcctgatcaccattgtgggaacctatattaccgagcgtgtgatcatcccgcgccttgggccgtataaggaaaatggagacggaactctgatcgaggcgtcagacagcatttccgcgaaagaagaaaaggcattaaaggcagctaactgggtatttgtaggaatcgtagcattctatatcatttgctgtattccgaaaaaatcctttatgagaaacccggagactggcagcttaatcgacggttccaccctgatgaacgccattattccgctgttcaccctgctgtttttcattccttcgtttgtgtatgggaaaatgtgcggtaccttccagtccgataaggatgtggtgtcttcctttaataaagccatcgcttccatatccggttttgtggcaatggcgtttgttgcggctcagtttaccaattacttcagctataccaatatcggccgtgttctgtccttcaaaggtgcggagctgttaaagagcttaaatgtgaactcggttgttctcgtgatctgctttatcctggttgcaggctttgtgaacctgtttatggcttctgcatccgcgaaatatgcgatcttcgctccggtattcgtaccgatgtttatgaagatgggattatcccctgagctgactcaggtggcctaccggatcggcgatagtaccaccaatatcatcgcaccggttatcgcatggattccgtatatcctgacaattatgaagaaatacgacaaggataccggctggggaaccctggtttcctccatgcttccgtactccatggccttcttattcttctggtctctgcttctggctgtctggatgatcgctggcctgccgttaggacctggagcgcctgtattttacggagtttaatggagtaaaacagatgacggggtacgccgggtgcccatagtgaggaggaagaacaatgtttgaagagagagtaggccgcgtcttacataatatggagaagatgggcctggagcagatgatcatcagcgatccgccgtcagtcttttatctgaccggcagatggatactgcccaatgagcgtttgctggcattatatttaaataaaaatgggaaccacaggctgttcatcaataaactgtttaccgtggacggcgatatcggagtggagaaggtctggttttccgatacagacccggcctgccagatgattgcagactgcacagaccacggcaaaccgctggggattgataagaagatggcggccaggttccttctggagctgatggaactgggagccggttcttcctataaaaatgcgtccgagtgtgtggatggagcccgccggatcaaggacgaggaagagaaggaaacgatgattctggcgtcccggttaaatgatgaggccatggcccgtttccgcggtctgataaaggagggcgtgacggaactggaggttgccgcaggaatgtgtgcgatctataaggaactggggacggaagggccatccttcggcccgctggtgagctttggggccaatgcagccatcggccaccataagccggatggaacggttttaaaggacggagactgtgtgctcttcgatgtggggtgcaaaaaaaacagctactgctccgacatgaccagaacgtttttctataagaatgcaagtgaaaagggcagggaagtgtatgagatcgtaaagaaggctaatttagctgcccaggcggccatgaagccggggatgaagttctgcgagatcgataaggtggccagggatatcatcacggaggccggatacggtccatatttcacacaccgtctcggccactgtatcggaatcgaggtgcatgatgccggagacgtgtcctccgcgaatcaggacgttgtgcaggagggcatgatcttttcctgtgaaccgggaatctatcttcccggcgagctgggagtaagaattgaggatctgatgcttgtgacggcggacggcgccgtgagcctgaaccgggattccaaggagatggagatcatcggctgacgatccggacagatacgccggggaggaaaaagtaatctggaatatggtactgatcaaagaaaatttgcaaatagactggacagaagcagggaatctgtggtaaattgtcatggcgtcattttttactttgacaggaggatattttcatgggagcttatcagttcaagattataataaaaggaagtaaaccaccgatctggcgaagggtcctgattccgcagggaattacgttcgagacgctgcatcagatgattcagacggcattttgctggtcggactgccatctctttgaatttgagttccggactatgggaattcgtgtaaccgatgaccggctggaggaggagttttcgatgccgggaactgtttccggcagtacggttattgatgaactggtggctgatacgaagaaatttacgtatacatatgatctgggtgacaactgggaacataccattgaggtggagaagattctggaagaagacacggagccgtatgcgcgggtggtgaagtataaaggtgatgtcatacctgaggactgcggcggaatttacgggtattatcaccttctggatattcttgcagacccgaaaaagcttgaggaattaaaagcggaaaacgggatcgattacctggaatgggccgggagccagggaatgggaacctatgatgtggagcttgtgaatgaaaagctgaaggcgttgtccttttcggaggggcgcgttccggagtcgggaaagctgctgctggaggatattttcggctgttatgataaagaaagtatcacagcactggcaaaacgccacggtatgagcggatattcgaagtataaaaaggaagaactgatcagggagactgtggactatctaatccggccggaggtgatgagacggtatttcctctgtgcaagagataaagagattgagctgttcgagcagattctggagggcaatggctggattccgttgtatgaagacgaaaatatagattatctctacgcaggcggctatgtgacagaggccgttcagcaagggacgtatctggtggctgatgatgtgaagacggcttatggagtaatgaacacggagcagtttcaggctgagcgcagccgcatcagccggatcggtgactgcctgtgtgcggccaactcgctgtatgcggtgtcaccggtatctgcggtactcgatatctttaatgagtatgcctccccaaagctgacggaaggagaacttcttgaggcgtatgaaacgctttctgcggcccgtccggtcgtggaactggttgatggaaggtttgttgaccgtgtactggcggagcagaatacatatgaggaactgtaccgtatgcagaggaatattccttactatattccctctctgaccgagttgaaatttatggcggacaatggcggcttcctgatggggaaggagctgcagaaactcggggaattcctgactggtgagcttggtgttaaagatgaagtgattccggatattctgcgtgatgtccagtctgcaatcagtgtgggtgcaaatttacagaccgtgatagacgagcttggaaattacagagtcgtattttctgaacagcgggaactggagaagttctcgaacgtgattatagacgtgtggaacaacacacgcatggttatgaatcacgggtatacaccgcatgaactggtcaggtatggcttcagtgaggcgccgggacagaggaaaaatgttcagaagatctatccgaatgatccgtgtccgtgcggaagcgggaaaaaatataaaaagtgctgcggaaagaagtaataccggcgaaagaagcggaagctgcctgatgggacaggggctttcgcttcttttatttggaattggaaatggaattaaatcctaaaaaatgagatgataataaaaagttaggaaataattcctaacttttgttgacaatggaataaaacaggattaaaatgtatataatagcagaaggaaaggagtgacagaatgacaaaaattaatcgtgaagagtatatggactggctgatcaggtggaaggaccgtcagattataaaagtagtttcaggcgtgcgccgctgcgggaagtctacgatgtttgacatgtttcgggaatatttactgacagacggagtgagccggagccagattatcatgcttaactttgaagatattgagtacgaagaattaacggattaccagaaactgtattactatataaaagaacgattgcttccggatcagatgaattatatatttctcgatgagattcagcacgtagccgattttgagaaggcggtggacagtctttttattaaggaaaactgcgatgtctatatcaccggttccaacgcatactttatgtcgggagagctggcgacgcttctttccggccgttatgtggagcttaagatgctgccgctgtcatttgcagagttttgcagcaccttgacggaaacggatttttcactgcagcagaaattcagccggtatttggaatacagttcgtttccttacgttacacgtatgggattggaattaaaagacgccaaagagtatctgatggatatttaccatacggttcttttaaaggatgtcgtggcaaggcttaatatttccgatatcaccgtattggaaaatgtagcaaagtttctgctccacaacgttggaaacctggcgtctcccacgaagattgccaacacgctgaaatcacaggggacaaaagtggatcagaagaccgtggataagtatttaagggggctgacagacagcctcctgctctacgaggcgggccggtataatattaaaggaaaacagtatttgacacagcagtgcaagtactatgcgattgacatcggcctccgcaatgttctggtccggggaaaagacagtgatatcggtcacattttggaaaatgtcgtctatcttgaattgctccggcgcggcttccaggtccgggttggccagatgaatgacggggaggtggattttgtagccatgaattcggaggaaaccgtctattatcaggtggctgcgaccacgctggaggaatcaactctggaacgggaactggcgcctctccggaagattcaggataattaccccaaataccttctgaccctggatgaattgttcggaaacgcggattatgagggaattaaaaagagaaatgtgctggaatggctgttgaaagaaaacagatcactttaaagcagtgaaaagctgagaattgagagttggaattttaatggcaaacaggtatactataggtaacactgatgctggatgagtgcatttatcacatggaaaatacaggggaaaaaatggacgaatatttatttgacgatttaagtatggaattaaggtcattgtttgatatggtaaaggaaccgcttgtagagtcattttttttaaaaggagagccggatcactgtcttggaacgtgcttaaaaagatgtccggaatctcttctggatgtaatagctgaggaatatggactggaacaggggagaggaaaagaaaggaaaagacagctggagtcgttggaacataagattattgaggggctgtccgcaaagatcgaagcagtgccggcaaatgagcttcaattgctgataaaactggctgttgaagagtgtgagacagaagaagcggcagaggggctcagcctgcagaagaacggctgggtattttactatgttgacgaagaggaaatgaatacaactcccgtggttccatatgaaattgtggataagataaaggagttagccggggagacggggtttgcctcacgtatggcttactatgagatggttcgaagctatatcagtacattcctgaggctgtatggagtctttgaaacgaaatggctgtttgaggtaatcaggaagcacgatattccggcggagagtgcggaagaggaaagtacggcaaaggaaagtatggcagaggaaagtatggcggagaagtcagaagatatgccggaaaaaggagactggctgccagacgaagcggcactatcagatgaaatgttggaaaaagcggtcgtcaggctgaaagaggaatcataaaattttgggttggaggcgggatatctgtttgatcccgatttagaagatgaggaggagtataaagagcgctttgatgcggtgaaggacatgccatattatgagccatcctttgaggacctcctgttttaccgtgagaactacattgatgagcatttgaaagagtaccggatattaaaacggtatctgagtaaaagaatggacagcagtatggaggcggatcagctgttgagggaactttccattgaagccgcggaggaattgggtggaatatttgcagtttcagagattatggaaagatatgagggtattttttcttccgtgaggagttaaaagaatttgaacagcttttcagggactgggaagatcatgtgcgaaaatggaataaccgtggattcaccaatgcagaaatgagagcgcggggaacatggctgccagacaaaaattgaatgggatcttaccaaaataaagtttaaagcgaatacgcctgatcctgacactccctgtccatgcggcagcgggaagaaatacaggcagtgttgcggaagagtgaagaagcaaggtatgtgcaatgaccagaaaatcaagaattcattatgaactggaaacaggggagattaccagccttaagcctgaagaactcagggctatattaagagccgcggatgagctgattgcaacaggaggccggggtatgctggtaaagatattaaaaggctcaaaagataggaaagtgctggaatataagctggaccagtgtccagcctacggctattaccatgatctgacgatggatgagatcagcagacgagtagactttgcaattgtaaaaaggtatctaaggattgaatacagtggccgccttcccatgttggtatttacggataagggatgggaaatagaatgtgaaacgtatacggaagagtggtttcaacgttttgaggaggcagttacatcaaaggtacttcatctggatatgtttgaggagttaaagagggttaaccaccaggtggtatttggactgctgaaccggataaaggaaaggggagataaagagtacattcctcttttgaaggcatggcaggaaggtgaagtacgcaaggtcagagagaaacttgggggagttattaaatttttggaagaaggcaaggggtgtgaataggatacgatacgctgggatggtgtggaagatcgtatgaagaggaaaggaaccttcgcgatgagaggaatgacagagagagataagaaactgcgtctgctgtacggagctgcgtttctggtgctgatggtggtggaaacgctgattgccctgtacgttcacgacaaagtgatacgtccctatgtgggagacatgctggtggttttagtagtatactgttttgtcaggatctttatcccggtgaaggcgcggctgatgccgctttatgtgttcgtgtttgcggcatgtgtggaagtgcttcagtattttgatctcgtgacgctgctgggactatccggaaacagatttgccaggatcgtgttcggctcggtgtttgacgtgaaggatctggcctgttatgcggccgggtgtctgcttttggaggtctgggagcggagaatccgaagataaatatgcggaaagacgggacagaagcgggaagaaccgggaagtggcgggaagaaccggaagtggcgagaagaaccggtataaaagaggcaataaaaaatgaagacagccgataaggaaatactggttcttaaagaaaagtaaataggtatgataacgcagtacccggtgatttctgaatatggaataccgggtatttttctgtgttttccggttatatgccacccggtaatccggcagtatggttctcgggtttaaaagtctgaaacggttgttggcatttttccgggaagcagttatactataagtattctatttgcaggaaagggggaatccccatgagtgatacagagacgataacagagctgccgaagtcgacgcagccacatttaacgcagccgcatttaacgcagccacatttaacacagccgcatttaacgcagccacatttaacgcagccgcatataacacagcaacttccatcacaggagctcctgacacaaccgcagtacggcttcttaaaaacagatccccatctgggaaaacacattatcctgctggggctggcaggcagttattcctatggaacgaacaatgaaagcagcgatattgatgtccggggtgtgacattaaacaggaaatccgatttgatcggaatgacctcctatgatcagtatacggatgagagcacggataccgtgatctatacgtttaacaagatcatccggcttttgctggagtgcaatcccaatacatgcgaattgctggggctgagtgaagagcactacttatacttatccccgatcgggagggaactgcttgccaaccgccgtttattcctttcaaagagggcgattcagtccttcggaggatacgcggaccagcagctgaggcggctccagaatgcgctggcgcgggaccggatggcttcggaggaacgggaaagacatatctataattccgtaaagaacgccatgtatgaattcagggagcgctaccggatttccgattacggaatgctgaaaatctatatcgacgaggcggagaatccggagatggacacagagatttttctggatgctcagttttcccactatccgctgcgggattaccggaacatctggggtgagatgaataacattgtgaaagaatatgataagattggtaaacggaaccggaagaaggatgacaaccatctaaataagcatgccatgcatttaatccgcctgtttatgatggcgatcgatattctggagaaagaagagattattacgtaccggaaggacgagcatgagcttctgatgaaaatccgcaggggagaatttcagaaggaggacggcacgtaccggacggaattctatgagattctggctgattacgagaaacggctgcatgaggcggctgagaacacatcgctgccggacgaaccggattatgagcgtgtgcaggaattcgtcatgagtgtcaatgaaagggtggtaagagatgagatataaggattttgaaggaacgctggaagacctggtagaacagaagcttcgggagatcgaggaaaaggagcatgtacggattctccacgcggtggaatccggaagccgttcctggggattcgcctccccggacagcgattatgacgtgcgttttatctatgtgcgcagaccggaagattacttaaagctggaacccgtccgtgatgtgattgaatgggagctggacgagacgctcgatatcaatggatgggatttacagaaagcgctgcggcagtatcaccgatctaattccacgctgtttgagtggtccaattctcctgttgtttaccggacgacggaggagtggaagcagattcatcaggaggcgtccccgtatttttccgtaaaggcgtccatgtaccattattatggaacggcgaagagtaattttatggagtttctgcagggggacactgtgaaatacaagaagtatttttatgtgatccgtccggttctggcatgtctgtggattgaggagcatgcatgtccgccgccggtacttttttcggagctgatggaggcggtgcttggggatcagaggcagaaggatgaatatcgcaaggtgcgtcaggccgtggaacggcttctggaaatcaaagcgctgacaccggaatgcggagccggggcaaggattgaagtgctcaactgttttatagaagagcagctggagcactcgaaaaaactgctggataccatgaaggatgacaggacggacagctgggagacgctggaccggctgttcctggaacatgtttgcaaaggaaatgcagaagggagaattctttgaaaatgacgatggatcaatcattactggaaaaaaagccgtttcgttttatcgtggtcggttccggctggagatcgctgttttactggagaattgcctgcgcatatcctgaattatttaccatggaggccatgctctgcaggacggatgaaaaggccggggctatgagacggcagtacggtgtgcctgcgatcacgtcagaggcggcctgtgaggcgatgaagccggactttgtggtgattgcggtgaacaaggcttccatcttttctgagacgaagcgatgggctaaaaagggatatccggtgctctgtgagactccggctgccttaaaactggaagacttaaaggaactgtggcgcatgaaaacggaggagggggctaagatacaggtagccgaacagtactatctgtatccctcctttgcagcagccatggaggtggtcagacgcggctatctgggggatgtgactatgatgaacttatctgccgtccacgattaccatggagccagcgtgatccggcgtatgctggggacgggacttcagaatatggcggtttacgggaaggagtatccgtatactctggtggaaacggattccagagacggcgccgtcaccgacggacgaagggctgagaagacgagacgcagattaacgttcgaatttgagggcgggaagacggctttttatgatttcagcagcgcacagtaccactcctatatccgcagccgccatttaaacgttcaggggccggagggagagctggatgactggattgtgcggcgggtaaaggaagagattcagccctcgggaagacgttttctgccgatggagcagaccatgagtgtggagcgggaggcgtcaggcagcgggattatacggatttatctgggagaggaacaactttatgtaaatccatttgtacatatggggctgaagaaggtactgccccaggatgagactgctattgccgtcctgatgatggggctgaggcgctatattgaggaagggacggagtgctatccgctggcggaggggcttcaggacgcttacacgctgattctgatggaagaggcactgaaagatcccgggcggctggtacggtcagaaacccagatatgggcgggaatacagatttaggataactgcagggcagacaggttcagtcagagaaacggagtaaagagacggcatgatacagataaaggcaattagagtggaatccagtccccagtcttttacgagaggaaaccagctgtacaggagcgggatggtggaagacctggattttcagaaaagcaaagggaggctggaggcaagcgcatgggtggaggggtcttatgacaaccgctaccaggtggaaatgacgtatgatctgaagcgtgatacatttacagagtattactgtgaatgcccggcctaccaatcgtatgacgggatgtgcaagcattgtgtcgcggttgcgctggagctgatggaacggaaagcagaggaggaggaagcagaagaggaggcagcagatgctctggctggcggagcagcggaacgaagagggagtaaagcagatgctgcttcgcgtacagtgttaggcagggcgtctgccagcgcgtcggcggctgcttccaagattaagcagccgccgacggataccgcggttaaaaaactgattttttccagcaccatgcgggaaaatgcccactactttcagccgaatttaaatggaaatatcaggctggttccagccttgcaccgcaatgcggagggctggacggttgagtttaaaatcggttcagaccatctgtacgtattaaaggatattaccgcaatggtaaatgctctaaaggaagaaaagtatgtatactatggacagaaactggctttttaccatgtaaagagcgcatttacccaggaaagccgcagactggcggactttttggaagactgtgtgaatcaggagcaggactttattacggaactgtatatggttcgccgcagttatctgcccacagcggccaccggacggaatctggttctgtccggtgacaagatggtgcgctttttgcaggcagtggggccgggagtgatcgctctggaatccagattctcagacctggcccggatcaggattgtggaaaaggatccggttcttggcttttttattgcggaacggagcggagggggatgcctcctttcagttcccaaaggggaagcgtttgcaggcaagagcgggctgtgtgtcctggagggagacaccatctacctgtgcagtcaggaatttaaaaagcgtatgggcggtatatgcagtctgatggagccctataagaagcaggaatatcatattaatgaggaagatctgccggttctctgtgcttcggtactgccgtcactggaggagtttgccatccttaaaaagccggattcgctggagcgctatctgccgaagccgtgtgagatactcgtgtatctggattatgtggaccggactctgactgcatctatttacagtcaatatggagacgcgcgctataatctgattgagggactggaagtcaaggatttataccgtgatatggaaaaggagcagtatacggctaagctggcggccggatatttcaactgtgtggatgagaagaaacagctgctgtacattccggaggaggacgaggaggcacagtaccgtctgctcagtactggaattgcgcagtttcagcagattggtgaggtatatatttccgactccttaaaacggctgagagttttaaaggcgcctaaaattacaatggggattacccgtaacagcggattgctggatattacgcttcagacggagcggttagaggcaggagaactggaggaactgctgtccagctaccggaggcggcggaaatattatcgcttaaagaacggagattttctggagctggaggacaacgggctgtcagcggtggcagagctggccgaggggctggaactgagtgccggggagctggaggcgggccatatccgggttccggaataccggtccttctatttagaccaggttctccgggagcatgaagggatgctggaggtaaagcgcagttcctcttataaggcatttctgcggtccatgaagaatgtggaggacagcgactatgaggttcctgccggtctgaacgcggagttgaggccgtaccagaagtttggcttccggtggcttatgactctgggcgccatgggattcggcggaattctggccgacgatatggggctggggaagacggtacaggcgatcgcgtatctggcggcggtgaaggagatgcgggaggcggagggaagtgacggggagagaggtgacgaggagagaaatgatgcgaaagcagccgccggagagggccggaaacaggacgtttccaggcggagcctcatcatctgtcctgcatcccttgtctataactgggagagtgaaatacaccggtttgcccccggactgacggtggatacggttgtgggaagtgccgggatcagaaaggaaaagataaaggagagcagagcggatattctgcttacatcctatgatttattgaaacgggacgtggaggcgtatcaggaaacgctgtttgatactgtcttcatagacgaggcgcagaatattaagaatcatggaacgcaggcggcaaaggcagtgaaggcggtcagctgtgccagacgtttcgccctgaccggaacacccattgagaatgcactgagtgagctgtggagtattttcgatttcctgatgcccggattcttaggcggttataagcattttaaggagaagtatgagcagccggtgacggcaagacaggatgaggtggcggcggaacggctgcggcggatgatccggccgtttatcctgagacggttgaagaaggaggtcttaagggagcttccggataagctggaagaggtggtgtattcccgtatggaggacgcgcagagggagatttatgaagccagggtgcagaagctgctggattcacttgcgaagcagagtcaggaggagttccgggtagggaagctgcagattctggcggagctgacccatttacgccagctgtgctgcgatccgtctctggtctacgagaactataacggcggggcggccaaggtggacacctgtgtggagctggtgaaaaatgcggtggaagcgggaaataagatcctgctgttttcgcagtttacgtctatgctggatattatcaggaagcggctcgacgaggaagagatcggatactatatactgacaggggctgtatccaaggagaagaggagtgaactggtgcgggcgtttaatgaagatgatacgccggtattccttatttccttaaaagcgggaggaaccgggctcaacctgacggcggccagtatcgtgatccacttcgatccgtggtggaatcaggcggctcagaaccaggccaccgaccgggcccacagaatcggccagcagcaggtggtcacagtgtacaaactcattatgaaagacacgctggaggagaagatcctggagatgcaggagaagaaggcggggctgtctgaggagattatcacggagggaagtatcagtgaggtgattggcagcagggatgagttcctggagattctgcgcggggcggcgaaggaatcggcgggggaatagcggactggagaatgacggaaagaaactggcagatgaaagatatgggggatgaggaaatacatgcttaaggtattgattgcagacgatgaatataaggtgggcttcttagtaaaaaaattaatagaatgggataagctgaatctggaatttgcagggctcgttcaggatgggatgaccgcgtatgagaagatatgtgagtgtaccccggatattgtgattacggatatccgtatgccggttttaagcgggctggaattgataaagaaggtaattgatgaggggcgcagtgtccattttattgtaatcagcggatataaatacttcgaatacgcccagcaggctatcaaatatggtgtggaggactatcttctgaagccgattgatgaggtggagttaaaccagatcttaaagaagattgcggatacggagaccaaccgggagaaagagagccgcagcgtggatacgatggtgaaaaaacttcacgacagccgttatatccttcacagagagtttttaaattccatatcaggggacggggagatgaatctggaggaggtcaataagaattacggcctgaatttcggagacggtctgtttcgggttatctgctgtaaactggacggcgacaaccgtgtggagaaaaatgagcagcagataaacctgatcttaaaaaagacgggagcactggtagagcaggcgtttcaggggtgcgtacgcgatatcgcgattacctatcagaaaaattctgccgttacggctgtcctcaattatacggctgaatgcagagacgaggtggaacagcggattgacagattgtttcagtcacagatggactatttaagcggatttgaacactacgagctgacgatgggactgagcacggaatgcggggagttcggcagacttcacgtggcagtggagacggccagggaagccgtggcatgccggattctgggcggagccgggagacagattgacgagcgtttcatagaacgggattccacagtctgcgcggaggagatctgcggggagctggaggagaagctggccggagccgtggaaaccgcaagatacgacgatgtgaagtatatgatcggactggcgttccacgaggccagaaagcgcagagcatttgcaagtgagtattatcaactggcggggcttctgtttaagtgctatctggaccataatccgtttcttcgtaccgtggaaaatactgaaatgagggagcgctggaatgaaggtgcgggaaactgcagttctgtttcagcgttgacggagtatgtggcagagcagataaccgccgacctcatagagtgtgtggaggcaaaacgggagaaagagcggaggcctgtcttaaacgccgcagagtatattaaaaagaattacagccagaagatttccctggaagagatggcggagcagggcggcttcaacatgaattacttctctgaactgtttaagaaggagacgggaaagacatttaccgcctatgtgacagaggtccggatggaggaggccaaaaagcttctgagggatacggatctgcccgtttacgaggtggcggaggccgtaggctataaggattcaaaattcttcagccagcaatttgttaagaacgtcggaatcaagcctatggagtaccggaagctttattattaagagatggagaagcgggatgatgattgctgtgacagcggcggtactggcatcggcagcctgtgtgctgctggggatgtactgcctttatttaaaaaataaaataaaaaaggtggaagctgagcgggaacgtcagctgtctgagctggaggtaaaacttcaggacgaatattcagtccgcatggtggacaagcaggccaagctttccgcgctccagagtcagatcaatccgcactttttgtataatacgctggaatgcatccggagcgaggcgcttctctatgactgtgacagcattgccagaatggctaaggcactggcatcattttttcgttacagcatcagcaagaaggagaatatcgtgacgctccgggaggaattcaataatatcgaaaattatttcctgattcagagttaccggtttgacgacaaattctcgtttgagatactggccgcgccggaagacagggaggcgtattcgtgcctgattcccaagctgtccctgcagccgatcgtggaaaatgcgattttccatgggctagagacgaaaccggataaggggaaggtgacgatccgggttgagatgacggaaaagaatgttatcatcatcgtatcggatgacggtgtggggatcggcagagaggaactggagcagatgcgggattcgcttaaaaactcgaagaaagagacggagaaggaatgtaaatctccgggagaacggggcaacggaatcgcgctcgccaatgtcagccagagaattaaactgattttcggggatgattacgggctgaatctatacagtacgaaaggaatcggcacagatgtggagatcatactgccgattatgacggataagtctttgttatgaagagagaactgctgttattaaagaaagtgactgtccagggcatggacagcggcaaccggctgtatgatgtggacctgatcctgcgggaatcggagtgcttctgcctcgtcagtgcggtgcatcagaaggaagtgctggtggagtttttgcaggggctgggaaaacggatttccggaagcgtaaggataaggggaaaggaactgctccaggctgacaggaagactcttgagaaaaacaaagtatttgtgataagcaggagtactccgtatatgaatactttgaatattggtgaaaatatctttcttctcagaagaaacagcctgaaaaaggtcttaattaatgagcgggcaatccgaagccagacagaatactattttaaaaaatataagatagagctggatccggatgcggcgccggagactttgagcaatgcggataagattatcattggaatcatcagaagtatatctcagggcggtcgtctgatcgtactttacgacacgtcgggggcattttcccagaaagaaatgccgcgtctcatttccctgattgaaacgcttaaggcagaagggatcgggattctgatctcagataataatccggaggcgtttttcagtgccgcagaccgccttgttatcttcaaacacaagaagatcgcaaagaagatatatgatcgtgagcagtttccgctggcggcagagatcgttcttcgcggaacaaaagccgtggatgagagccagaaggaaaagaagagaggcgtcccttccgtccgtattaacggattgaaggcaggagaacgcacgatttccatcgaggcctgcagaggagagattgtgctggtttcacgtgaagccgcacccatagacagtctgtgggatcagtgtcagcggctttccgcctgcggccctgagtttatcatcgatggaaaaaagcttccgtcccatacgatggccgatttagtcaaaaacagggttggaatgatgagttgtgaggtatcccgcatgggcgtaatggaaaatctgaccagagaggataatatcctgatgccttcttaccggaagatcagcggcagactgggattttaccgtaaggcatcttcgtatattttaaaggataactttctgtttaaggatggggaagccttagaagatattgatctgggaaaaaatgggtggaagctggttttctaccggtggaggctctttaatccgcgtgtcttaatcgttcataactgcatcacggctgcggatttatgggagcgggactggattaaaaagcagctgcttgagatggcggagagggggactgccgtgattctgctggaaaatgaggcggcattctgttccggcttttccgacagagtatggacggaggatcaggcatgaaggtacaacggtttatacagatgaatttcttaaatattgtggtatgggccgcatttttcatcatgtgggcggccggtatgtcgagcaatgtgtactggtctgtcacacgccagcttctaaccatgatttttatggtatttggccttatgattcagatgataagcggcgtgctggatctgtcctttgctgccgaaatcgcggcatcgacctgtatcggtgcctgtttgctgcgcgcgggaactcctctcgtgccggtgatggcagcagtgctggccttccatctgggactcggggcgctgaaaggatatctcacagccagtctgcgggtcaatccggtaattatcactctggcacttcagattatcgtaagcaatctgtccggtctttttatcggtgagcatatgattattttcgaccggaaggatgtgtacgcaagccacgctttctggctgtgcctgtctgccctggcgctggtttccagttttctcctgtggttccttctcaaacggacctactatgggaaataccttcggatgctgggcgaaaatccggccgctgtcagggagagcggactgaattatacagccatccagacgatcatcagtatggcggcctcggtattttatggaattgcggcgatgatcctgctgtttattacttcatcaggcagttcctcaaacggcagccactatctctacccggttatcgcagccgcctgtatgggtggaatcagttttttaaacggaaaaggaaaggtatccggcgcatggatcggaactttgagcgccgtcatgtttatgcatatcatcgtaattctgggaatccagagcagttttgagacgattctggagggtctgattatcatcatttctattcttttaacagtggggactgcaaacagctgaaaatagtccccttaaatctgaaaatcccctcattgagagtttggctgcggcagggtatcataaagacatcaaaaaactcagggaggcagcaaaaatgaaaaaacaattagcagcattactttgcggaaccatgcttttgacagcagcgctcagcggctgtaccatgaattcaccggttgagggaaaagcggagacaaccaccgcggcaaagacagaaggaacagctgcagccggcggagaggcgggcagttcagaggcagcagtccagaaggcaaagattggacttctggcaccgacacttcagaccgagttctttatcaacattgacgatggtttgaagaaggaatgtgaggccagaggctgggactatgtggcggtcagctttgacaatgactccgcgacagcagttacttccattgaaaatatggtcaccggaaaatgtgatgtgatcgtcgccatggtatccgatgaatcgtgtgacgacgctttaaggaaggctcaggaggccggagtaaagattattgaatgcggtgtgcagacggaagtattcgacgtctgcttgaatacggaccagtatatgatcggtaaagagattggaaccatggcgggtgagtggatcaacagcacactggatggaaaaggaaaagtagtggtttatactaccttccagaacacggatatgcagaaccgcggcaacggaattcaggatggcttaaaggaagcggcccccgatgcggagattctggaagtcgttgacatcggaaaagacgtggttggttccggcaccacgacaacggagaccatgcttcagaaatatccggaactcaactgtatcgcagcctatggcgacgcagcggcggtggagtcatcagaggctgcaaaggcggcaggcaagagcggggacagcttcggtatcttctcctgcgatggaacaaatcaggcgttaaaaggaattgctgagaacgatccgatgcatggaactattaaatttgaagaattgggtacaattatggccgaatacagcgagaagctgctggcaggtgagacattcccggaacccattcaatttccaacacagcgggtttcttcttctaatgtttcagaattttacacggcggagtaggagctgtctgccgcagtgctgcggggttagttttggcggcatgtctgttttctgctttagaatcgaggagttctggaaacggaactcctttttaaaaggagacatgaagtgaaaggcgcggcgatgtgaaaggtgcggcaagatgaaaggtgcggcgatgtgaaaggcgcagcgattgaaaggtgcggcacagtgaaaggcgttgcagtgcgaaaggtacggcaaggtgggaggcggagcgattgaaaggtgtagcaaggtgaaaggtgcggcagtgcgaaagatgcagcaatgttaaggcgcggcagtgcgaggcgaacagcgatgccaagtgaacctgcgtatgaagagagcggcggaagaaacggagcggaaacttaaaatgtgactgcagggagaactgtaaaagggaaatgatgactgtggcagaggaagagaggaatggtcaaatgccagagaatacaatattaagcgttaaaaacatcgtaaagacctatcctggtgtaattgcgattaaccatttttccatggaagtaagagagggagaagtccatgcgctgatcggagaaaacggagcggggaaatccacactgatcaagactctgtccggggcaattaccccggatgagggcactgtctgtgtgaacggaaaagacttcaccgccatgactccgaagcttgcgaaggagcagggaatcgaagttatatatcaggaatttacgctggttccgggaatcagcgcggcagaaaacgtgtttctcggtgaaaagacgaagccgggattattcgtagatattaaggagagggaaaaaagggcaagggagctgtttgagcggttaaatgtagatatcgatgtctcaaaacccgtgaaggatttgtctccggcccatcagcagctggtagagattgccaaggcagtcagcaagcaggtaaagatcctgataatggatgagccgacagcgcccctcacagtcagtgaagtggagaccctgttccgcattattaaggatttaaaaagccggggagtcactattatttacatatcccacaggctggaggagctgtttgagattgccgaccgcgtcacggtcatgagggacggttgttttgtggatacaaaagagattgcggagatcgacaggaagcagctgatatccatgatggccggacgggaactgaatgagagctaccccgagaagaagtgtgaaatcggggaggaagtgctgcgtgtggagcatttgacgggaaatggggattctgatatttccttcagtcttcataagggagaaattctgggctttgcggggctggtgggcgccgggcgaacggagctgatgagagtcatctacggagcaaacgcaaaagaggccggccggatcttcgtcaatggaaaagaggaaaaaataaggtcctgtcaggacgccatacgttgcggaatcggttatattccggaggacagaaagaatcacggtgtattcctgagaatgtccatcaaatggaatacggtggccaacaatttaaaagggtattccaatggcctgtttgtcgatcaaaagagggaagccagggccgcggaggaatatcaggagaaatttaaaatcaagactccgaatctggatcagctggttggcaacttatcgggcggcaatcagcagaaggtagttatcgcgaaaacgctggcggcaaacagccggattatcattttcgacgagccgacgaggggaatcgatgtgggagccaagcatgagatctataagctgatgaatgaactggcggaagcaggacattccattatcatggtgtcttcagatatgccggaactgctcggtatgtccgaccggattgtggtgatctatgagggccgcaagaccggtgaggtttcaaaagaggaatttgaccagaattatatattggatttagcttcaggaggagaagaaaatggaaaaaactaagacaagctggatagatttatacaagaaatacgggatctacatctttttagtggtggtctgtgccttcttttccgtggcggcccccaatttcctgtcggcatccaatctgattaatatactgcggcaggtatccatgttcggaattgtggtaatcggtgttaccatggttatgatcggtggtggaatggatctgtccgtcggcggtcagatggcggttgtagggatggttgtcggttttttgctggttaaactgaacctgccgattccggttacagctcttgttggtattctgacgggcattgcgtttggcacggtaaacgggattgtagcgattaagctgaaaatcatgccgattattgttacgctctccacaatgcttattttgcagggcgttgcctacctgattacgggcggttatccgattaccgggatgccgaagccgtttctgatgctgggccagggatatatcgggccgattccgatcccggttattatatttgtattgtttatcctgtttggctggatcgtgatgaataagacttatctgggccgtatgatctacgcgctgggcggtaataaagaggcggccagactggcgggaattaacgtggataagctgacggttatggtgtatgcatttgcaggatttgcggcaagtattgcggcgcttattatggtagccaggacaaatgcttcacagccgggtgcaggaagttcttatccgtttgactgtatgacggcggcgtgcctgggcggaatcagtattgcaggcggcgaaggcaagatatcaggagcggtgataggtgttattattatcggagttctggataacgggctggtgttaatgggtgttaattccaacttccagagtgtagtgaaaggcataatactgctgctggccgtggcaattgactgttatgaggcgaagaataagaagaaagcgtgagaacgggacgtgagaaaagagcattagaaaagagcgtgaaaggctggtgtgaaaggagggcgtgagagaaaagcgggggagaagggaataagaaaaagaagcaggagagagaaataagagaaagaaataagagaaaggcggtggttttatatgttgagcaggaagcttccattttatgagatagagaacggaatttatgagattgacgagtttgactgcgtgagtgtgttcgttatcgtgggggaaaagagggctctcgttgtggatacagggacagggattggggacctgaagtggataattgaagagaaaatcacggataaaccgtatgatgtggtactgactcataatcatggggatcatacaggcggagccggattctttgatgaggtgtggatccatgcagccgatatggactggaccggcgcaacggcgccgagtgtggagtttcgaaaggattatgcgggaacgatcaggcggagagagaataagaattacgattatgatgtggagacggacattcgcccgtgggagaagatgccaaagctaaacgagatgaccgatggccaggtgtttgatctcggcggacgtagggtgactgcctggcactgcccgggtcatacggccggggagatggtctttatcgatgacctgacgaagacgctgctgctgggcgacgcatgcaactgcaatcttcttatgggccggggctttggaaaagatccgcgggatgagatccgaacagcgaaggaaggactcgagcgcctgatctttatgaaggggcagtataatcatttctataatgcccaccatgatttcaggggctttggacagactctgtacgcggatgcgctggaggacgctgtgaagtgttttgaggggatactggatggaaccgcgaagtttgtggaggtgccggacagtctgtttctggataatccgcctaagatagcggcggagtatgggaaggtacagatttcttatatggaggggaggattgatgaggtttaggttcgaacaaatctgttaatttgtttgtgtttgattgaaggaaggcattcaaggcattctgattctttcggtgtatgaaagatcggggtgtcttttttttctgtctgaaaggatttggtaacatggaggcagcggtatgaagcagacaataaaggatcgagaactgtgaaattgaccgttggaggcaagtgtgatacgattggattaattaaaatttatttttggcagaggagttaggagaagcgtttttgatataggattgatgcagaatggaaggaatcacgtaaggctgactggtaagtactaaggggaagaatacaaagcagaaacgggagggggaaacggggaggatttatgtaactggagactgtcatggcgattaccgccgttttcgtgcggatatatttcctgagcagaaggaaatatatccgcacgaaagatgattttgtgattatctgcggtgattttggattctgggatgaatcgggcgaacagaaatactggagaaagtggctgtctcacaaaccatttacaaccctgtgggtggatgggaaccacgaaaattatgatcttttgaagacttatccggtggaacagtggaaggggggaaacgtgcagtttattgcgcctgatatcattcatctgatgcgggggcaaatatttgaaattgaagggctgcgcttctttacattcggaggcgctaggagccatgacatctccggcggcattttagaactcgatgatctggagtttaaacggaagaaaaaggaactggatcacggctgggaaccgtaccgcatcaaccacctgtcctggtggaaggaggagatgccggataaaaatgaattcgaggaaggacttcgaagtctggatcggtgcggctggaacgtagatattattgtaagtcattgctgtgcctcctcgattcaacaggaggtctgcggcgacagatgtgagaaggatgaactgacagagtattttgagatgatcatggggcggtgtgagtttggaaaatggctgtttggacattatcatgagaatcggaatgtggggaagaggtttgcggtgttgtatgagcagattgttagggttgtgtgaggagagatttccggagatgggggagtttagaaaagggaaggaatggacgtgtgtgaagggattttatttgattctccggaatagaggcattataattaaaacatatgaatcaaaaatctgaaatagctttggaatattagaaaaagagccagtattataacggaggttacagtcggaaagaaaggaatcagaagcttgttatggagatggatcatgtaaaagagaatggggcagcagacctcactttagactattataataagaacgcatcagaattttgctctggaactaaaaatatagccttttcagaacatcagaatattttcctgagctgccttgcgcctcaggggagtattttagattttggctgtggatcagggcgggacagtaaggcatttttggatcgtgggtatgatgtggagtcaatggatggatcggaagcgttgtgcagactggcctccaaaacgattggtaaagaggtgaagttccgtaaatttcaggaattggaagggaaggacttatacgatggagtttgggcatgcgcttccatactgcatctgagcatggcagatctggaagatgtaatgaagcgaatttatcaggctctaaaaccaaaaagcattttgtatgcctcatttaagtatggggagtatgaagggattcgtaatgggcggtattttaatgatatgacagagaaaaagatggaattactgctccaaaggctgggactttttaaaatagagaaaatgtggcggacatcagatgtacgaccgggaagaagtgaagaaaaatggttgaacttacttttaaaaacgaaaaaacaggattaacgcagacacttgagtttcagggaaatgcgataactggtgacgggaattatttatattcccgtttgaagccatgtttccaaaaggcacagaaaattgatattatagtatctttcctgatggaatcgggagtaaaattgttggtaaatgacataaaagccgctgtggaacgcggagctagggtacggatactgacaggcaattacttaaatatcacccagccagctgctttatatatgctgagaagagaactgggagatgcggtatcggtacggttttataatgtaccgaacaaatcatttcatccaaaagcatacatattccattatgatgataagggtgaaatatatatcggttcatccaatgtttcattcagtgcattgacaacagggattgaatggaattattgttttgacagcaaaatgcatccggaggattttgaacatttttataacacatttgaagatctgtatgagaattacgcttatgaaataacagatgaaacattaaaggagtattctaggaagtggaagaagccaaacgtacaaaaggatctggaggcatatgatacagaaggcggcagagaagaaccggagaccgttcagcccagaggggcccagattgaagcattgtatcatttggagaagagccgcaaagagggctgggataaggggatcacggtaataccaacaggtgtgggtaagaccattcttgcagcgtttgattcaaaaaattataaaagagtgttgtttgtggcacacagagaagagatcctgattcaggcggaagaggcgtttcggaaagtaagaggcgacggcaagtacggttttttctatggggataagaaagacgacgactgcgaggttttatttgcaacggtgcagactttgggaaaatcagagtatttatgtgataaatggtttccaagagactactttgattatattgttgtggatgaatttcaccatgctgcagcagatacctataagcggattatcagatatttcacaccggactttcttttgggacttacggcaacaccggatcgtctggatgataaaaatatttatgagatctgcgattataacgtggtttacgatgttcgtttaaaggaggctgtgaataaaggatggctggtgccgttccgttattacgggatttatgacggtacggtaaattatgatggcatttcgtacgcacacggtaagtatgacgaagaagaattggaaaaagaactgatgattcctcaaaggggggatctggtttaccataactactcaaagtataattgtaagcgtgcccttgcattctgttctacgaaaaaacacgcggaatatatggcggagttttttcaaaatagaggggtaagggcggccgctgtgtacagtggaactgacggagagtataatctggacagaaaggaggcgttggaagaactcaaggatggcaggctgcagattattttctcggtcgatatgtttaatgaaggacttgatgtaaaaaacattgatatggtgctgtttttacggccgacacagtcgcctgccgtatttttgcagcagttgggacgcggtcttagaactgcggaaggtaaaagttatttaacggtcctggactttattggtaattataggaaagcaaaccttctgccgtttttgctgagcggacagaagtatcagaaagagatggcaagaagcaattcaatgtcagattatgagatgccggatgactgcatgatcgatctcgattttcagattgttgacctgtttaagagacaggccgaacaggaaatgtcaacaaaagacaaggtgaacgaacagtttgaaaaggttcgtcagcttgtatcctgtgaattccagcgttcggtgccgaccagagtcgatttatttacctatatggacaccgatgttcaggatgcactgaaacgaaatatgagatattctccagttccgaattacctgaagttccttgctgagaaaaacttgcttaatgaggatgaaaagaagcttctgaatggaaaaggagcggaatttatcaatatggtagagacaacgaggatgcagaaatcgtataagatgccgttgcttctggcgttttgccgggatggaaagtttaagacggttgtgaatgaaaatgatatttattacagctttcagacgtattatgaacggggcgggtataaggtggacatgatcaaagatcagtcatcagccgggtttatgacgtgggggaagaaggagtgggtgaaactggcggtcatgaatcctgtgaagtttatgttaaatagtcatccagactgctttaagaaggtggataatggggtgattggacttgtggaaggaatggaagaggttgtggagaatgaggcgtttgtgagacatgtggtggatgctgtggagtggcggtcagtaaggtattttgcggaaaaatattgaaataatgcatgattatttgagatatataatggagttctgctaaaagttttgaaataaaaagttgaaaattcaattttacagaatattttttgcgactagagtagtgtgtacagatttatgaggggaatatggcagacagaggtaattgatagttacaagtctttcctttagggtatagtcattataaccgtaaagaacatttggatttttcgtctgttgtctgcaaagtaaacttatttttagtactcttaatggaaccaccaattgtctctccttatgtggcaaaaagatatacagtaaaataataacagagtgccgtaaacttaactgcaaaataccattgtggatagaattaacaacaaatattatgatttttagcatacacaagaatatactaagaaactaaaagtacttggctgagaagcttttgcagttactacattgtggtaataagtttaaaaaaatatataaagcttgattgatgaaatatatgacttttgggattttgttttctagattcctcaatacagtttattatgttcatgatttgtccagaaaaaattatattaaatattgaaaaaaagcaatatggtgatataattataaataaataaatttatttataattataagggggggagacatgggatttgggtcttattttagagatctgagaatggaaaaacaggttactcagaaacagatagctgatattattaataaaaagcctatgctggtgagtaatgttgaaaatggtaaaaatggtccattttcagacaatgatttgaaaaaaatagtcacttttttagaattatctaaagaggaggaacggcagttatataaagaagttgcaaaggcgagagggaaacttccgcaggaaatgcaaacatatattataaaaaatgatgaagcgtattacctgctcgaaatgcttgcaagaaataagcttggaagagagtctttgtctcaaataatacaaatggtggaggagcaggtattatgttaaaaacaatcgatttgtttgctggggcagggggacttagctatgggtttgagtcgacaggtgagttcttgattgtggctgcggcagaaaataataaaaatgctagaaaaacatatattgaaaatcataaaggacgtaatgatatcagaatgattcctgatgttagggggtatgatttttcagctcttgcatctgaatttgacggaatagacgtggtcataggaggaccgccgtgccaaggattttcaaatgcaaaccggcagaagaatcatattataagtatgaataactctctggtgaaagagttcttccgtgctataagggaaattcgtcccaaagcctttgttatggaaaatgtaagtatgctatcatcggagacacatagattctatgattcaacaatagatcatggtattgtgacagcacttggagtcaaaatgagagaagatgagttggtgttgtctgattctgattataatgggtataacctcatgaatattattgaagcagatgaggttgtgaattacaagatttctgatgaattgttccagttgctatatgtactgtataaaaataggaataatgaagaaaggcttcctaagtatatagacaacaaatcaaagttaattattgatagaattgcttctcagacagaagaggtgaaaaataatcttgactttttaggccggatagctcatctgattaatacggaacagattaaaaaatgttttactgagctaggacagtttattaagtttcaaaaaacatttcgtcttaaggaagaattggattctaacaaaataatatatgaaatagaaagcgatccggaaacaggaaagttaattgctcgagtaaagtcctattctgttattgaatatgtaaataaaatattaggggatgattataaaaaaaataatgaggtggttaactctttatggtttggagttcctcaggagcgaagaagatttataatgatcggagttcgttcagatattatgcaacaggaagaaatagagatgccaaaggatagtggtgtaaagattgttacggtggggcaagcaattgaagatttaaaagattatgatactaatgaagatgataatgagccagaaaagatcctatatactcccagtatggaaaaactatctgattatgccataattatgagagaaggctctgtgggtatcagtaatcatattgttccaaagagtagagataaagcaaaggcaaggttttcggcactcaaagaaggtgaaaattttcataatttggatagtggactgaaagataattatgctgtaccagaaagaacacaaaacagtatttatttacgattggatagtaatagaccgagtggaactgtgataaatgttcgaaagtcgatgtggatccatccaactatagatcgtgcaataagtgttagagaggcagcaagattacaatcttttcctgatcgttttgtttttaaagggacaaaggatgcacaatatcaacaagtagggaatgcagttccaccgttaatggcaaagggaattgccgaagtagttctaaaatatttataaaattagcgcaggaaacaatacctgcgctaattttatttgaaaaataatttgcaattaaaataaatacatataatattattctgcagaattacataaatgaaatacaaaaaatgaactgtatatgaaaaatactattattattttaaaaatactataaaacacttgacatatataataaatatggcttatattggagacaggtactaaaatgagtatattgtatggaggtatagcatgaagagcgaagaaaccaagagagataaatttgtaagaattgcagaagcaagaacaaataagattattaatatgattcaattactggggaattgttcgaatcagagcttgtatgagtattcgcagaaagatgtaaataagatatttaatacgattcaagcagaattggatgaagcaaagaagagatatagcaaacaggatagccaaaaaggaagtatatttacacttgattaatagtatggagggaatacattatgtttcagtggagggaaaattttcaatggattttttctgatctgggatcgtcagataaggttggtgtaaatgagtcgggtataggaatatttaaaagacagccatataaagggcttgcaaaagagattttacaaaatgttacagatgcgaagaatccggaacttccggatgaagtaccagtgagagcaaaatttgaattgatatatgtcgatttggatgatattcctggtcatgaaaggttgagagaagtcattcataagtgctcagagtattattcggttggcgatgatggtgaaaaactgagaaccattcgagatgctgcagataattatttatctggttctataaaagttccggttttaaaaattagtgactataatacaacagggctgagaggcgtaaaagaagaaactggaagtaactggacaggacttgtacgagaacgtagtgctactaataagtcaaatacttctagtggtgcttttggggtaggtaaatttgctccatataattttacatctataagaacagtgttgtattcaacgaaaacaattaatgatgaatatgcctttcagggaaaagctattcttactacttttaaagaagatgggaaaaacaagcagaatataggattatttgcaaataaagacagtgaagattttgatgctgtgtttgatgtcaatgatattgcgcctgtatttagaagaacagagcctggtaccgatatttttgtgcttggatttgtgaaggaagatgaagatacctggatagagcagtcagcaatcagtgtaattgagtattttttctactctatttatcgtgggaaacttgaggtggagatccgggatggtgagaaggttgtgaagattactcagaataaccttggagagatgattgcattttatgataagtattgtaaagaacatatggcagatgatactgcttttaaatttacagcaccatcttattggaggctgttgcaggatagcagacataaaattatcaaggctccatttgaatacaatggcaagagtatgggaaattatgaactttaccttctgactggggaggatgctgctgaaaagaaagtattggaaatgcgccaagcaggaatgaaaattagagaagattgtgcatttagaattcctataaactttactgcgatatttattgctactggtgagggggcagcatcacaggatcctaaggataatattagcagctttctcagaaagtgtgaaaatcaggcacatgatgactgggcagcagacgaatataaggaagagaagacgaaagcaaagggaattatcaataaggtacatcaaataattcttgatgcagttaaggcagagatgcctgattttggagatgagtcagttgatgcttttggattaagcgagtttctgccaaatgaagaagcagatgatgaccaaaaagaagaaaaagttttttccgacttcaggccgcttgcatttgagatacagagcgtaaaaactggaaaaagaagaaggcaagctgacataagtatgaaaaaaaatggcggttcgaagcataagaaggaggtagaggaagtcaagagaaaataccataagaatgcaaataataaaaagggaactggaaccggtaaggcatctgaaatattgatatctagtataaaaactccatttaataagacttctggcgagtatcaaatttcatttgtgctagatgaaaatgctgaaaatttagctataggaatcaaaattggaagtgatgatgataatttatcaaaagctaatatttctgaggcaataatggatggaaaaaaacttgctataaaaaatggtttgatagagttggagggaggccataatgaaggcgaaaaaaatattataagagtaaggctagaagaaaagacgagaaaaacgttggaggtgcgagcatatgctaaatgttaatattaactatccgtatcctgtaattcgtgagtatacagatgattatcaaggaacgaattttattggcgaactcaaagtactacttgagccagatggatatgctgtgcatacaaactttgaaataaataacaaagagattcaacttttgcttagcaaaaatattcttacatatgcattagaagtacaatgtgtatctacttggtttagaaaactgtatctgatccaggaaagcaaagtaatcagactagatccacagatgattcacgaaagagttgagctgatgccatgtatagtcgtagcgacggcgattgaaggatttgcaaatgaagactttgcagaagaatatcagggcatgaagtttgatttaaatgctggagatatcataggtattggacagaaaagagtatttgatgcattgtatcaaaatgatattattaagaatggatcttccatcgttgatgtcggaggaagtgataagttaaaagaaattcaatgcgatttttcccaaagtactattaaaattaccttgccgattgatcaatatgaggactatagaagctgtggatacaatagatctaaatacaagatgttaaatgcaatactgatagtgccggtacttgtagaaggaattggaattatagcggcagatgagaaagatcctgagcatcaaagcggtcatggaaatcgagcatggtataagacgattgtagttaatttaaagcgctttgccgaaaatgatgaaagaaaatacttgcagctactcgaaactccttttgcatcagcagaattgttattaggtaataactcggctaaagcacttgatttcctttgccaggtagaataggagactttatgaaattatatttttttaaacagaaatttctggatatccttgaacaaaatatatccgataaccttgataagtaccaggaatcagagacgtgggtagatcaatattttattgatatggacaagcccaattatttttttgatacaggaatagagatcaatgattatcaacttattttaggaggtccagaaactgatttccccaatgcgaagattttgtacgaagctttgcagggacatataaatttagtgcaagcaagtgatcttagattatgggcgtatatggcacacaaacagcattgggattatatgcatacgagatggggaattgacattccagacgatgaagatgaagcggaaggggatgatacaaaaaaaactccggcagataaagcaatagatcgtattggaacgcgatatttcttcaaggcatctaagggaaaagcttttgtccgccaggggatagcgagattatattggagtgtttacttgacatatgatgagaataacgaaaatggtaatccatatgagtatacagaatactttttcagcaagcaggatatattcacatcaattacagagcgatcttacgctagaaataaggttcttgtgttggcagcactcaaagagttaaagaaaaattcagatctatcgagaggagaagtacgagcttttttggctaaattaaatcaagctggtgctattacgattttagattttcttgataaaactcaagcggaaaaattgtgtgaaagtgttatgagcgaaattaagagtatagctgtattagaagaagggagccgttttagagcgattaatgatatttctggtaagccatttgggccggagatgataattaaaaatggacaggttatagctgctggtaaaaaaattttaacgaagcctaaaaaactgattggaaaaaaagaaggtacaaagtttaacatttctggaaaggagtacgttattaaggatataaagtgagcgaaagaaggtgaaaaaatatggaaaacgaaaggatgggaataaaatggagtcgtgaagaaactattttagcatttgatttgtattgtcgcacgccttttagaaagattagccagggaaatccggaaattatagaacttgcacagctgttaggacgaactccgggggctgtgggattgaagatgcataatcttgctcactatgatcccgaattgcagaagagaaatataactgcaatggcacatggaagcaagcttgatggtgagatattctcagagttttcaatggattggacaaatttatcatatcaggctcagcttatccgtgcaaagatacagaataaggatatatcagaagtaatagatcttggtgatcttgatgagattccaactggaaaatatcgagattatgtgatgaaaaccagggtggggcagtatttctttagaatgacagtattaaattcgtacgaaaatagatgctgcatcactggtttaaaaaggccagagctcctggtggcaagtcatattaagccttggagagtcagcgatgagcggactgaacgtacaaatccgacgaatggattatgtttgaattctttacatgataaagcgttcgatagagggcttataacgttagataaaaactacaaaattattgtatccaaaaaactgaaagatacagaaatggatttagaaacaaaaaactggattatgggatatgctgatcaccaaattattctaccagataaatttttgcccggaaaaaaatttatagaataccataacgatgtgatttttcagaggtgaaaatgtggataatttaacattagaacaacgccgaaaaaatatgcagcatatacgctcgaataatacaaaaatcgaagagattcttagaaaagctttgtggaataaagggtatcgttacagaaaaaatttcaaggatttacctggaaaaccggacattgtaatcacaaaatataaaattgctatattttgtgatggagagttttttcatggtaaagactgggaggttttaaaacagcgtcttgagaacagcaataatagtgaatactggatcaacaaaatctccaaaaatatgcatcatgatgatcaggtaaacaaggagctaatgtttatgggctggactgtgattcggttctggggtaatgacattaagaaaaatacagatgagtgcatcaaggttattgatgaggttgtctttaacatcaagcttggtgataacattaaagataattaggaaagaagggatcttgttgcaggtaataataaatatactataaggcattgaaaatgggctctgaaaaagtgaattaaacctatttgaggcgcattttcaggttgcttaatccacaatatgcactttgtgatgtgggtatcaattagcttaaaatgctgtgttttacagatattctataagagcagactgatgagtaactataagtgggggattcgcgtcatctatttttctaggtaagaaaagtcataactatacgacctatattccaggctgcatccacagcggatccgcagatatgcaaaagatgtggaacggcagcttgagaaactgaaaggataatcttatgaattacaggcaactaaccggaacgtaccttctggtatcgaatctttgtcttggaactgtacaatttggttcggcagtagaggaaaaagattgttttgagcagttaaatgaattcacagactcaggcggcaattttctggacactgcccatgtatacggcgactggctgccgggagaacgggcaagaagcgagagggtgattggaaaatggctgaagcagagcggtaagcggaatcattatgtgatagccaccaaaggggcccacccaaggctggattccatggaagtgtcgagggtaaaccgggaggcaattatgactgacatggaggaaagtcttaaatgccttgaaacagatgccattgatctgtattttctgcatcgggatgatgaaaatgtccctgtctgtgagattcttgatattttggaaacagcgaggaaaaaaggttatatccggtattacggctgttccaactggaagctggagcgtctgaaagaagcacagagagcggcagaggagtatggtttttctggttttgtctgtaatcagctgatgtggagtcttgccgatattaatacagccgggctgggagatccgactctggtttgtatggatcagaagagtttttcttatcacaaagagaaacagcttagtgcaatggcctatatgtcggtggctaaaggatacttcagtaaattgctgaaaggcagtgcaattccggaaaatgtggccgctatctatgagaacgaggaaaattacaggattgccgaggaattgaaagctttgatagcgtatggggttactcccgctcaggcgtgtatttcttactttaatggacagccgtttccagcgattccgctggcctctttccgaaatatagaacagatgagggagacggtggcgggatgtgatgtgacactgggcagggatatcagcaggagaatgaatgatatgaaaagatttgtaagtgattgatgaaaatggaaaacaaagcggtgacagtaagaaaatctgatcaattactgcctccgcttttgatttccctcaaccctacaccaaatacaactcaatccccaccccccggatatattcctgccactcctccgccagataatgatcggtcacaataatatcaatacattccagcgaggcaaaatacgctggccggatctggtcaaacttgctggaatcggccagcaggatcttggtgacagaagattttataactgcctgcatcgtagatatctcgtagttatgcatacatgtaatcccaagctcccggtgaatacccgcagcggacagaaaaaccttgttggcacgaatctgattaatcagatcaattgcctgctgggattcaaacatctgggcgttgggatggtagaagccgcccgggaagatcaggctgatatcttctttggtgatcagttcattcagtatattcatactatagcacaatgccgtcacaggcatgctgtccggaatgtaatgggccagatgttcggtggtggagccgctgtcaatgatgacggtgtcattgggttccaccagagttgcggcaaatttaccaatcagctctttctgcaggttgcgtttttctttttctgattccagagagtaggaaggagatgcctctgacagactgctctggggattaaacatgatttttccgttttcaaaattaatggtatgatctgcggtcagttctttgatatcccggcgaacagtcatttcggatacatttagatgagtggccatctcctttacggtgatgctgttttttatctttaaaaagtgtatgaaattatttaaacgggtctcttttttattcatgattgatctccctcgttttactcattatgactttattgactttaactctattgaatttaactttatcgactcgaactctatcaatgctaactctattaatgctaactctatcgacgctaactctatcggatcgaactctatcaatgctaactttatcgactctaactctaccaatgctaactctattgactctaactctaccaattctaactctatcgattttaactctattaatcccaactttatcaattctgacattaccgaatctaacttcaccaattctaacatttctcaattcgatattaacatttttaccttaaaaagtaaacgcattctccaaaaaacctcaattatcctaccaaaaacgtcaaaattaacaatttatcagtaacaaaatgtgagtattcacaaacattttttcgaatattgactttaaatgtaaaaaaagttatcataaaactaaccaaaaggcagaaaatgttaaaaaatataacattattagggaggacgacgtggaggagcttttaaaattacaaaatataaccaaaaagttcggaaatgtagtcgcaaatgatcatatcaacttaagcgtgggcaggggagagatccgggctctgctgggggagaacggagccggcaaatcgactctgatgaatatcatttacggcctgtatcagcccacatcaggggagatctttttcggcggcaggcaggtggcaattcattctccgaaagaagcgattcatctcggcatcggcatggttcaccagcattttatgctgataccggaactgagcgtggtggagaatctggttctggggagacggtcgcggagggaaccatttctggatctggaagaagcgtcggaggagatccggaaattgtctgaaatgtatgggctggacgtggatccaaaggcaaaggtgtgtgaccttccggttggaagccagcagagagtggagattatcaaggcgctgtaccgtggtgcaaatgtcctgattctggatgaaccgactgcggtgcttgccccgcaggaagcggaacatttagggactgtaatcaggacactgtcggaacagggaaagacggttatctttatcacgcataagctgatggaggccagagatctggctcacaatattacaattttaaggaacggaaagacaattgtgaccgtaccggcgagagagaagagcaatgaggagctggcacagctgatggtggggcatccgattgccaccgaccttccgagaaaggaatacgcacccggcagggaagcgcttaagatcagcggcctttccatgacggcaaaggatgggaaacgtcttctggacaatattaacctgactgtacacgaaggggaaatcgttgcagttgccggagtggatggaaacggccagtctgaggtagtcgaggcggtgaccggacttcgtaagatcacggatggaaaggtggagttctttgaccgggatatgagccggacttccgtccgggacagaatccgcgagggtatgggccatatcccccaggatcgccataaggagggaatggcgctggatatgagcctttccgacaacatgattctggaaactcatggagataagaagttcagcagatgcggctggatcgactacgacaaggttaatcaatacaccggtgaaatgattgaaaaatacaatgtgaaggccaccggttacaccgcgtcggcgggaagtctctccggaggcaaccagcagaaggtggtgctggccagagaagtgtcgagagagccgaagatcctgattgccgcacagcctaccagaggccttgacatttcggcagtggagtttgttcacaggaagctgctggaatcaagggattccggtgttgcaatcctgatgatttccacggaactggaggaatgtctgtcgatcagcgacaggctggcagtcatgcatcagggcagaatcatgggagtgatgaaacgtgaggaatacgatgtggagaaaattggcctgatgattgccggggtaaatgatggagaacagaaaaatgaagataaaacagaacgataagagaaaaattttgacgcagttactgaaaccggtggcggcaattgcggcggcactgctggttggcgcagttttgattctgtacgcaggggcaaatcctgtcacagcgtatcaatcgcttctggccggggcgtttggaagcttttataactttacggaggtgctggtgaaggcgtctccattgtggctggcaggtcttggcgtggcgctgtcgtttaaagcaggcatttttaatgtgggtgcggaagggcagattatgatgggggcactggccaccgcgtggatcggcgttgtgctggggaatctccctatggtcatcctgcttcctgttaccatgcttgccgcagtgctggcaggaggcatctgggcaagtatcccgggcatgatgaaggcgaagctgggggtcgacgagattattaccacaattatgtttaattacattgcaacctgggtggtcagctattttgtgacagggcctttaaaggatccggcgggggttaatccgcagactgcggagctgggagcgggggcacagcttccgattctggtgaaggcgaccaggcttcacgcgggtctgattgttaccctgattctgattgtcgtcatgtattttgtcataaaaaaaagcacgtttggttataaggtgaggctgctggggagcagtttatccgtggcaagagcatcgggggtcaacgttcccctgacactgatcactacgatgatcatcagcggcggcctgtctgggttggccgggatgatggagatatcagggctgcaccacagacttttaaattcattttctccaggctatggttttacggcggttgtcgtggctctgcttggcaatctgaatccgctggctgtattcgtatcgggatttttctttgcagcaatgacggttggggctaatgagatgcagagaagcgctgccattcccacctcgttaatcagtgtgattcagggattgatcgtgttctttgttctgatcagcgaggtgaaacactttccaataccccgtattttcacatcgaaaagggaaaacagggaggtgacggaatgaatatcttaagtatggcatttattgtgggacttttgactgccacggtccgtatgatggtcccgattcttttgtcggcactgggagaaacgtattcggaacgtgcgggtatcttaaacattggtctggaaggcattatgctgatcagcgcgttctttgcctttctgggatcttactattttgacagtgcggccgtaggcgtcctgtttggagcggcttccggactgatagtggggctgatcgcggcatttttaagtgttactctgcagattaaccagatgatcagcggcattgccttaaatatggtggctgccgggcttaccagcttcttctaccgggtcatgtttggagtacttccgatcccgcctcaggcaaaaagcctaccagtgctggagattccggtgctgcgagacataccgtttttgggtgagattctgtttcagcacaatattctggtttatgcagcatttattcttgtaccggtatcttccatcattctgtataaaaccagcttcggattaaagatccgcgcggtgggcgagaatccaaaggcggtggatacggtgggcgtcagcgtgaacggtgtgcggtattcggcggtgtgtatctgcggtctgcttaccgggctggccgggacgtgtctgaccatcggacagctcaatatgtttatggataatatatctgccggaagagggtttatcgctctcgcagccgttatttttgggaaatggaatccaaaaggtgttctgtttgcttccgttatttttgcatttgcggatgctcttcagctgaggctccagtctcttggcttccagattccgtatcagttcctggtcatgcttccctatgtgctgaccgtggtggcactggccggagtcgtgggcaggagcaaaggaccggccgcattgggaaaagcatacagtaaggaaggatgacgcaacaagtcaatcaacaaaacctatgaaaaaacttatcagcaaatcgctgaaagtataaatgtctttctaactacaaggaggagaagaaatgagaaggaaactgagtttggtaatggcagcggcactgacagcagcgctcctggggggatgcgcaggcggaaatgcaaaacagccggcaggcgatacaacggcggctccgacgacggcggcgcaggcggaggccggcagtacggaagcagaaaagacagaggcagaaaaaacggaggcggcgaagacggatgacaaaaaagccggggacagcgccaaaaccggggacggacagtttaaagcggctcttattgtaacaggatcggtcaatgacgccggatggaacgcggctgcttacaatggcatgaaagcgattgaaagcgaaatgggggcggaaattaatttctcagaaaatgtgtctcttcccgatgcggaaccggcattgagagatttttccaacaagggatacaacttaatctttgcacacagcatggagtacggcgagtctgtgacaaagattgcgggggattatccggatacaaaatacgcagtctatacgggaactgtggaagcggacaacgtggcgtccatctccttaaacgagcacgagacgggatatctggcgggaatgctggcggcctccatgtcaaagacgggcaagatcggagtcattattggttctgacttacctccgatgatccgaatcgcagaggcgtacaagcttggcgcgaaagaggtaaatccggatattcaggtgtttgacgtatttgcgggcagctgggacgatattgcaaaaggaaaagaagcggctctgggacagattgaaaacggcgccgacgtcatattccatgttgcggataagactggactgggagcgattcaggcggctcaggaaaagggcgtgtatgcaattggttcgtctgtggatcagagtgcagtggcacccggaaccgtattgtccagtgccctggatcatgcggataaggcctatttagcggcggcgaagagtgtttcagatggtacctttaaaggcggaatcatgaggatgggactgaaggaagaggcgattggcatggcaccgtacgatcctgccgttccggaagatgtaattaagaaaatagaagaaaagactgcacagatcgtgagcggagaatttgaagttccggagattctggaaagaactgcaaaatagggaaggtgcagcataccgggagtacgcgcttcccggtatgctgtctgactgagtataaaaaggatgaatagaaaaggaaacaagatgaacgattatttattttacggtgcgatgacggaaccgatcgcgcccatggacaaagagggaaacatcgactatgagcttttaaaggcccaggtgcagtttcagctggaccataagattcacgcgattttcgtcagcggactgacggagtgcatggtgaccagtgtggaagagcagattgagatgcttcgggaaactgtgaagacagtaaacagccaggttccggttatgggaaatatctgtttaaaccgcccggaggatgcgctgtacgctatcagagcgtttgaggaggcaggcgcggatgcggtcagcattgcccagcctcacacctttacgtatgaggaggacgccatttatgagtactatacgaatctgatccgcgggacaacgctgccggtctacgtgtacaacgcgccccagacgaataatgtgctttccccaggtctggtgaagcggctggtggaagaaaatgacaatgtgaggggttataaaaacagtgttcaggacattcttcatctgcagagcgtcatggagctgattccgaaggaacgccatttcgagtgtatcgcgggcagcgattcaacaatttttgcaacactggcactggggggatgcggaattatttcctgggtatccattatgtttccggagctgatcgaggaactgtgcgatgcgtatttcagaggggatatcgaggaggcgagagctcttcagttcagagtgcagaaggtgaggacgattttaaagcatgctcctatggattcggggtaccggtatgccggagaactgatcggactgcctatgggatacccgagacagccgatgtcacaggcgacagaggaacagaaaaactacatcagagaagaactgacaaaactggacatgatttgacaaaggagcggaaatgaagccaaagaagttaataacgctgggaagctatcatacggattattttttgattggagacaggattccggacaaaggtgagacggtaacgggaaattactattttacagaaggcggcggcaaggggtccaatcacgcctgtgcctgctctatcctgggcggaaatgtggttttgattcagaagctgggaagggatgagggcggggagacggcctgcagagaattcgcagaatacggcctttctctcgactacgtccggatggtggaaggtgagaagacggggctggcgccgatcatgatcgacaaggacggaaataacgccatcatggtatttcccggtgcgcacggtcactatacaaaagaagacatcgacagggcagaccgggagtttgacgacgcatttatggcgagctttgtatttgagacgaatctggatatgacggagtatgccattaaaaaggcgtatgaaaaaaatgtggccgtatttctggatccgtctccggtgacgaaattcaatccggatctgtatccctatctgacctggatcaagcccaacgagcatgaggctactctctatacggggattgaagtgacggattatgagtctgctgccgaggcaggcaaatggtttctggcaaggggagttaagaatgcgctgattacattgggggaaatgggatcggttctcgtcacgcctgatttaatccggacgtttccggcgccgaaggtgacggttgtggatacgacaacggcgggagatgtgtttgccggggcgtttatctatgcgctgtcggttgagatgcccttagacgaggcagtgctgtttgcctcctgtgcgggagcattaacggcgacaaaggcgggagcggtgaagtcggctcctcatatggaagaggtgcagcagcttttggctgaatttaaaaaatcagccggacttatataaatgcggcaggagactgagatgaatcatacgatatttgcgttaaagggaacaatcgcctatacgccggctccgcagagatttgtttttgaggaagagagctttcttgtgtgcagggacgggaaggtcaaaggaatctggaaggaactgccggatgagttaaaggggattaaggtctatgactacacgggaaagattattttcccgggcatgtgtgatctgcatatgcatgcgcctcagtatgcgtttcgggggctggggatgaatctggagaatccggactgggatatgtggtttgaaaagtatgcgtttcccgatgagaaacggtatgaggactgcgaatacgcgaagatggcgtatgagcggctgactgatgatcttttaaagacgacgacaacgcggtgtgtcatgtttgccacgattcaccggcagagtacggagatcctgatggatttgatggaagaaaagggaattgcagcctatgtgggcaaggtgaatatggaccggaattcgattcccggactgctggagaccacagaggagagtctggaggagacaaagcaatggattgctgactgtgaggataagaaaaaatacaggaaatgccgccccatcattacgccccgctatattccgacctgtacggatgagctgatgagcggactgggagatctgattgcggagaagaaaattccggtccagtcccatttgtctgagggcctggatgagatggagtgggtgcgggaactgaagccggaactctcgttttatggagaaggctacgatgagtaccatatgtttggggacacggttccaacggtgatggctcactgcgtctattctccggaggaagagatacagctgatgaagaagcgcgataagctgattatcgcacactgcccgcagtccaatatcagcagctccggcgggattgccccggtgaagcggtatctggcggaaggaatccgggtgggactgggaagtgatatggccggcagtaatacgctttctctgctgcgggcaattaccgatgccatccatgtgtcgaaggcacggtgggcttttacggagcgcggggacgatcctcatgcgaagaagaatgttctgtctctggcggaggcattttatcttgcaacccacgggggagaaggtctgtgggagcgggtgggaagctttgaagagggatactgctttgacgctgtggtcatggacgattccaggatcagcgactactgtgagcgaagcagctatgagcggacggagcggctaatcctgatgtcggacgacagggatattgaggcgaagtttatcgatgggagcatggtataccaaagggatgcaaaacagagataagagtggagaaggatactgggaaaggggagaggctgaaacgtgaaaacagttgtgattgaggacatcaggccggacaatgactatggcctgattgtacagatgccggaggagggaaacgtatatcaggatgattacttttactggaagggaagcctgattccagcctgctttcagacaaaccggatatcgacagggacgatgaagacgtggcaccgggatcctgtgtttcagaagctggaattccatgaggattatgaaaaattcgtgtttcttacggggacagccctttttcctgtggcggatacgagagatggcgctgtctgtgacgaaagtttccgggttctgcgggtgagcccgggtacggaggtgctcgtacctccgggaaaagcccattttatgccgattgcagagagggatgagccggtccgtattacggtagtatgcccggaaatgccgttttaccatgtgtttctgagtgaagcggtacgggccgaagtaaaggagtgagaatggattggacaatatctgcttaaagcggtattcctgccggtgttttcggaaagagagagtgccggaagaggcgctgatccggatttttcaggctgcgatgcaggctccgtctgcgctgaatgaacagccatgggagtttcttctgataagagaggcatgtatgaaaagggaggttgcagggattaatccatactgccatccggcagccgaagcagactgcctgattcttttattggctgatttgaacaggcttaagaaggacagcccctggtgggttcaggatatgagtgcatgtgcggaaaatatgctgctgcaggccgtggaactaggactcggggctgtctggctgggcgtctatccaagagaagagaggatgaagaaactgagcaggctcgtgtgtcttccggaaaacgtgattccgttcgctgtaatttctgtgggatatccggatgaggaacgggatccggtgctgagatttgacggggaccggatatacggggaacagtatggaaccaggctgttactgcagaaagacagcggggagacagagcggtgaatgtgtgaaacaataagaatctatgaaaaattgggaaggtattagtaaaatgaataatagtgaaatctattcacatgtggatcatacgctgttaaaagcgtatgcttcatgggaagaaataaagaaattatgtgatgaagccgtgacgtaccggactgcctccgtatgcatccctccatcctatataaaacgggtcagggagacgtatggaaaagattttagaatctgtacggtgattggattcccgctgggatatcatacaaaagatataaaggtgcgtgagactctgcaggctattgaagacggtgcggatgagattgatacggttattaatatcggggacgtgaaaaatggagatttcgatcttgtgcgttcggaactgaaagccatcagggaagctgttggggaaaagatactgaaggtaattatagagacgtgctatttaacggatgcggaaaaacgggaaatgtgccgtatcgtgaccgaagcgggagctgattatatcaagacttccaccggatttggaacggaaggggctgtgctaaaggatatttttctgtttaaagaagagatcggtcccggtgtaaaaattaaggcagcaggaggaatgcacagccgacaggactttgtggagtttctaaatgccggatgtgaccgtctggggacgagttccgcggtgaaggtgctggagaagacggattgagaaatagtaagaataatataaaattcgcgtaaatctatttatcaggatttatgcgaatttttttgctttttcctggaaaggcatttataataaaataataaatatcagattgacggtaacagagatgatacgaaagagaagtacacaaagtgtaaaggagactctatgagaaaagaagccagtctggaacaatggaaggaattatatgaggtaacgctgaatttgaaggcgttggagccctggaattactttggcagtgaggatctggtggcgattgcgctccagggagaagaagagccggtatttatgagcatcatggggatgatgggaagctgctatgggatcagcatgtatgaaggcatggaaggattctgtgattttgacatggttgccagagcgggaggagaggacggtcttcctgttccgtatgcgatgatggagcagtcctgcattacatggtacgtcggcgacagggaagaggtgccggaggatcagaggaaggtgattaaaaagctggaacttggtttcaggggaaaaggccagtggcagtacttttactcgtttgcgaaagggtatatgccctttaccccggatgcgagggaagtaagcgttctgacggaggcgtttaaagggctgttcatggcgacccgtgcagtgaaggaaaaacggatatccgtagattttgaacacggtgaaattctctggagagtctacaatgcagagactgaagagtggaacatgtttgcaggtcccctgcctccgtatgaacggaactatccggagatagaactggaggatcaggatttgaagctggagctgaaggcgcagccgcggaacagtcaggaacttgcggttgatatcgcttatatgaagacagggattcgcgatgaagagtatgaccggcctgtctgcccgcgtctgctcgttgtcctggactggaaggcggatatgatactgaggatggatatgatgaagcctgatgacgatgagatcggaatggttttggatttctttgtgacttatgtgatgactgccggccgggtgaaaaaagtccgggcgaggaacccctgggtgtttgcggctttgagcgagatctgcgattactgcggaattgaactgaagaaggacaggctgggaaaagtcgataggattctggaagaaatggcaggtatgatggggtgagaaccgctgatgtcccgcaaagtcaccggaatgtcctccgtggattctggaataccgtgtgtcctgtgtgcggagcgcccaaaagcagttttgacagttcaggggaaagaataaagggatacgtatagaagaaaagtatagaagaaaatgaatcgaaggaattgaatagaaggaaacaatagcaccagctaaattcgcctgaaacagaggcggtttatctggtgctattgtttcttttctgtatctttcctgtatttttcctcaggcttccatattggtcacccgataatgtccgggcgatacctgggcgtattttttaaacgtccggataaagttggagtaatcatgaaaaccggacaactcacaggtatcggtgacactttttccctgttttaaaagcgttttggcaagcgaaatccgttttaaaatcatgtattcctgtatggaacagcctgcctgttccctgaatttacggctcatatgggaacggttcatgtaaaggtgatcagccagggcctgaatggataaatcctctgtcagatgctcatcaatatacctcatgatctggctggaaagctggggcatgaggttttccggaatccaggtggattcgtagaaacaggtgttggccagaaccaggagctgcagaagataggtggaggccaggatatcgtgaccgaagctggcagaagccacggctgtgtgtaaatgatctgttaaatacagatagtgttccagagatttaggcgttagtgaaagcaaatttctgtccgcatttttccttttttcgaaacaggagagcagatcggtctgttctgtacagtaattccggaccagttcaggataaaaatgggtggcaatccgctcatagggagtgccctcgctggcgacggcgcggtgaatttcctgactgttaataatcagcagatcaccgcgttttagccggtagcggtggtgttcgatataacagtctgtacagccgcctaaaaacagcagcagctcataggaatcatgcatgtgatagacgtcattaaccggcctggtggaaagcatatggtggcttcggatggtctccggaaaatgaatccggcggcagctgccgttttcctctgtaacgtgttcgggcggcaatgcagcagacacaccattattaattctctgttctgtagaaaaagtcataaagtacccatcctcctgtccggcatctcagacgatgcgattttccaacagccatcccttgctcaataaatcacataacgcaataaaaaaacaaaaatcagcatagaacacgcatgatatttattatatgataaggaataaaaaaagcaagcagtatctgtctgggaggtaatatttatgaagtttgaattgaaaaaccctgattatgggaagagcccgtatacaggcatgacgaaggaacactggctggaggtgtgtgaatttcttctggaagggatattttccgggattgaacgtatggatgggcatccggtaagccggagagtggaatttgaggtgagttatccaaataaaaacagttctccgacaaaggccagcgcggaacagtttgaagggcttgcaaggagctttctgattgcggcgccgctgctgtataaccgtccggaggctgtggtttgcggcgtttcgataagggattactataaaacgcggatcctggaggcagtgacgcctggaaatcccaattatctgtatggattacaggagcttctcgccatggcaaaggaaggagaggatacctttcagcatacctgcgaatgcgcctcactcgtaattggcctggatcagtgcaggaaggctgtctgggatacgttcactgctgaggaaaaagaccggatcgcctcctatatccgggaattcgcctatgggaagacgggggcgcataactggaggctcttcaacatgctcattctgggatttctgcatcaggagggatatgagatcgacaaaggcgtaatgagagatcatgcgcagacgattctgtcgtactatgcaggagacggctggtatcgtgacggccatcgttttgactattatactccatgggcattccaggtgtacggaccgatctggaaccggtggtatggatatgcggaggaaccgtggattgcagggaagatagagcagtacgccaatgcgcttacagattctttcctttccatgtttgacaaagagggccatgtgacgctctgggcgagaagcggtttgtaccgcaatgccgccgcctcccccttcgcctccgcatatcttctgaatcatactaatgttaatccgggactggcgagaagaatcaattccggtgcgcttctgcagtttatcacgagggaggatgtatttgtaaacggcgtgccgtcactgggattttacggccagtttctcccgatggtacaggattacagctgtgcggaaagtccgttctggatcgcaaatccgtttgtggcattgacgtatccggaggagcacccgttctggtctgcagtcgaagaaaatggatgctgggaacggcttggcagacaggaagcggagtcttctcttacgtgttcggcaagagggtatgaggaaacagtcatggacggcccgggaattgtctcggcacagctgggaggaaacggagcctgcgagttccggacggccaagggcctttttaaaccgggagacgagtatatcagatattacatacgccttgcatttcacagccactatccatgggaggcgtttgacggccagggtgcggaagcaatgcagtacagccttttttatgacggagctgcggaggcgctggtgcctaatatcatcatgtacggcggcgtaaagaacggggttctctaccggaagcagtactttgatttccaccataacttccagggaggcgcttccattgatctggctgatttcccggtggcaaacggccacattcgggtggataaaatgcgtattcccaacaaaccatttacactgaccatgggggcctacggttttccggagtttcaggatgaaacgaaaacccaggtgatcaggcggtcctgtgaaggcgcgcaggcagtgatcttaaaacaggccggccgccagctggcactggttgcttatactgcgtgggaatctgttgagacaaaggagagaagaggagtaaatccggctgcggagaacagcatactggcctacggaaagctgcgcagagaaaaaatgtacgggtatgaaccttatgtgatgatcagcgccgtattaagcaggaacgatgatggggaatgggaggaggacgaactgttcccggtcagagagatcacctttacggatgaggagcagtgcggcggatacggtccggttacactcctgatgaaggacggacgtacagttgtcgtggattatgaggggctggaagggcatttgatgatttaacgataaaaaccttaagatagtgtaaaaatatgaaaatattacaaatatccctggttacgatctgaagattttgtaaaaaggcagtatgaaactttatttgcttttcagattcttgatgttatattgaaaccatcataattacaaggaaatatgcgggaagaccagggatatcacggagcggataaacgcgcctgccgctggtctttcagcagaaaatggaggagacattatgaaaaaaagctggaaaaggggactggcgctttatctgtcatttgttatggcagcaggcaattttggaagcggtatctcttacagcttcgctgccgtaaatggcggcggaggaaacgggacgggaaaggccacatcttccaatgcggccggatcgggaagcggccatacgcatacatcaaaggccacttcatctaatgcggattccggcagttcagaccgggaaccggataaaaaggcgacggagtcaaatgcgacaatgtccaatgccctgaagctgcttctggagaagacggaattttctctgacagatgattttagcgatacacaggggccgatctggtactacaagtatggagacaaggacagcggggaagtatcagaacttcaggagtatgacgcagatacaccgcggtggaaggataataaggataaatggctgagaatatttaatgatggtatgatgccgggaaataagggggacgacgcgattctggaatggaaagcgcccgcggatggcctcattcaaatatccgaggatgacggctctatattcatggaaacagaccggaatgacagagatggagtcttgctgtccatacagcagaacggaaaattaatctggccggatacagggacgatatcgacggaacacaataagacagatgtcaagttccagtcattttatttacaggtcaggaaagacgatgccattcatttccgggccaatggaaataaagagtacaacaatgaccgtgtaaaatggtgtccggttatcacgtatctggaagaagaggatgtcgcaatgatatccgatattaccatgacgggaagagattccctcgaatttacagcggcgtcgaaagaactgtccggtgatacccgggatcggatttctttaagcgcaattgtaaacggaaaaaaggaagaggcggtaaccgtccgttccgctgaggcaaaagacggcaaagttgtggttgcttttgaagaggtcgaagcggcagataaagatcagatacaattactggtcggttttgatgaggatcatcggttcgttacatacagccctcaggattttgcagtgatttccggtctgacctattacgtagacgcggtaaatggaaacgacagcaatgacggacttacagaggagaatgcctggaagagtcttgacaaggttaacagcactacatttcttcctggagattctattctgttaaaggccggctgtatctggaacggttatctgtatccgaagggagagggaagcgagagcgcccctgtcacactcggaaagtacggcggagacggatatccgattattaacggcgatgggtcggttccttacgattcaaagtataaagtcagaaaagatcatgtatacagtcctgccgttctgctgagtgatcagagcaactgggtgatcgacgggattgaagtcacaaacagcgcagatgacaatttcaatcatgtaggaattctggtatttaccacaggacagactggggtggtatctaatgtgaccgtgcagaactgttatgtgcatgatgtgacagccgaagtggcaaactctaagatgaccggcggaattctcgtgatcggtgccgatgcatggatcgatgggcagaaaccggaaggcgagatggcttctgatatcggttttgatgaaattttgattgaaaacaactatgttaagaatgtagccaaagaaggaatccgttccagcggtcagagtacaggcgcggagggcgttggtttccgtaatacaaaaactttccgtaatattaccttccgtggaaactatattgaagaaattttcggtgacggcatagtgcttgcagaggttggtgaaaacggactggtagagaataatgtggtgaagaatcactgcaactacgatacagcaaattacgcaggcgcatggctgtggcagtgtgacaattcagtcttccgctataatgaagtgttcggcggtgaatacggatataatgacggagaggcatttgactatgatattggctgtaaagacatcatctatgaatataattacagtcaccacaataagggtggtctgcttctgaccatgtatgacaatgcttcctatcatttccgctataatatcagcgccaacgatggaaagcccagccaggagctgttccactgccagaccggtgagacgaagatctataataataccatgtacatcggaaagggtatcacaacttcgattttccagaccgggtccgtgggatactttaaaaacaatattattatggcgcacggcagtgttcccaaatttgggaccagcgccatcagcgtatcgaagggagcgatgaccaacaatattatatacccggcctctatcacaagtgtcaacggtccttcagaggcagttctggaagataatctgtttgtgaacccaagactgtcttctccgcaggtgagtacaaaatacagcagtaaagagtatgacctcacttacgaaaatatgggacagggagaagaatttattgccggtctcagaaaacgtatggcgatctttaaactgcaggagaactcgccggcggtggatgcaggcgtggtaattccggaatcgaatgcaaaagaggatatctttggtaatgctatcgttggtttgccggacattggcgcccatgagtttaataacgatccgggccctgtggaagaagatacagaaaaagcagagaaagtaattttagataagacagaactttatatgacggtagaagacagtgtccagttaaaggcctccgtacagccggaagacattattgatgacagtattgcatggtcggttcaagatccggatgtagtaagtgtatcagcggcaggtaaggttacagcccggatgaagggagaaactgtgattacggctgtcagcctgagtaatccggaagcaaaggcagagtgtatcgttcatgtatacgaaaaggattctgcgtctgtcatagcagataaggatgccagggtacgtgatgacggtacccacagcggaacggaagaatcgatgactgtgaagctggatggcagcggttatatcagaaatgtgctgatgtcctttgatctgtcttccgttccgataagctataaaagaattctgttgaaattccatatagacagcacagaagcagataacgttccgtttaccatatctcggattggtgacgagtgggaagaagagagtgtaacatggagcagtatgcctgacaagggagaaaaaatccttgatttttcatccagtatctcggacggtgggacctggaaggagctggatatcacggattatgtggaaaccttactgaactcaggggaaaagaggctttccattgtctttgaaggcgtaaaagtaggatcgaagaattacaccaatattcattccagagaaacagattataaaccgcagcttgtatttgacaatgaaactgtaaaatcagcggaagatatatttgttaaggttccggttggaacagcaccggccttgccggagacggtaaaggtaacctacagtgacaatacaactgccgacgcggcggtagtatgggatgagattccggccgtgaaatatgagaaagaaggccagtttaccgtatgtggttacattgaagaaagaaaacttccggttattgcctatgtgacggtttctgattctattattacagcagtttccgcaggggatgtgacaacgcgggctggtgttgcaccgatactgccggagacagtgaacgcaacctatattaacggttcagaggaacagatacccgttgtatgggaacctgtaaatgagagtcagtatgcaaaacctggaacatttactgtgaaaggaaaagtaaacggctttaatgccgggtgcatcattaagatcatcgtaacggaagccggagtagttgaggctgaggcggttgatataaccggttatgtgggatttatgccggtacttcctgaaactgttacagtcagatatacagacggcagcaaggggacagccagagttgcgtgggaagagacggaggaagaaaaatatcagaaagcgggagccttcactgtttatggaacctgtgagggactggaacagaaagccgctgccaatgtgacgatgattgatgcggctgcaaaaccggcagaaatgaagagtccggcaggtaaatatccggcgcttccatataccataaagctggaaaacctcagccgcgcagccaatgcatcggaggtacctgtggtatgggaaacggtcagcagggagttatatcagggcagcaatccatatgtggtaaacggttatatcgcaggaacgaccataccggcttccataaagataacaccggcagatccgctggaatatatggatggtgtaattgatacgaacggcgatacatatattcaggtaagcccgtcagacggtaatcatggtaataaagatgtaattcggattaagaattatgaaggggaatataaacgtattggagtagtgcagtttgattttaaatccatgaatatttcagacttaacggaaatgacgctgagactgtattttaataaaatggatgagaaagaaacggttactgagacctatttaaatatctataccaataccccgggctgggttgaaaatacggcatcttatgattccattacgcaggccagcgggtataaggcggaactcattaaagaacatgttgtaatcaaacgtgaccaggtgggaagctatattacgatcgatgtatccgatgcaattgattatattgaggacggaaagatttcatttattctcgatattgaagagaatccggagaatgatgccaatggttctaattccggtcttgaattctcaagtaaagaatccggagcagaaaaggcaccgaagctcttcgtatcaaaccagtatgtgacggaactcgaggcggtgaatttagaagccgaagtaggaaatacgctggatcttccggacacaattacgatttattatgcggatggcactgagaaacaggaacctgttgcgtgggaagctgtcagcccgactctgcttagcagaaaaggaacattcctggtaaggggacatgtggaagggctttactgcagtgtcactgcggctgttactatgaaagcagaagatccggacaccccggatacgccagataccccggatacgccggacactccggatactccagataccccggatatgccagatacgccagacaccccggatactccagacactccgaatcacccagagaagccgaacaaagaatcttcctcatcttctggtaaggcagttacgactaacagctgggttcagggaattggctataagaaatgtattttgggtaatggagagtatgcaaaaaatggctggtattatctggaatgcaatggtattatgaactggtatcgttttgacgagaatggaaatcagatcactggattcttcacagatcaggatgggaacatttattatcttgataaagatggagttatgatgaccggatggcatatgattgatggtaaatggtattactttaatccggtttctgatggaacccgtggctcgttgtatcggaatactgtaactcccgatggttatcatgttggacctgacggggtatggaaaaattaatatgaggtgaaccgtgaagaagaaaacagcattttgggttttaacatggttcctgattctggaatgtcttgccggctgtgcccggcaaggctattcctgttttatggaagtggggagctatgagatatcaaaggaagagtatgcccttctggcttatgacaatattgccgtgacagccagagaatatggaacgaaagacgggatcgatgtaaatgttccggggttctgggagaggaagacagacggcgtatccccaatggaccgtgttcgggagcttacagatgaggaagctgttcaacagaaaggaattcagattctggcaaagaaaaacggaatcattgatgatatcggatatgattcgtttttaaaacagtatcaggaagagaatgagcagcgcaggcagatgaaggaagagggaacggtcttatacgggccggtggagctgtccgtcagccagtactattcctaccgtcagagtcagctggagcagctgctggaagaatttgtgaaacagaacatcatcacaatcggggaagaagagctgaaagaatattatcccgttgtgaagcagaaggaagaaaaaaagaactttcaggcaaaactcagcctggcagtctttgaagatgccggtgacgggcaggctgctgctgtagagcagtgggttgcggatcatggaatcacagactctctgccggaactgttggctgaggataccggaattgtggcggatgttgagaagatgagcgtggacaccctggaactgggaaaggaaaatcagcttctggaccgggtggtactggccatccaggggctggaagcgggagcagttacgccggctatagaatacacagatggaatgaatgcagtgattgcggttgaatcaaaggaatatgtgccgtttggcagctacgatacggaacgggattatgtggaatacctgcttcgggagaaaaaagccagggagtacatcgcagatgaaatcagcaggatggaagtgaaaaaaggggaagcctgggaaacacttacctatgaagatgttgtaaagtaaaacagaacagacaaaaatggagcagaatgatgaagaggttattacaaaacaaaacagtaaaatttaaaatcatggtatataacatctgcattatttgcgtcatcggaatcatattcagtgttacaaattatgtaactgcaaacagaaaagccatacagctggctcagaattccgtagagtaccatgtggaaagcatctccagatactatcaggaggtctacgatcagatggtgaatctggtgctcaactgtgcggaacgggagatgtttgatttaagttccctggggcagctggatactgtggaggaaaagagaaaggggctggactatgcaaagctggccgccaatttctgtgctgttacgggatatggggattacatcacaaggctgtccatttttgacgacagcgatgttcacatatcggcgggaacggccttaagcagtgtggacgacgggagaagaatccggagtgccccctggtttgaccgggaactgaagaaagatatgtacgattaccggctggatctggtggattcccctttttacaaggaagtgggaatggcgatccccatcatctgcaaaaactccgggtataaagacagcgactggtccgctctcttcctgtcgccgcgtctctatctggaccggctgaaggaggatgacaacggaaatacaatgcttgtgaccacgtaccgcggagagcggattgccacgctgcgggagccggaggggcaaaaagaggagagtgaccatttgattgattcgattctccacagagaggagaaccgtggaatcgagaggtaccggataagcggcgagccgtatctcgtatcctttaacaaagagtcccagagcggggtagtggtgattgaaatcatggatatggcagtcttaaaaaatgacagcctgatgctcatgcagaccgtcggcctgatctttctttcctgtgtactccttgggatttccatgtcgtttctgtttaccaatgcagtcaggaagccgatcgaccggctggtaaaccatgtgggcagaattgcgaagggggatttcggtcaggaggaatccctggaaagtgaagatgagatcggactcatcgggaaggctgtaaactccatgagcagccagatcgaacagctgatggacaagcggctggaggacgaaaaggaaaaaagcagtctggaaatccggatgctgcaggcgcagattaacccgcatttcctctacaatactctggactcgattaaatggattgccgtgatccagaagaacagcggaattgtgaaggcggtgaccgcactgtcaaagcttcttaagaacatggcgaaaggggtggacgagcgcgttacgctgagagaggaactggattttgtccgtgactacgtaaccatcgagaagctcaaatatgtggaaatgtttgatctggagattaacatcgaagaggagacgctctacgatgcgcgaatcgtgaagctgacgctgcagccgctggtcgagaatgcgattttcagcgggatcgagccgggaggaaagaatggaaccatcctgatccatgcatatgaacaggacaagtgtctctgtattgaggtgcgtgacgatggaatcgggataccggaagaaaagatccccgagctgctgaaccattcagaaaagttaaagggcgaccagatgagcagtatcggaatgccgaacgtggacagacggctgaagctgatctatggggaggagtacggactttctattgagagccgggcaggggagtatacacagattaccgtcagaattcctctggaatattaacggagatataagggagagtgagcttatgtaccggattatgattgtagacgatgaaccgttaatactggcggggatagcctcgcttctgaactgggaggaacatcagtgccggattgtgggaaaggcatcgaacgggcagcaggctctggctcttttggatacgctgcggccggacatcgtgattacagacatcaaaatgccggctatggatgggattacctttatgaagacggccatggaaaacggcagtgcggcaagtttcattcttcttacgaatttagaagagttttctctggcaaaagaggcgctccatctgggggcgattgattatctggttaagctggagctcagtgaagaaagcctggtccaggctctggagagcgccatagagcggtgcaatatgaattaccacatgatacatctggcagaagagccgctgactgtggacgagcggatacagaactatttccggcggattcttatctacgacacggatgtggaggcggattccgggctttccgctttaatccgggagcgatatccacggccggcgctgatgctgatcaattttaactatggatttgagggcttttccgaggcatttacaagagcggaccagaaaaaggtcatggggtttgcggaagacataatcagcggcatggtaaagggcttctttgacaacagctgcgttctgcggcgggagcagagcggatttgtcctggtactgtcaacggaaggcatggatgactttaagagggaagccagcgtgatgagtgtgaaattccgccaggttatgaaggattacttcgaagtgcctgtttccatcgcggtgagcctgcggggaggaggcgtggacgagatccaggatctgctgtatcaggccatgagcgccatgaatcttacgttttacgataacaccggcggcgcggtgttctattcagaactgtgcgaggacaatcgcagccacagcagcaattttaacattaatttcctgaaaaaggacgtgacggaggccatccgccaaaatgactgcgaagaattttcctccattatgaatcagatgatccagctgttttccgagtgcaggccttccagaaggcaggcggtgaatgcgtgcaataatctctattattttatcacctctctgatcgaagaccggggcgaccaggacttcccctacgcggtggatattgtgggacagctaaaccgcatggataatttaagcgctgtactcacctggctcgagggcttccgcgatcagatgataaaggtgctggagaatcatcaggaggcgcgtaaagataaaatcgtggagctggctctggaatatgtaagagcgcattatcaggagaagattacgctgagccaggccgctgccgtgttaaatgtcagccaggggcatttaagcagcacgtttaaaaagcagacagggaagaatttctctgattatgtgacggaaatgaagatcgaaaaggccagggagctgatcgaatcgtaccagtacaggatgtatgaaatctctgacatgctgggttttgacacgccgtattacttcagctcggtgttcaagaaaataacagggtatacgccgaaggaatacgagaatctggtggtaaagaaattgtaacggtccagtgctttacagtgacaggaaattacacatgtaattttggggaggaataatatgaaaatcagcaggatagcttcagcgatttttctgttggcaatcgtagccgcaggagccgcgggctgcagtttgggcagagacatgacgtccgacagcggcaaagccgcggaaggaagaagcgccgcagatggagtgaaggaggggcgtgtgaaaataacggtgtccgtctgggataacgccaattctcctcagtttcaggccatggcggacgcatttatggagaaaaatccggatatcgatgtggagctggtcgatatccggtcggatgaatacaacagtaagctgactgtactgctggcagggaatgagtctgatccggatgtgattatgatcaaggacgcggatacgcagatttccatgagagagaaggggcagattctcgacctgaccagctatattgccagggacggcgtggatttaagcatctacaacggcgcagcggaacagcttcagatggatggaaagcagtatacgctccccttccgccaggactggtatgtgctgttctataataaagatctttttgatgcagcgggggtggcgtatccggcgggcgatatgacctgggaagagtatgagaagctggcggagaagatgaccttcgtcaaagacggcacggcagtctacggaacccaccatcacacgtggatggccctggtttccaactgggcggtgcaggacgggcaacacacgctgatgagtgaagactacgcttttttaaagccgtattacgagcaggcgctcaggatgcaggatgaggggattatacagaattatgccagcttaaaaattagcaacatccactataccagtgtctttgaacagcagcagtgcgccatggttccgatgggaacgtggtttattgcaacgctggttcaggaccggaaagcggggatttttgattttaactggggagtcacgagaattccgcatccggcggggatcgaggcggggagcacggttggctcagtcaccccgatcgccgtcaatgcgaaatcagatgtgccggatcaggcatgggaattcgtgcggtttgccaccagcgaagcgggggccgaaattttagccgataacagtgtgtttccagctattaccaccgccggcgtggtgagccgtctggcttccatcgagggatttccggaagacggaaaggcggctctttcggtaaagaattttgtgttcgaccgcccggtggatgcgaaaatggcggcagtgcgcaaggtcattgaggaagagcatgactccatcatgataggagaggaaacggttgatgccggtatccgcaacatgaatgagagggcggcggaagccagaagcagataaccctactcgcttaacgtgcagccgggatccaggtcgcagagccggttcacccatgcgccttccggtttcggtacccggtatcccacgcggagcagcggatctccggttcgctccatccagttttcaaggcgcagccgcagatcgtcgtacacctctttgtaatcactgctgttcaccagattgttccgctccagcggatccagcgccagatcgaacagcatctcccgttcccgggtctgcttcaacagcccggcttcaatcatgctgtccttgctgggggaggcatcaatattggccggaacgtatccgttgtgataatcgaaataccggatcagcttataccggctggtgcggatgcagcgcatgggttcataggccgcgtgataggtgacctctgcgaacacttcttcgttgatctccagctccggattgtcaaacagcccggcaaaagaatgtccctgcagatagtccggtttctcgatttcaagcaggtcacagagtgtggggtaaacatcgatctgggagatcagggaatcgctgacttttccggccgcctggtttcctgcaaatttcatgatcagcgtcacaccaattcccgtatcgtaacagttgcatttcataaatgggaatgcgattccgtgatcggtcgtgaagataacgatcgtatcatcctcgcgtccggagcgcttcagcgcgtccagcacaacgccgaccgaatcatcggcgatcttggcagaatacataaagtctgccatatcttttctgttttccttcgtgtccggtatggtcatcggcggctttacgtaatccggattgacgaaatcggcaggcgcctccgggtatctccggtgcgtattgataaatcccacagacataaaaaacggtttttcttcctggtaatgcagcagatagtccgccgcacgggtacaggccgcggtgtccctgcggataaactccgagtggtggcagtcctcgtcaaaccagtagtcataccccagcatggcggcgtccggcgcttcgtgctgtacaccgaacaggcaggtatggtagccatgactgcgaagaaaattggaaagatgcgtatcgtaacaatccatctggaagcccctctgagccagcccaagcatgttggtactgtggggggactggcctgagagcagaccaactcggctgggagaacaggtaggagcggcgcagtaggcctgacggaacagcgtcccttcttttgcgagcttcatcagattcggcgtcttcacggatacgccgaacggctctaaataacggccgctgtcatgggtatgtaagtacagaatgttttttttcacagattactcctttcgaaacttattttttatcctttgacggctcctgctgagacgccgcctacaatatatttctggccgaacacgaagataatgaggaccggaagggcagtcagcgtgatatctgcgcttactaagttccagctctgctcaaactggccgaagaaattgtatacggccagagtcatgggccatttcccggagttgttcataaagtacagcggcatggagaaatcattccagatcgccataaaatttaagattcccactgtgacgatggttggcttcatcagcggtaagatgacgctggagaacagcctcatggggcctgcgccgtcgatgacggccgcctcgtcgatttcccgcggaagcgtttccacaaagccaaacatgaggaacagcgccagcggaatattcatggccacatagaggaagataagcccgtaccgggtgttgataagcgcggtggccttcatgatcttcatgagagccacgttgttcaccggcatggcaattcccagtacgatgaggtagtagattacccggtgcagccggctgcggttccgcgacagcacataggaggccgcggagacaactgccaggatcagcagtacgctgaaggttgcatacagggcgctgttaaagaaggaagaaagcagttttccgcgttcgatcacggtggtatagttctcaaacatgaatttttccggcagagtcagcgtcatgaccatggattctttctgtgatttaaaggaatttaccagaactaccagcatgggtaccaggacaatcaggctggcgatccatgccgccagattggcaagtacggtaaagagtctctttttcattgttccacctccttgttgcccactgcttttaagatgaaataggaaatcatcatgacaaatataaagagaaggctggaaagcgtggtgcccatggcataattgcccttggaaaattcgctgtaaaccgccgtgttgataacacctgtagaattgccggggccgccgttagtcaggctgtagattaagtcaaatacgcggaagccgtaggtaatatttaacaccgttacactgataatgacatttttaagcagaggcagcgtcacataccgaaacttactccagaaaccggctccatctaactccgcggcctcgtaataggtggccgagatggaattcagccctgcaatgaccaccatcattacatatcccgtacctttccaggcatctacggcaaaaattgatttgaaagcaaaatccaagtcgcccagccagttttgggccaggaaatcgaggcctgcagctttcagtgtaatattgatgaagccgcggctgggatgaaggatattcttgaacaccaggccgatgatcagaaaggacatgacctggggcagaaacaccagcatacggtgcatgcttttcattttgaccatcctgctggtgagcaggatggccagggcgattccgagtgtagtcttggtgatggagctgactgcggtaaacagaaacgtatttttgataaacattccgtaattcgtgccgccttcaaaaacttttaaataatttttccagcctacgaagtttacttcgctgctgtaagcattccagtccgtgaaggaatacccgatgcccataatgcccggcagaaaaaacagtccgagatagaagatgagcgcgccgagggtaaaccaggtcggatacaatttttttgtcttcataggccctccgatttagttccatgccgggtctttctgcagctctgcctgctcatcccgtcttctggatatgctttccataacctgttctgatgtcatggcgcctgtatacatggcttcaatatcttttcccgtatccataaactgaggatcgatgtatttgacgcctacctgcatgatggtgcctctttccagagaatcaatatatttattgaattcatccggataggatggcgtgatctccggccagcagagtcccatctcttccggattgttgtcctgtctgtactgtaagttttccggtcttgcaaggaaacggaaaaattccagggcatactcgacgttttcactctttttattgataaagtaagcggcgctggaggcgttgtttgccagtacgtcgttgtcaccgaaaggcatcaggaagataccgatctgatccttcatctcaggataggcttcttccacctgcagggcaaagccgggagccgcaaggtacatggccgcttttgctgttccgatctcgtcttttgccgcatctacggtattgcttaagtaatcttctccgtaatatccaaggtctgcaaattccttcatctggtccaggatggtcttcatcatggccacatccttaatgtctttttcgttattgttcagcgcatcatataagcctggttccagtttttcaaagtatggtccgctgccatagagcggcacgcactgatgccatgcgctctgggttgcttcataaatcgggatggttccggaatcctgaatcttctggcagactgttttaaattcttcataggtaacaggaatctccagtcccagatcagcgaatatctttttgttgtaattatagaaattcagttttggttctgcaaaacggatggcatagattttatcgtcgtaagacacacactcttttgcataatccgccatgcggtccacccattcctcgccgcttaaatccacgcaggtctcatccgggcggacacgggagtaaaggcttaaaggatcggcatcgacgcagaagatatccggcgcctctccggagtccagctttacttttaaaaggtcgcgccactgtgcgtcaggagatacctgaaaatcgattttgatgccggtttcctcctcgaactggcctgccagatcctgaagaacaccgcaggacgggataccggactgatgggttccaaaggaaatcgtcacattttcttttttgcctgaagcagtggatgcgcctgccgccgctgagctctgaccgccgcttttttcagccgtgccggcattgcagccggccagacaggatactccaagtgccatagttaacagtaatgcaatttttctcttcatagcaatcctccaaaagttttttagtagctttttactatgttctatagtacaataactagaaataaaacaacatgcacaaaatagttttgatccttgtatttttttgactggaggaatcatgaaacggaaagcaccatccctgcagaaatcgctgcctcggtactattttctggtaatctttgtgatctttaccgcaatgctgacagccttttacatctattatactagaaatctgagagccagcgaatatctgaatcttcagaacgtctgcgattccgcatattccaatatggaacaggagatagaaaagatgtccacggtatccttaaataccatctattccaaggacatcctgcccggtatccggaagattccggtggaccagctgggcactcagcagacctatacccaggtgcaggccatctataattccatatcggccatgatcggcccgcagcagacggttgcccagattaatctctaccacaaaaatggattttcggcaggcaccggtttctatacatacaacaagaagatcgacctgaaagaaaaaagctggtataacgatgtactgacggaaaacggatacaaggtcatgagtacgccccagccaatttcccatttcataacgaccgcggcgattccctacgaaccgtattacatttccctgaccagactgtactttgacgacgtccatgaaatggagggcgcggtggaggtcctgcagaagagcgatactttttttaattatatagaccgcctgacggctgcaaatcccgctctcagtcttctgatcatgaacaggaacggggaactggtttatcctgtcaacggccggggggaagaactgatacatgagatcacggcgctggcccataagcaggacattcccacagggcggacggttcatgtcagggatgagagcggaaggaaaaacgcgctgtatcatcagaccgtcaaatccgccggctggcagatctacgtctttgaaccggacagcgtcataacaaagtccctggcggcaccgacattcctgtttctggctgtgctggctgcaggcattgcgcttaccatggctgtctgtttctccatttcccggagaatcttacagccggtgggagaactgacggaaacctttgagacgctggtgctggatgacgtattttcccatacgatcgatacggtttccctgccccggagccattacgaggagatacagactctgatcacttccttccgggatatgtacaacaagatgaatgcctcgatcatggagatgttaaaatcgcaggaaaatgagatccgtgccaaggagatcgccacccagtccatgatgaagccgcactttctctataataacctggccaacatcagcgtcatggcggaggagaacatgaatcaggagattattacgctgacggaaaatctctgtgattatctgcggtatacatcgacgggaagcgagatccgcgtgccggtcagcgatgagtttttgtatacgcagaagtatttggcctgtatgaatgtccgttacagaggccggctgacctgtgattttaccctggatgaacagatgggagagataaaaatccccaagctgagccttcagcccatcattgaaaattcattaaagtatgcgttcatgaaaaagccgccctggcatatctccgtacgggggtatttagacagggatgcggggaaatggtttatcacgatcacggacaatggggtgggatttaaagaagaggagcttcaggaactggctcatactctggaatccatccgtgattccaaagacattacccgcctgaaaattggaggcatgggacttcaaaatgtatatctgcggcttctgctccagtacggtccgtctgccagccttacagcagagaatcatccggagggaggagcctgcattacgatgggaggaagtattacaaatgacagaaacagctgatagaaaacagtatgacgtcgtggtggcggaggatgaactcctgatcctggaaaatctggtgaaaaaaattaatgccatgccgctgccgttttgcgtaaaaggcgcattcgaggatggagacagcgccctggaatttataaaaaccaaccatgtggatctggtgatcaccgacattaaaatgccgtttatgaatgggctggaactgtcacgcgttctgcattcctcatttccgaccattaaaatcctgattatcagcggatacaacgaatttacgctggctcaggaggccatcgaataccaggtgaagggatttctcttaaaacccattaagcaggagcagttagaacaggcgctgacaaagctgctcattgagctggacagtgataatgatacgcttcaggccagtgtaccggaacacttgaagaccatgggaaaggaggagattgccggctgcgtggaaaagtatttaaaagaaaattttcagaagcagatctctatgggagatatctcggataaactgggatttgccccggattacttaagtcatctgttcaagaaataccacggggaatctccggtccggtatctgaccggccttcgcatcaattatgcgaagcagctgctgatacgccagccggatctggaggtggcggtgatcggcgagatgtccggttatccggacccggtctatttcagtaaggtatttaagaaaaatacggggatgtggccgagtcagtaccgggcggaagggggctgccagagaccggagtaaaaattagtcaaattgcttcttgacggaaaatcaaggaaggagtagcctgttagatagaaactgcataaaaaggcagagaacgattacatcaggaagacaggggaaaagagtatgacaggcagtatggccaggaaagagccgcctgcaaagggcaggggctgcgcttcggaaacggttgggcagaagcagtacttatttacaaacagcgatttaaaacgtctcatcgctccgctcattgtggagcagattctggcggttaccgtgggaatggtagatacgatgatggtgtccagcgcgggggaggcggccacgtctggcgtatccctggtggatatgatcaacaacctgctgatcaacgtgtttgcagcggtatcgaccggcggtgcggtggtgtcctcccagtttctggggcagaaaaaccggaaacgggcatgcgaggcggcggatcagctgatgatgattacagggctcatttccattgtgattatggcaggggcgattgcgttccggcacggactgctgcgacttctatacggcgggatcgcagatgacgtgatgaagaacgcgctgatctatctggtgctgtcggcactttcctatccgtttctggccatttataattcctgcgctgcgctgttccggtccatggggaattcgaggatttccatgcaggcctcaattgtcatgaatatcatcaatgtggcgggagatattctgtttatattcggattccactggggagtggcaggcgctgcgctggcgtctctgatcagccgtataacggcgtgtgtcattctcgttatccgtcttcacaatacggggctggagattcatgtcagctttggacggcttcactggaacagtggtatgatcgggaagatccttcatatcgggattccgggtggtattgagaacagcattttccagctggggcgcgtgctggtagtcagcatcattgccctgtttggcacgacacagatcgcggccaatgcggtcgccaataatctggacggaatgggtgtacttccgggacaggccatgaatctggccatgattaccgtgatcggccgctgtgtgggcgcaggcgattttgaacaggcggaatattacacaaagaaaatgatgaagcttacgtacctcatcagcggactctgctgtctgggggtgattatcaccatgccgctcaccatgaagctgtacggcctttcggaggaaaccctgaaactggcggcagtactcgtgctgattcatgacggctgtgccatcctcctgtggccggcgtcctttaccctgacgaatgttctgcgggccgccaacgatgtcaaatttcccatgtgcatttccattctgtccatggtgatcatgagactgggagtcggttatctgctggccgtcggccttgggctgggagccgtcggcgtatggtgcgccatgatcctggactgggtggttcgcgtgatctgctttgtgggacggtaccggagcgggaagtggaagaacttttatcatggtgtataataagtaatggaaactaaaaaaacatgtttaaaatgtaatgtataaaaatgatggaggactttctccagaaagtccggcggtttgaggagatggtcctgctgtggtgataagacacggcaggaccatctcctttcttccatgtccgggttgtgaaatggcagcgaatcgggtataatttacttagatgagcaggaacaggaaggagggcggagttatgcggtattatatatccgatctgcatttttaccatgaaaacctgaattaccagatggatcatcgggggttttccaatgctgctgaaatgaacgcccatatgattcgtcagtggaacagcaaaatacgggacagggatgaagtggtcgttctgggagatttatctctcggttccggggaggaaaccaaccggattctgagtcagctgaaagggcggatcagcctgattgaggggaatcacgattcctatctgacggacagacagtttgaccggagccgtctggaatgggtgaagccttacgcggaactgcgggataataagagaaaggtgattttaagccattaccccatgatctgttacaacggccagtatcggcgggatgaggaggggagacccagaagctacatgctgtacggccatgtgcatgatacctttgatgaagcgctggtgaaccgctatcaggaggagacccggcgcgccgagagaccggcctgccacggcggcccgccgctttccgtaccgtgtcagatgattaactgtttctgtatgttttcggattatattccgcttaccctggatgagtggattgaaacagacggaaagcgacgcagcgggagaacggatgagatttcttttcgcacagagggaacggaaaaaaagtgagaacgctttcgacaaatttcgtaaagattcgacaaaattctacacaccccattgtattacgggaaggaatcctgtaaattgtgagtatggttacaacagggacagcacagaggctggtgaagataaaatgtaactatgaggcatttcggaaggggccggtcggaactcttccatacaggtatctatcttgcttttccggttattcgttctgaaataataatctgtgggagagcagtgcgcagggcagtcctcggggaaccctgcgtattttctgatccggcagtcccggatcagaaaatacgcagtaagtccgtcaaatcataatgtttactttctatatcgcagcagcatccggccggcagtaatgtcataacttcgctctccagtctgattctgcgtcggaaatggctgatcatgccgtcaaaatcctcaatctgatgtgcctgtccatagggggaccggctcaaatagccgatcatcagctgataccagacttcctcgccctccggattcacccgttcctctttaatggtttgaatgcattgccggatgtcaggggaaactaaacgaatcagcttaaagtttgataaatccagcagcgccgtcagttcctgataaaaatccataatctgctgatcactgaacattgcatacagcatcagttcttccaggatattctggaaaaaggagcattcaaataaattgccgccggaatgaaaagcacggaatctccgaaggatgatgtctctgaattccgaaggtttttttcttccgccgtacacctcaaatttttccatatattcataaaaatcataatgcacggttttgattttcgtataaggtgttataaaatgtgttccttcttttacagtactcttttcaatctcatcacgcagatccgccagatcggaaagcgcctgcctgtattccgtttccgtcatgtacgcgcaccaggccagttcgactggggagatatcgccctcccgaaatacgcggtaattggtaaagtggcgtgccagggcatctaacagggtcgatttgccgcttcccggtattccttcaataaaaatattatatggttgattcatcatgctgcctcctctcaggacgtgttgacgtgtgaagtaagctccgttttacaataaggtttctccgttacagtctaaccgcagcgcgaaggaatgtcaattacagagtgctgaatcaaaggcccggaggctaattctgaataaagaaagacggcatggcataatcaatattccccctgcataagattgtaaaaacgtcctaagcagggggattttcttgaaggaatatattgaagagcgtgcagttgccatagccaactacatcatagactatcatgcaacggtaaggcagacggcgaaaaaatttggtatctccaaatctacggtacataaggatgtaacagaccgtttagagcacatcaatccttccctggcggcccgggccagagtgattctcgacatcaacaaatccgagcgtcatatccggggaggcctggctacgaaagaaaagtaccagcacaggctggccatgtgcagcaaagagtctgaccagtaagtgatcacgactgcatggaatacatgcgggatgggaccgctgtccggaccgtcacaggagtgcggtcacggacagcggtctctctttttagcccgaagctggtgagaagggcggtgtctgccagttccatctgcccgggtgagagctgtcctatgtattcttttaagcggcagcgatcgatggttcttacctgttcgagaaggatggtggaatcgcattttaaaccgctttcctctctggttaccggtacgtgggtagggagcttggctttggttgtcctgctggtaatggctgcgacgattacggtggggctgtgacggtttcctgtattgttctgtacgatcagtacgggacgcaggccgccctgttcagaaccgatcaccggtgataagtcagcgtagtataagtcaccgcgcagtacaggtttttctttatatttatctgataaatgattcattatggtctcctcctgttaaaacatctatgtcaatgattgtcacatacggttccggcatctggcagccggttgttcgtatcgttctgttaggagtatttccagagggccggaagataaaccggtttttcatgaaaatttagaaaatcacgataaaatacctttcacagacgatttttggaaattccgcatattccccggcatggacgaataagatagtaataatcaacataaacggggagagtgctatgaagagtttattgaacagaaaatggatgctgttcatgtgcctttgcatgtgggttctggttgtacggacactgagcgggtgcagcatgagcaaggatgacggaaacaaagtacgggacatggaattttccgtgacagcggaagcagatattccagaagagctaaagcagattatcgccgaaaagcagaagacaccgttcaagctgacatacagtgacgaccagaacttatacatagtggttggatacggcaaacaggataccggcggctacagcattgcggtgaatgagctgtatctgacagagaattccatcgttctggatacggatctgctggggccggaaaaaggcgaaagcgggggaacggaaccctcattccccttcattgtcatcagaacagagctttcggagcttccggtggtattccagtaaaccgtgcagaagaaaagaaaccgcgcgtgcctggtaagagagggcgtcaaacagtcaaaagactgttcggcgcctttttgctgtgatggatggcggcatcccgtgagctgatacgatcgtcagagcctctttaaaattgtggaaattgtccttttttcttttcacatcatatgatatactatggtatactgtttcactaggaattaaatggaaggtaattatagaaagaaaaggggacggatcgtatgatattaaaggatatatggcttgatgtgaaggctgttcaggaacgtgacccggcggcgaggaatgcccttgaggtacttcttctttatcagggcgttcatgcgctgatatggcaccggtttgcacactggttttataagcataagatgttttttgccgccaggctgatttcccagatcgcccggtttttcacactgatcgagatccatcccggggcacagctgggccacgggatcttaatagaccacggctgcggcgtcgtcatcggagagactacggtagtcggagacaactgtacgatataccagggggttactctgggaggcgtcggcttaaacaaggggaaacgccatcccactctgggaagcaacgtgaccgtaggggctggagccaagattttagggtccttcgaggtgggagacaactgtaccatcgcggccaacgccgtactcttaaagccgcttcaggataacgtgacagcggtgggggttccggcccgggcagtcaagatcgacggcgttccgattcccaaaaaagaaaagaatctcgtgaccatggatcactactgcaagatggaagagcggattcggcagatggaggagacaattgcgtcccttcaggaagaactggcggatgccaggagaaataagtaaccatgcagacaggagcagagcgaccagatgaaggaaccaaagacacgctgccagcagatagagcgcagcattattaagaattaccgcaaagaaatatggcgcccctttgtggacgcgctgaatgagtataagatgatcgaggagggagacaacatcgctgtctgcatctccggcggcaaggattccatgctgctggcaaaatgcatgcaggagattctccgccatggaaagatgaagttcgggcttcactttctggtgatggatccgggctaccatccggccaaccggaagttaatcgaggaaaatgcagccctgatggagatccccatcgagattttcgagtccgatatcttcgatgtggtggtagatgtggatgaatccccgtgttatctctgcgcgcgcatgcgccggggcttcctctacgcccatgcgaaggaattaggctgtaataagattgccctggggcatcatttcgatgatgtgatagagaccgtgctgatgagcatgctgtacggcggccaggtcaacaccatgatgccgaagcttcacagtacgaattttgaagggatggagcttttgagaccgctgtacttcgtaaaggagcgggccatcatcgactggaaggaggagaacggtctccaattcctgcagtgtgcctgcaggttcacggaggccatcgccaaagaacgcgccatgagagccgagagtgcagcggacgggatggcgggcggcgatatcgtccactcctcaaagcgccaggagatgaaggaactgatagaggaattccggaaaatcaatcccaacattgaaaataatatcttcaagagcgtatccaacgtcaatttagacgcctgtatcggatatgtaaaaaacgggaagcgtcatcatttcctggaagagtatgaatcagacggagatttagccgtcctgtgtcacactgaacaggaatgaagattaacgtaatattggaacatgcacctgcataaactttcttaaaggaatatagaaggtaaggcaggtgcttttttatgttggagctggtgaagaaaaacatacatatgaaccgttggaaaggaaatgcgacgtcacagataaccctcgacgatgattttatcgttccggataccatggatgatgtggatcaggtcattctcgattccggagaaatcgtcatcgaatccgtgaaaaaccagggagaacgggttctggtgcggggaaaaatggattttaacatcttatacaggaagtcagagggaggactgcaggctttgggcggatccatttcctttgaagagcccatcaacgtaccggggctggaggagaaggactatgtgcagctgagctgggatctggaagatttaaatgccggcatgatcaattccagaaagttaagcatcaaagctattgtgacactggaagtaaaggtggagactctctacgatgtagaggctgccgtagaattggacaccggtacggcgggcacagggacgccggcaaccatgggaggcggaagcgatttaaacgggacgccccaggtggaggtgctgcgccgcaatgtggatgtggcggccattgcggtacgccgcaaagatacataccggatcaaggagaatttacagttgtccggaaataagccgaatattgatcacattctgtggagtgagatgaagcttcgcggcataaccacccgcccgttagatgggaaaatggtgctggatggggaagtgatggtcttcgtcatttatcagggagaaggggaagacgcgccggttcagtggctggaagagagcattccgttttccggagagctggatttgtcagaggcctccgaggagatggtgccttcggtatcggttcatctgattcatcgggagattgaagcgaagcccgactatgacggggagatgcgggagctcgatgtggacgcagttctggaactggatatgaagctctaccgggaagagagtatggagctgttaagcgatctctattccacaaaccgggaactgtctctcgagacgggagaagcgtgcttcgataaggtgctcaccaagaacatgagcaaatgtaagattgccgaaaagctgaacatggatcatgcagaccgaatcctccagatctgtcacagcgagggtatggtaaagatcgacgagacagaggtaaaggacgacgggctccatgtggagggcgtgctggaggtaagcctgctctatttaaccgcagacgatacccagccgattcagtcgtcggtggaggtaatccccttccattatctaatcgaggcgccgggaatcaatgagaagaccatctgccagctggttccggggctggagcagatgagcgccgtgatgatgggcggcggctctgtggaggtgaaagccaccattgcactggatttactggctctccagccggtatgcgagcaggtgattaaaaatgtgtcggaagctccgatggatttaaaaaaactgcagcagatgccgggaattgtgggttacattgtccagccaggggattctctgtggaaaatagcaaaaaaattccacacgacggtggaaaccatcatgacgaccaatggactgactgacagcctgattaaaccgggagaccgtctgctgctggtgaaggaaatgtcgtagggggatgcgcatggggcggtatcaggcttatttggaggagcctgcgccgccctttttctttcccggattcttttcgcagaagggcgggaactttttctctttttcgtggtgctctctgcaggagccgcagtcaccgtggcggggacattttacccatttgcagggacaggctgagcctgtttcgtcagttttatgatccatggtatgaaaatggccgttttatcggaagcaggccaaaacgatgctgtatttccgggctacaggaataatatgcgcaggatgcgcggaggcattcaccggtatggaaattccgatattttgtgttcacacatttgcctctgatgttatataatatattatagctatgcagtaccccagacggcgccataacgcatccagctggtgcttgaaatagatcacaggggaacattcctgggcggtagtgacgtgattgcaagacgtgattaccgtttacataacatggatcaggccggcggctgccggacgatgtccagacggtgtgatgcggccggaagcagaaagaatggggaatttcagaaacaggagcaacggaagatgaattatacgtatttgctgaaatgcgcagacgatacgctgtactgcggctggacaaaccagctggacaagcgtttaaaggcgcataacgaagggaagggcgcaaaatataccagaggacgcagaccggtctctctggcgtattacgagatctttgagacgaaggaggaggccatgcagcgtgaggccgccatcaagaggctttccagaaaggacaagctggacctggtggcggctttcacgtccgatgcatcttatgctacaaactgatacatcataatataatggcagaggcttccgcccataacgaataagtggaatatttcatgagagccgaaattcctgtgtttcgagttgaagatcggcagcttcagcgcatagatgattccacccactgtgtagatgataccgccggccagcagccagccaaaagcggctcttggaagagcgctggtgatctttgtaaatgccaggacgcatatccagcccatggcgatatagaggacggaggagaaccacttgggacagtagatccagcaggccttgatgatgataccggcaatcgcgatcccccagaccagtgccagaagtccccagccggtcctgtctcccaggacgatcaggcagatcggagtatacgtacctgctattaatatgaaaatcatcatatggtcgatcttcttcaaaatcctgttcacatttggagaaatgtccagtgtgtggtaaatggtactggctgcataaagcagaatcatactgataatgaatatggacagcgcagcaagatggaggctgtcgtcggccgccgcttttaaaagaagcggtgtggcggcaaacagtgccatgagcatgccgataaaatgtgtgatagcgcttccggggtccttgattttgaatttcataatggtctcctccttgtcgaattataataattatgtgatgtagttatcaaaactacatgttctctttttatatactatacatcttgtggaggaaaaatgcaatggatttcccaaaaagttaaaaaaataaagtgcacgaaaaaaagattatactgaaataatttaaaaaacagtgtaagatacttatatactttatgcagggaggaaatgacaacatgaatcagacaatacaggaattatatgagagaaaatcggtgcgtgcctacgaggaacgtccaatcgaaccggagaagaaggagatggtgattcaggcggccattcaggcgcccagtgcggggaatatgacgctttattccattattgacgtgaccgatcagaagcttaaggagacgctggctgttacctgtgataatcagccttttattgcaaaagcccctatggtgctggtcttctgcgccgattaccagaaatggtatgatctgtttttacagcgcgaggaggaagtcagaaagccgggcatgggagactttatgctggcatcctgcgacgcgctgattgccgcccagaacgcggtgacagcggcacaggccctgggaattggttcctgttatatcggtgatattatggagcggtatgagacacacagggaccttcttcatctgccgaagtatgtggtgccgactgccatggtagtcttcggctatcctacgaagcagcaggaggaacgggaaaagccggttcggctgccggcgcaggcggttgtatctgagaatacataccgcagacaggaggcgtcagagtatgcggagtatctttctgaccgtcagggaaagacggaagaagaatttgaccgctggctgcatgcattctgcaaacgaaaatggaattccgatttcagcgcagagatgagccggtccgtggaagtcatgatgaggcagtgggcagaatagtggagtggaagatgaatatactgtatgaggatgaccagataatcgttgtggagaaaccggcgggaatagagtctcagtccagccggaccttcgaaccggacatggtcagcgaagtaaagaaacatatcaacagtttgtccccaaaaaagggggatccatatgtgggagttatccacaggctggataaaccggttggtggaatacttgtttttggaaaaacaaaagaggccgcgggggctttaagtaagcagatttctgagcatcagacggagaaaaggtatctggctgttgtttgtggaaaacctgtggaaaactttgggacgtacgtggattatttgtggaaagacgggaaaaataatatttcaaaaattgtggataaggggataaccgatgcaaagagggcggaattaagctaccgggtgctggcggaactggaaggagagggcggcccgctctgccttatggaaattgatttaaagacagggcgccatcatcagatccgcgttcagctctcgggtcatgggaccccgcttttaggcgatttgaagtacaatccagacggcccgaaggtgaccggccagagaaatgtggctctctgcgcctggaagctctcttttacccatccggggaacaaaaagaggatgaagtttacggtaaagcctcagggagcggcgttttatcagtttgactttgattatttagcagacacgcatacataactatacctcattctggtaaaaatagaaaagactgaggaggtgtctattctattatgaaacagaatgaagggaaaaaagaaagaaaatcactgatcttccgttttcttaataccgtagagcaagtgggcaaccggctgcctcatccaattaccatgtttgcagcgcttgccctttttatcgttcttttatcgggaatcctggctgcggcagggatatcggcagaaggcgaagtgatagacagtaagaccatggaggtgacgacgcagaccgtatcggcagtcagtttgctggaccgtgacggcctggtctatatgctgactcacatggtcagcaattttaccgagtttgccccgctgggagtggttctggttaccatgctgggcgtaggctgcgcggaggggagcggatacttgtctgcactgctgaaaaagactgtgtcggtgacgcccgcaaagctggtaacaccgatgctggtatttctgggagtcatgtctaatgtggcctcggatgtcgggtatgtggtgctgattccgctgggggcaatggtatttctggcctgcggccgccatccgattgccggaattgcggccgcctttgcgggggtgtcaggaggcttctccgccaatttactgatcggtacgctggatcccatgctggccggaatcagcacggaggcggcccagctggtctctcccggttacatcgtggaaccgtcggcaaactggtattttatgatcgtgtctacctttctgatcgtggcactgggaagctgggtgacagaccggatcgtggaaccgcgtctgactgggggaatcaaagcgaagcccggagaaggaggccaggccagcgcggccggcgaaccggatgaccgggcgtcggtctctctgacagaccgggagagaaaggcgctctgcctggccaatacaagttttctgctgctggccgcggcgattacccttctggcatggccgcaggattcttttttcagaaatccggagacgaaaagcctgatatcatcgtctccatttatgacaggcttaattgtgctgattgccctgctgttttttgtgccctccgtggtttacggacgtgtttccggtgcgtacaaaggcgagaaagatgtctgtgcccagcttggaagcaacatggaggccatgggaggctatattgcgctgtcatttgcggcggctcagtttatcagttactttaattatacgaagctggggacgatcctggcgttaaagggggccgccgttctgggccggattggaacgggaggaccggttttaatggtgctgtttattctgcttgcatcgcttattaacctgtttatggggtcggcctctgccaagtggacgatcctggctcccgtttttgtccccatgttcatgctgctgggctattcgccggaactggtgcaggtggcgtaccgtatcggggattcgtgtaccaacctcattacaccgctgatggcctattttgccatggttgtggtgtttgcaaagaaatacgatgacaattccgggatcggaacgctggtatccaccatgcttccatactgtatctgcttcctgatcgggtggtcgctgctgcttatcctgtggatggcggccgggcttcctctggggccgggggcgggattgatgatatcatgagaaggggaggccggatactggcacaactaaaccagtatccggttctttttttggcatgttgatcctctttgtgcatctgcacaatcgccaatggagaattcaaataaatgcataaagaatgcgctggtaaattgacaatgaaattggtttgttctaaaatgacaacgtaggacaaaataaagacggagagagggtggatgagattcaaaaagcgaatatgatgcagattgccgagcactgcggtgtgtctttaaagacagtttccagagtattaaatcatccggagcaggtgagtccgaagacgagggaagcggtccggagatcaatggagcagtgcggtttccaggtaaaccttctggccaaaggtttaaaacagaacaggaccaacatcatcatagtctttctggataagcacaacggcgattatatgaacttatggagaagccggatgcttaagtatctgttccgttattccagcggaatcggtttaaagattatcgtgtctccatccgacagccatggttttctggaagatgagacggacggattttacctgctttctagcggaatcgccgatggggccattttgctggaatacatggctgaagatcagcgagtcgggtatttgaaacgaaccggaactccgtatgtggttctcggacagccggaggaacaggatatcccggcggtcagcctcgacaactttgatgtgggattaaagggaggcaggtatttaaaagaaaagggttttaagaagatttgttacttgacgaatgatgtggggttctattcgacgaagctgcgtgtcggcggttttttagaggcagttccggaaggccgcgtgatatatggagtgagagacgcgaagaccgcgtatgagagaaccagagagctgctgcaggcaggggaggcagactgcattttcacaaacggagacgacaggttccttggaatctacagagctgcggctgagtgtggatacaggattcctcaggatttgggagtgctgtcggcagacgacctggctgtcaacgaggaagcgtatccgtccctgtcgtctctggggcaggactttgaaggtctggcggagaactgtattgccgtactccagtctcttctccaaaaaagacagagtcatgagtccgtggcccataatcagatttttctgccgtccacgatcattgaacgggaatcgacaggaatcaccggtacagaggaaaaaacagataaaaccataaaagaatagaagaaaagtttggaggaagcaccatgaagaagcttgtagctacggcaccaagaacagccgaattaaaagagtatgaggacagaccgattcagagcagcgaagtgagagtgaaagtggagttcgctgcaccgaagcatggaacagagcttgccgatttcagaggaacgacgccttttatcgacggaaaattcgataatgactggaaggtgtttgtggagagagacgcggacgaaccacgcggcatagaatttggcgatcttcccatcggcaatatgtttgttggaacgattattgaagcgggagccgatgttacggaatatgcagtaggggacagagtttgttcctacgggccaatcagggaaacagagatcgtaaatgccgtggacaattataagctgagaaagatgagtaaggaagcttctgcaaagaatgctgtatgctacgatccggctcagtttgcattaggcggaattcgggatgccaatgtccgctccggagacaacgtggtggtaatcggactgggggcaatcggacagctggcggttcagatggcaaagaaatcaggcgcctccatagttatcgcagtcgaccccattgaaaagaggagagagattgccggaaagtatggcgcagattattgcctggacccgacagcctgtgatgtgggatatgagatcaaacgaattaccggtaagatgggagcggatgcgattctggagaccagcggcagtgtacaggctttgcagtccgcgttaaaggggctggcatatggaggaacgatcgcctatctggcatttgcaaagccgtttccggcgggactctggctgggacaggaagcacattataattacggaaagatcgtcttctcgagagcgtgcagtgaaccgaatccggattatccgagatggaaccgtaagagaatcgaagacgtggtttgggatatgctgatgagcggatatttagactgctccgagatcatcgatccggttgtgaaatttgaggattcggcagagggaatctgtacctatatggataaggaacaggaaaagagcattaagatgggggttatatttggaggtgaagaatgatgctgcttggtacacaggacagggatttttttccgcaggatttaacagagaaatttaaatttgtaaaatcaatcggtttcgaatgttttgagatcgatggaaaggttctgatggaaaaaccggatgagattaagcgtgccatccgggagtcaggacttccggtctccagcgcctgcggcggatatcgtggatggattggtgattttattgaagagaagaggttaaacggaatcgctgatttaaaggtaattatcaggaacttaaaggaagtgggcggaaccggggtggtggttcctgcggcctgggggatgtttacctaccgtcttccgccgatggtatcaccgagaagccgcgaaggggacagaaaagcgattctggattccttaagccagcttgaagagacagctaaagagtgcgggatctatatctacttagaacccctgaaccgatatcaggaccatatgctcaatacgacagcagacgcggtttccattatcgacgaaggaaaatttgagatggtgaagattacgggagacttctatcatatgtctattgaggaagatgatatttccgagacactggagaagtatcgggattacataggccatatccacatcgcggagaatcacagataccagccgggcacgggaagtattgatttcaaacgccatatggagacgttaaagcggatcggttatgacggcgccgttgtcaatgaaggaagaatccgcggggaagaccctctgacggtttacgtggattccattgcctatatgaaacagtttatgtaagacagtttgcatgaaaacaggagaaggccatgagcatactcagggtagcagttatcggggccgggcaggtagcccggacctcccatatcaatcattataagagtctcccggacgtggagatatgtgcggtctgcgatgtaaatcagaacgcggcaaaaatggcggctgatgaattccatataccatcctggtatacagatgcggagaccatgctgaaggaaatacggccggatgcggtcagtatctgtgtgccgaacaagtttcattgcgatatgacgtgcctgtgcctggaatacggctgtcacgttctgtgtgagaagccgcctgcggttactttaaaagaagccgaaagaatgcgggatactgcaaggcggtgcagcagaattttaacgttcggattccatttccgtcatgcggaaacgattgccttcctgaagaagaaggtggaagccggtgagatgggtactctgtacgccggggacgtgacatggctcagaagacggggaattcccggctggggcagttttacgaatctggagatacagggtggcggaccgctgatcgatatcggtgcccatatgctggatctggccgtttatctgctggattatccggaagtatcgtacgtctgtgcctcttcctcggaccggattggaaaacagggcggaacgggattcctgggaagctgggatggagccagattcggagtggaagacagcttattcggatttattcatttttccaacggcggttccttaacggtaagaacttcctttacgatcaatattgcggagaaggaagagagaaatgttcgtctgtacggtgataaacggggaatcagcgtgttccctttcgaaatttacggtgacgaggacggacatcaggtcaattcggtctatccctttgaagagacgaaagactggcactacgactgtatacgtaactttgtggagagctgcatgggccgggcagatatacttgtcacgccggatcaggccgtctatgtgcagaagctgattaccggtttatatcaatccgccggaacaggcagaccggttatatatgggaacgggaatctatgatttattacggaacagaggagaaggaaaaggaaaaggggtttcgcttttacgaaccggagaggaatcccgattacaacaaaaagacagaggccgttttcgcacaatgcaatggttttctgggcgttcgggcgtctttcgagacgaagcagctggatgagtcgagggggaccttcatctgtggtctgtaccataaggcaggtattcacgaggtgacggaactggtcaactgcccggatgtcaccgaattcagaataagaattaatggggagaatctgcggttggattcatgctgtctgacggagtacgagcggtctctgtatacaaggtacggagaactggagagccggatcggttgtgagatgaagtctgccggaggcgtacatcttacagcaagacggtttgcctccgcggacaacaggcggctgttttgtcatcagctggaaatatcctgtgaggaaggcggagttcttgaactttccaccggaatcaacggacagattacaaacagcggagtggctcattttgaccgcatggaagcgagggtgtttgaacattgccggatgttccttgaatgcggctgcgatgacgggcagatactatccgttatgaccgtctgcagcacgggggagagccgggaatctgcggcatttcatctggagcgaagagcggtttatcaggattttaaaaaggaactgcagcctggagaagtgtggacaatcagtaaatatacgctgtttgatgtggaaaacaggaaagaatcttccgggaagacggacgggcaggttctggtggagatgactgatgtactggctgaagcgttgaaggccggctatggtgaattgaaccgccggcacagagatgcattcgaacgtttctgggatatggcggccattgagattaccggggctgcaaaagaagaacgggcagccgttgaatttgcagagtatcatctggccggcatggttccatgggagggagattcctgcagcatagcagccaagggactgactggagagggctataagggtcatgttttctgggatacagagatcttcatcatgcctttttttatacagatgttcccggagacggcacgcaatctgctgctttaccggtaccgtggtctggcaggagcacgaaaaaaggcggaagagtacggttattccggagccatgtatccctgggaggcagcggcatccggtgaggaggagactcccctgtacgcggcaatcgacattcatacaggaaaggctgcgaaggtatggtccggaatcaaagaacatcatgtgactgctgatatcatctatggtctgatctcctattaccgggccaccggcgaccggaatttcatggatcagtacggctgccggatgatactggagactgctgtattctggtacagcagagccgtgtggaacggggataaaagacgctttgagatcagggatgtgatcggcccggatgaatatacagagcatgtggacaacaacgcgtataccaattatatggcctttgaaaacgtaaaagcggcaggacaggtgctggcctcctgggacaatcccctggcagattcctgtcggaaagagggatggagtgagcgttttgaccattttctgcggcatctctatctgccggaaccgaatgaggagaaacttattccgcaggatgatacctttctcagtaaaaagaagctttccaatattgagaaatacaggaacgcggatgtacgccagctgatcttaaaagattacagcaggaaccaggtggtggacatgcaggtattaaaacaggcggatgtagttatgttgttagaacttctgccggaacggtttgacgctgaaacggttaagaaaaacgtggagtattatgaggcgctgaacacccatgattcttcactgagtctctgtgctcacgcagaggcggaggcagtgatcggggaaatggataaggcagtgggatttttccatcaggcgatggagatcgatctgggcatgagttataaggattccgcagaaggcatacacgctgcatcactgggtggaatcgtcaactgcatcctgcgggggtttgcagggataaaaacagatggaaacatgttccggttcactcctcatctgccggatcactggcagtccatacgtttttcatttatggatcacggaagaaaaaaaacggcggtggtgaccagtgagggagcggccgtgacggcggaggaagatgatgatacaggcgtttatatttgatctggatggcgtggtggtggatacggcgaaataccattatcaggcatggaaggaactggccggagagctgggcttcgatttcccggaggcggaaggtgaacggctgaaaggtgtgagccggatggattccctggagattgtactggagtcgggaaggataaccggactgacggcagaggaaaagaaaaggcttgcggaccggaaaaataagagttatctcacttatatcaaccgcctggatgagagggagatccttccgggtatccttaaattcctgaaaaaaatcagggcggaggggtataagactgcgctgggatcggcgagcaaaagcggaggcatgatccttcagaaactgggaatcgcagatctgtttgatgtcatcgtggatggcctctcaattgtgaaggcgaagcctgatccggaggtgtttttagcggcggctgcaaagcttggtgcggatccgggaaactgtattgtgatagaagatgcgcaggcaggcgtactggcggccaaaaacggcggtatgcactgtattggaattggcagcgaagaaattcttaagggtgcggacgtagttctggaacatacaggactcctcccaaacgtgaattaccgggcactcttttgatgtcctggaaagcggggatcacatgtacgaaaattatctgaatacagagaatgctcagaagattgcagatggaattatgaaaatcattccctgtaacatcaacattactgatacggccggagagatccttgcgagcggagataaaagcactctcggaactcttcacaaaggggcgctgaccgcgctgaagcggaaggaagcctatgtaatatatgagaacactccaacggagcagagaggaatctgccttccaatcatctacaataacagtattctgggggtgatcgccataggcggggacgttgaggaagtgatgccaatcggccagatctgcttatccatagcggttcttaccattgaaaaccgcctgctgagcgatatgtcctccattaaggaaagccggctgaaggatttcctgtatgaatggatcagtctaagcagagaacagtacgatgacgcgttttacgatcaggcagcgtacttaggcattgatatgaaaattccaaggacggctgtcgtcataaccagcagcaggatccgctacagtattatagaaaccataaagagccatctggcagcaggagagtatatcgtgcgtcagggtatggaggaggttcttattctgttccggtcagataaacggctgaaatcacgtctggaaaaaatactggatatcagcaaagacctggagaactgttacattggcgaatcagacataattgccagcaggacgacgaattccgttatgcagacgtttcacattgccagagcgttaaatatacgcagacggattctgtgctaccatgaggtttccctggaatgccttctgaataatgtagaagtgaccagggagctggaggagattttaaagcttttaaaggagcgggacgtggacggcgtcttaaaagagacgatagccgcttacgtggaagataacgacaactatgcccagatctgcgacaagctgcatattcaccgcaatacgttaaactatcgccttgcaaagatcgaggaactgctgaaccggaacccaaggcgggcgaaagacttgatgatgctctatatcgccgtaattaaaatgggtggaaataaagaaaaacggtagttgtgcaaatgcacaaaagcgaggttcgggtttgggcgctgccacattgtagtgtgaatattggaatgttataatgttatcatcaacaaatggtaaaggagagggaataatgaaaaaaaacttaacgaaaaaattagcggcacttggactggcggtaattacgacggcgagtatggcgggatgctcatcaaaaccggcagagacaaaggctcccgagacgacaacggctgctgcagccggagcggagagtacggaggcaccggccacggaagctgcaaagaaagaggccggcggttctgacgttttaaaggttacatacagcggaactccggaaattcatgagaagcagtatttaatggacaccttctttaaaaacttcgaggaggaaaataactgcaccgttgaggtggatttcgtggcccaggcagatgcggttaagaagatccagtcggaacaggaagggaagaattacataaccgatattatttatgcagacacggcaaacatggcgccatatgtgaacggcggctggatgcaggatattacggaactggttaacagcacaggctccacttacactcagatgtttgacaacacaacaaataaagacggcgtacgctacttcgttccattcacttttgatgtatatgtgacctgcgcaaataagaaggctctggattaccttccggacggccttacagaagaggatgtagtctctggtattacatgggaacagtacgctgactgggcggttgcaattgcggccggtgagggggaaggaaagaccatgatgcctgccaacttaacaagctcccagctgttatacccgatgggaggaatgagcctggcttacggcggcggattcccggaatttacatctgatggttttaaagacgcgcttggcattatcgcacagatcgcggcaggcgatggattctacgcagagcaggatcagtacactgcaccgacagatccgttaaacagcggcgatgtatggctgacatttgcacatatggctcctgtgggtacaagctacaacgcagctcccaacaactttgtaatcggcgcagcgcctaaaggcagcaagggggcgggctccacgtccggcgcatggtgctacggtattgcccagggcgctccaaatcaggaactggcggagaaatttatcaactacattgcagatccggaagtaaactatgaattttgctccaactatggcggatccttaagcccgatcgaagaggttggcgacattctggagtccagcgacgtagttatgagagccggtattgagatgctgaagaccacgatcgttaccggtgttccggcatcagagtattccgactggaacgcagtaaaactgctttacggtgatatttttaacgacgtattaaagaataaagcagttcctggagatgattaccttgcagaagagcagagtaagctggaagcattgaagaattaattaattgtgcaaaagcctggaaagctgcggtgtgggtatgatcttcaccgggtattttccaggctttttctgtgacaggggagtgcgcctgtccggtgcgcgagcctggctctccagctctttatggtccaatagtaaagtacagacaggttcgcctgcctgaaggaatgggggatttatttgaacgagaacgattcaaaacagacgataaagaaaacgatattcagtaaaaaaagcattccctatctgcttttgctcccggcattcctcttttatgcagtattctggctgcttccggtgctttcgggggtaaaagaggtttttactgattttgacggcaatttcacacttctgggcaattttaaactgatggcccagtccgatttaatcggcccggcaatttttaatactgcaacctttgcggcagtctccgtgatgcttcaatattttctggcgcttctcttagccgtactcctttcaagaaagtttaaaagctccaagcttttgatgtttatttccatgattcccatggccatcaccccgaccgcagtggcgattctctggaaaacgggactggtcagagatggctggatcaacaccgttttgatcggattacacctgattgacaaacctattgtctttatgggggcggagggaatgtccgcagtcttcctgatcatcctgatcgacacctggaccgtaaccccttccgtcatgattattttaattgcaggacttcagggggtacagagagagttaaaagaggcggcttacttattcggagctaataaatggcagacctttaaggatattgtgattccaatcttaaagccgtctattaccacgtcaattattatgagactgattgctgccatacaggtatggtcgattgcggttatggtattgggatacagtaaggttccgttcctggtagagcgaatcgcgttctacgtggaagccgttcccggcgtcaacacgagccagaagcttgcctttaccctgtccttcctcacgaccctgatcgtattgtgtgcgacagtggtatacttaaaggcttcgaaaggcgcaggagccggttcccatgaaacaggcaggaaacgcccggctaaagtgaaggaggcagcaaaatgatggacaaactgaatatcgtacagaaaactgttatggccctgatcctggcgaccatggtcctccttgtggcagttccgcttctcgcatttacaacggttgcattttccaactccgtggaaatgacagaattccccaagaggctgattcccaagcgcacggttaccgtcagggtggctcccactccggagggggaattcgagattttctatgacagcggcgagggctatgaatccattatcacgacgaagagagcctccaaactggaagcgcactttaccagacagtatgcagtaacggtgcctggtgaggagctggcagaggattttaagcagactcttacgaacggccccatggaatttacctataagaaagacctgttctataattttaagacgttcttcagtatcgtgcccaacgcggctgcggcgctgaaaaacagtatcatcgtttcgctctatacgatactgatttctctgggaatcggcagtcttgccgggttcgccatggccaggttccagtttaagtttaaggaacagattcacgtatcacttttaatcgtccgaatgttccctgtggtgggaatcagtattcctatggcgatgcttttgattcagtttggcctgtttgatacgaggatcggcctggctcttctctattccgttcctaatatcgcgctgacggcatggattaccaacagtatctttatcggaatcaacaaagaactggaagaagcctccatgatatttggagcgaacagtgtacagacctttgcgaagattactcttccgctggcctttccggctttggcggcaagctcgatgtattcatttttaacagcctggaatgataccatttcagccctgattctgaccaataaaaaccagacactgtccctggttgtctataaggcgatcggaacaacctcaagcggaatccaatatgcggcggcgggaagtattgtacttatccttccggcactggtgttcacattcattatcagaaaatatatcggtcagatgtggggtggagtagaattatagtaacgataggaggaagcttatgagctatttggaaatcaagaatttgcagaaaaaatatacgaaagatggtccgctggttgttaataatatgaatttatccattgagaagggggaattcattgtatttctggggccatccggctgcggtaagacgaccaccatccgaatgatatcaggacttgaagacatcagcggtggtgagatcttaatcgacggggaagatgtaatcggaaagaagccgaaggaccgcggtgtatccatgatattccagagttacgccatctggcctcacatgacggtgttcgataatatcgcctatccgttaaaactccagaaggtgccgaaggctgagatcaaaaagcgtgtgacggcggctgcggaagctaccgatatagttggacttttaaaccgttatccggcacagatgtctggaggccagagacagagggttgccgtatccagggcaatcgttgtaaaaccgaagattttcctgatggatgaaccgctgtccaatctggatgccaagctccgcgtatcgatgagaaccgagcttaagaatattcatatccagcagaattctaccagcatttttgttacccatgaccagtctgaggctatgagccttgcagacagaatcgtagtcatgtataagggcaagatcgaacagatcggtacgcccatggaggtgtatcaggacagtgcgaccagatttgtcgcggagtttatcggcacaccgccgaccaatttctttgtcacaaagattgaaaaaacggccgatggtctgatggctgtaaatgacagtattcattatcaggtcccggattccttaagggatgcgcttttgccgtatgcaggcaaagaggtggatttgggtgtgagaccggaatatatcgatctgtccttttccatggaacggacaaaaggttatttatgtgacaccgtaattgattttgtagaacctcagggatctcatgcaatcctgattaccaggataggcggaaatgaagtaaagattcataccactgcctacatggaaatggcaccgaagaccaatgtggcattaaacgttaaggatgacaaggttatgttttttgaccgcagcacgtctttccgtattaagtaagaaacagataagtgaggaaaccgtaaagcggtggaaagaggattcaatatggataagattctgatcgcagcgtcaacccattgggaccgtgaatggtaccgtacctttcaggagtttcagatccggctctgtggcctgatgaaccggctcatcacacttctggagcaggacgaagagtttctgtgctatacctttgacgggcagtcagcagtcctggaagactatctggaaatctaccctgaaaacagaggaaggatcgaaaagctggcggcagaggggcgcctcgtatttgggcctctctataatcttccggatgagttcttatccggcggggaggcgctgatccgcaattttctgcttggagacgaggcctgccagtccgtaggaggaaagttaaacgcggggtatgtgccggacaatttcggccatatctcccagcttccgcagatattaaacggcgtggggatcgataccgcctttttctttcgggggatggacaggacggaatataaggagaaggaattctactgggaatccccggacggatcccgtgtcctgtgcgagtatatgattctgggatactggagcctgaagagctggggaaaaatgggaaagagtactgcagaacacttttacgatgcataccggctgttaaaagaatccagctgtttaaatacctttctgctgatcaacggttccgaccatctctatcaggatcccgattttactgctatggtgagagaagtaaaagaggcatatccggagctggacataaagaatggctcgattgccgattatgcggagatggcgaaagcggctgccagtcagtctgattgtttaaggacggttgaaggagaaatgagggatttccggtacgggccggaccctacggcggtcacttcctgccggggccggataaaacgtctcctctcagcagtacagtcggaggtggaacggtatgcggagcccctggctgttctggcttccaggacaggaggtggatttgactatcccggggggctgttcggaaaaatatggagaaatattaccatttctctgggacacgacgcagtctccggttgttcaaccgatgaggtgatggaggatatcaggtcctacttaacccatgccctccagtcagcctcaaggatcagcgagatggcaatggaggagctggccggacgggaagagtatggccggaagtatggggaggagtcgtatctggctgtcttcaatccccacccgtttgcctgttcaggcatgaccgaacagacgatacgtttggagaaggcgggggcgtggaaggatttcgtgctttacggggagaacgatgaggaaattccatatgaaatcctggaatggtcggatgaggtgattacccgtgaatacctctataacagcaaggagaaggtgccggagacgtgtgtaaagattctttttccggtaaacgatgttcctgcactctccatccggcatttccggattcagaaaagccgcctgctggagaaaaggagccaggaattctatgttcggagccagccttccagggcagaaattgaaaaccagcgcttttccattacagttaatgaggatgccagtatcaatgttctggataaaaaaagcggacggatctaccggggactgaacagctttgtggacagaggcgaggcgggggatgagtatcagcacgtgtctccgcttctggacgagcatgtgatggcaagacttacaggcgtatcagtcatacataacagcccgttgtcgcagaagcttaagataacagcggagctgaatataccggaccgggcagaacgcggatttttgaagcgttccggtgcttatcgggtgtgccggattgtaacagtcgtctgcctgaccaggggaacagaccgggtggaatttacggtacagatcgataatccctgttcggatcatatcctgtttgcgagattcccgactgcattgcattccccggtggaatattcaaattcaggttttgatgagactgagcgggactgtgagaggaaggcttttgcaccggagcttaaatcgacccagtctctgctgaaaccgatgcgcgggtatgcggggattaagggagcggatggaagctttcatgtgatgggaaaagggctttatgagtaccacacgaagaaaagcgggcagggaacagacttttatcttaccctgttaaggagtacaagttacttgttccatggccttccgacctcctggctggatggccaggagagcaccaccccgatggtggagacaaagggggctgcagagtcaggggaaagcactgtggaatatgcgattctgtttgatgaacagaatccggccagggaggcggagaagtacctgtatcccctttatggagtcaatgtgacgtgtctgccggataacagagaagcctgtgaatccttcctgagttttgacaatgagaatattctgctcagtgccctcaaaaaacaccggtcaaaagaagggacggtactgcggttctacaacagaaacagcagtgaggaaaaaatggtgatccgtaccggccggcagattcgcgaatgccgggcgtgcagccttttggaagaactggaaggggagatggagcacacgacggacaccataacctgcactgtaccgggaaaaaaaatcataacactatatattgcatggagatagaatatggacagcataaaagaacacttacaacatttatacccggactgctgggaggaactggaacagcggatcggagcactgacagaatcgtggaagcttaaaatgggaaacacctccggagaggcgctttatccatgggtaagtaaagacgatgtcatgctgatcacgtatggtgatggaatcggaagagagggggaagcgccccttgcaacactccggtcattccttaacgaggaactttccggtacggtgagcgcggtccatttactccccatgtttccttatacgtcggatgacggattttctgtgacggattttaaagcaattaatccggaactgggagattgggaagatatcgagaacctgcggagagaatacgatctgatgtttgacgcggtaatcaatcacgtctctaaatcaagcgggtactttaaggaatatgcggcgggaaatccgcactaccggggattttttatcgaggcagatcccgaaggggactacagcagggtaatccggccccgaacgctccctctgcttacaaagtttgagacttccatgggaacgaagtatctttggaccaccttcagtgaggatcagatcgatttaaactacagggatccggaggtcttaatggagatactcgatgttcttctgctctatgcggcaaggggcgcacggtttatccggtttgacgctatcggttttgcctggaaggagccggggacgacctgcatgcatcttccccagacacatgagctgatcaagctgatgcgatgtgttttggagtcctgcgccaaaggctgcacaatcataaccgaaaccaatgtgcctcataaagaaaacatcagctattttggcagcggttacgatgaggccgggctggtttatcagtttccgcttcctccgctgaccctgtactcatatttaagcggaagcgccgcacatttatccgactgggcggatggactggaagcaaccacggaggcgaccacttactttaattttctggcttcccacgatgggatcggccttcgcccggtggaggatatcttaagcgagggggaacggcgccttatggtggctgaggtaatggagcgaggcggtcaggttggataccgttccctggccgacggcagtatggttccgtatgaactgaatatcaattacctggacgccatagccggaaacgagaaggacatgggaaggatggtacggaaattcctgggttcccagtgtattttgctttctgttatgggaatgccggcaatttattaccacagccttctgggatccagaaactgttaccgggatttcgaggaatcgggaatcaaaagaagaatcaacagggagaagcttaacgcagatcagcttaagacagaactctctgatccgaattccttaaggagccgggtgctggccggatacagacagatgttgaaaatacggaagcaggaggaggcgttttctcccaacagcccgcagcaggtgctgaagctggacgagcgggtttttgcactcataaggggaacgcaggaaaatcagattctggtacttatcaacgtatcggatgatgtggtaaaattagagacaggaatggcgggaagcggtctgctttccgaaaaacagatgaatcaggcggttacgctggagccatatgaatatctgtggctgaaaataaaaggctgaccgtcacaggaaagaggagaagcagggtatggacagagattacagctttttggattccctcgacaggggaatgtattttgataagaaagagtacgacggagtgccgcctttaagctatgaagaggtaaaggacaatctgccggttcccatcgtatccagccatccggaatgggtagaatgctacaggtatgcggttcaggttttatataccaatattcaccgcccggcagagggaagcggatttgtaagcaattttgtggatgccgcgtttaacgatgatattttcctttgggatacagtatttatgacgttgttttgtaatcttcttcatccttacgttccgggaatctgttccctggacaatttttactgcaagcagtttgacgatggggagataccgagagagatggtgagggagacaggaaaagattttctcctgtgggtgaatgcgtttgacagtcccctgtactcctattttcagaatcactatggctttcgcactctaagagaactgggaaagctgccgtatgaagacatgtacaagccgaatatgggacggattattgagaagaaaccgtacctcaccctggacaacttaaatcatccccttctcgcttttgcagagtgggagagctactgccatacgagagatgcggcgcgccttcacatggtactggaaccgctgtaccactatcacgaggccatgaaataccatctgcgtcatcaaaacggattatacatcacagactgggcaagtatggataattccccgagaaacaagcatctgggactggcggtggataccagctgtgagatggccatgtttgcaggcaatttgatagacattatggatgttctggtaaagcgtggatacgaggtgacggattacgaaaaaaggcgtgagggtcttgagaaggaccgttcggttttgatagagaagatcaatcattatatgtggaacgaacaggacgggttttattacgatatgacatttggcgagcgtcagaccagaatcaagacgatcgcaggcttctttccgctggtgtccggtgtagcggacgaaaagcagggaaagcgtcttatcgaatggctggaggataaggagaccttcaaccgtgttcacaggattccggttgtggccgcggacgaagaggggtatgatcccagaggaggatactggagaggttccgtctgggcgccgaccaatgctctcgtaacctgtggactggagaagcacggcttccataagctggccagggacatcgccatcaaccatctggatgtgattgccaaagtctatgagcagacgggaaccatctgggagaactatccgccggatgagatctccagcggagatgccgataataaagatttcgtgggctggtccggccttgccccgattctctatctgatccagtacgccgcaggcctgtctctcgacaggaaagaagcggagccgacagtcagatgggagatatccgagcatctggttcggggaggcgttttgggatgcagacgttactggtttgcaggaaagaccgctgattttgtggcaaaagacgcaggcggatctctggaagtgagcattcatacagaggactgcttcaaactcaatctgatctatcagggagcacagcactcgattatggtgcagggtgacatgaagctgacattttaaatcctgcgaggtgtgatgttttatgaagacaatagcgatttacggcgacagtatttctacgggaacacacggggagggcggttatgagaatacattaaaaaacagcctctccctggataaagtctataattttgcggtgggctccagcggcctgacacggaagacacccggcggcatgttggaagtgctcgataaaaatccggttccggaagatgcagaactgttcctgatctggcatggaagcaatgactggtattggggaagtgaattggaagcgttttctgaagccatagaggcggcggtagacagactgcgtgccgcggtccccaccgcctgcctggtatgggtaactccgatctaccggttcgaatgcccggacggcatggcacaggcaggggaggcttacgaactgcccaataaaagcggatacaccatgctggattattatgtggaactggaacgcgccagcaagcggctaggatttcctctcatagatatgcggaggctgtgcggaattcaccgcgataatgctgagttatatctggaagaccgggttcatcccaaccgggcgggctaccagaggatcagcgcggtccttgccagggagattcagagattttgtattttttaaacaggatctgtttgacagaccatattcccagtggtacactgaggaagtaaaacaaagaaacccaaataagcatttcgtttccggcgataaacgctttttatgaggataccagcgatgaacagaccagctcatgtatttacttatggatattgcagctgtttcttcagtgcagatacctgctgcagtgaagttttttgcgtacaatataagaggaaatccatgcagtcgggaaaagaattatcgtgagattcgttttgatattttaaatttaaatgccaagatatcgaaggaaccgttgcccggcggttccttttttgattgtaaaaaagtttgcagggaaacagatgaaaaaatatgtagaattttagaaaccagtgcaaatttgcattgttcgctatgataaagtatgaccatagacaacagaaagaaagtctgaaacgtaacatttgaggatgcgtaagcccagcggcgagggcaggagactgtaaatctctcacatcggaaacagcgcaggttcgagtcctgccgcatccatttccgccggagaagcgaggaacagcagactggctgaaacgtgccggaaagttgagatttggaaaagtgatcgagaggattaagatgatactttgctaaagtattgtgctgtcaggcaccgggggttcgaatccctccttttccgtttgatcttttatatgttttacatttaataataattttatgataagtaagaagaaaggaaaatcgaaatggaaaccgtcgtactatgtaagcgatattgcagcagtcagcctgtcagttattacaacaacaggcttttttgcgttgcagcagacaatcgcttaaagagtgtgcggcgaatatcaaattccacggcagggaccgcatgatctttaagcctcaacaggaggagtggtatcatgcatcaggttttatttccgctggtgatcgtaactatattaaaacaacatggatcgaaggagcagccgctgacaatctcgcagattgcggacatgatcaacagacagtacgcgccgtttgcggatggggaaaaggtcatgaaccgttctacggtggccagaacgctggaatcgctggtgctgtacacggaagtcggcgatctgctggatttctgtgtgatcgagggcggttcagccaataagaaaaaatactacatcgaacatcacaaaattggataaattttgtcaggagcagattcgcataatttactctgcctcggctcatactagactttgtacaaaagaagtacaaaacaaaaaacaggtgagtccatggagaaaccgagtaggaaactgaagaaaactattttaatactgggagttacgggggcagtttatgcaagctttaagtatctgctgcccctggtgattccctttttgattgcatatatatttgccctggcacttcgcccttccgccgtatggctggaaaagaaatgccggctgccgttcaaaaagaaagaaattcatctgccgttagctgccatcgggggcatccagatcctgattctgatggttttgtttgggacgcttctgtattatggaggcagaaagctgtttatggaggcaaatttattctttgacaatcttccgcagatgattaacagcctcgatcactggctgaccggctgctgcttttttactgagaatctgctccgccttcccagaggctttctcgtgaaaatgctgcgggatatgctggttggaggcggaaaagccatgaaggatgccgccatgccgtttttaatggtgaactccatgactgttgtgcgctgttttatagaagtaacggtcatgaccgttatcctgtttatcgccaccatcctttcccttcaggagatggaagatatccggatgcgccgtgacaattccattttccgccacgaatttgccctgttgggcggcagactgtccatggttggaagcgcatggctgaagacacagggaagcatcatgttcctgaccatgtgcatctgtaccgcaggactgtttctgatgggaaatcaatacagcctcctactggggatcggaatcggccttctcgatgcgcttcccatctttggaacaggaacggtactgattccctgggccctgtttcgcctggtcaacggagactggctctatggaatcggcctcttcgtcatctatattatctgctatttcctccgccaggtgatggaggccaaaattatggcagataaggttgggctgacgccgcttgaaacgttgatttccatgtatgtaggtctgcagctgttcggactgctgggatttatcctggggccgatcggtcttttgattattgaagatctggtggaactgtacggcggctagtggtatactggttccataaaaggattatggcagatgtgacacggcagttctgccatgacagaaatggaggcagcgatggagccgggcaaattaattgaatttttaggaatactggaaaaattaaaatgcaacacccgccataactggaccacttcgggcaggagggagagtgttgcggaacacagctggcgtctggcggtaatggcgtttctgctgaaggacgaattcccggaactggatatggaccgggtggtggatatgtgcctgatccacgactggggcgaggctgttaccggggatattccggcgtttataaaaggcagcacagatgaaaagacagagagtgccgttctccggaccatgacgggttctctccccgaagatctggcccgcaggcttaacggcctctttgacgagatggaggcccttcagacgaaggaggcaaaactcaccaaggctctggacaagatcgagaccctgattcagcataacgaggcgggggcagacacatggcttcctctggaatacgaactgaatcttacatatggaaacgaaatatcgaacatgtcggagtacaccagacgattacgtgatttagtgaaacaggagtctgagcggattatcagtgaaaagccgcttaaggatcagggatgcggcagtacaggaagccacagcgctctggatgatgaaacgtttgaaaaaataaaggagctccgaaaggaactccacgaaattccggaactgtccggtcaggaacgaaagaccatggaagttttaaaaatgttcctaaggaaacatacctccctttcggttaacgaccggggaagctggttctacgccattcatcaggaagatggcgccggggaaaccgtcgttttccgcgcggacatggacgccataaaaggcgccggaaatattccttatcatggctgcggccacgacggccacagtgctattctggccgggctctgcctcttaacggagggccgggtatttcaaaagaatctctgtttcctcttccagcccgcagaagagactggagagggcggaaaaatctgctgtaatttattagaagaactgggggcagacagagtctacggcttccacaatctcccgggctatccgcttgggactgcagttatgagaagagaaacattttcctgtgcttccagaggactgatcatcaggcttaccggtaaaccgtgccatgccgcctatccggagcagggaatcaatccggcctatttgatcagcgggataatcgcttccctgccggatttcctgaagcctgaggaatatcagggaatggtactggccagcatcatcgaggtgaaagtcggagacgaatcttttggcgtgtccgcaggtgatggaacacttgcactcactatccgtgccgagcacttagaagacctggacaaactggaaggccgtatcagagacgaagcagaatcaaaggcacaggccgaacatatggcatgctgtatcacccgccgcgacgaattcccggataccgtaaacaccgctgagatcgcagacaaaagccgaatgctgtttgaaaaggaaggaatcccctgtctcgaagccgccgcccccttccgctggtccgaggatttcggatggtatttaaagaaatcccagggcatgtatttcggcatgggagccggcgaagactgcccggacctccacacgccagactatgagttcccggacgaattgatccgaaatgcggtcagatgcttatacctgcttgcagagatttaggtactgtggaaagaagaaatataaattgcttttacaagattggacattgagagggagaaaagatgaaaaaagtggccgtcatcacccttgacaaagaaatccaaatagcgtaaaatcaaccatacaaaccaacataacaacatacgtttcagacgtggaagaggattagtaagcgatgatgcattccagagagagggtcactggtggaagaccttcatgcccctggtcgcccaacctgccttggagtcccgcagcaaactgcggcgcatatccggcgttatcggagatacaagtgagtcacattgtggctaaattgggtggtaccaccgagctgttcggtcccttgtatggggatcggcggctctttttcgtttcatagaaaaatacgtattttaacaggtaaaggagaatgattatggcaaaggacaaaaagttagtagaagcaatcacatccatggatgtggacttcgcccagtggtataccgatgtggtgaagaaagcggaactcatcgactattccagcgtaaagggctgtatggtgatcaaaccggccggctacgcgatctgggagaacatccagaaggaactggacagcagatttaaagcggttggcgtggagaatgtatacatgccgatgtttatcccggaaagccttctccagaaggagaaagaccatgtggagggatttgcgccggaggtggcgtgggtgacatacggtggcctggagccgcttacagagcgcctctgcgtgagaccgacctccgagactctgttctgtgatttttatgcaagagatattcattcctaccgtgatcttccaaaggtatataaccagtggtgttccgtcgttcgctgggaaaagacgacgagaccgttccttcgttcccgtgagttcttatggcaggaaggccatacggctcatgccacggcagaggatgcgcaggccagaaccgagcagatgttaaacctctatgctgacttctgtgaggaagttctggccatgccggtaatccgcggccagaagaccgacaaggagaagttcgccggagcggaagccacctacaccatcgaggcgctgatgcacgacggcaaggcactgcagtccggaacgagccacaacttcggcgatggattcgcaaaagcctttgaaatccagtactctgataaagaaaataaactgcagtacgtacaccagacctcctggggtatgagtacccgtctgatcggcggtatcatcatggtacacggcgatgacaacggccttgttctgcctccgagaatcgcaccggttcaggtgatgatcgtcccgattcagcaggcgaaggaaggtgttctggaaaaggcggctgagatcaaatccgttctgtcgggttaccgtgtgaaggtggatgacaccgataagagcccgggatggaaatttgcagagtccgagatgcgcggcataccggttcgcgtggagatcggcccgaaggatattgaggcaggccaggccattctggtacgccgcgatacccatgagaagatatccgtttccttagaggagatcggccagaaggtgggagaactgcttgacacaatccagcacgatatgtacgagcgcgcactggcacaccgcgaggcccatacgtatgaggcgacagattttgatacatttacaaagaccatcgaagagaagccgggcttcgtaaaagccatgtggtgcggatgccaggaatgtgaagacaagatcagggaactgacaggagcgacttcccgctgtatgccatttaagcaggagaagctttccgatacgtgtatctgctgcggaaagccggcgacgaagatggtatactggggccgtgcgtattaatgtaccggtgatccaaccgtacggcttctgtaatacaccgataatagaaatgagatgatggcatggtgaaagaaatacgggttccggcggatgcggagcagatcattgaaaaactgaatgagcacggatttgaggcgtatgtcgtgggcggatgcgtccgcgacagcctgctgggaaaggagccggaggactgggatatcaccacttcggccaggcctggggaagtgaaatccattttcagccggacgatcgatacggggatccagcacggcacggttacagtaatgcttaaccggcagggatatgaggtgaccacgtaccgggtggacggtgagtatgaggatgggcgtcatccgaagtccgtagatttcactaccagccttttagaagacttgaaacgccgtgatttcaccatcaacgccatggcttacaacagccgtgaggggctggtggatgcgtttggcggtatcgaggatttggagaaccgggtgatccggtgcgtcggcagcgccgtgaaccgttttaccgaggatgcgcttcggatcttaagagcagtccggttttccgcgcagctggatttccggattgaggacgagacttatgaggcgatttccatcattgcccctaatttagaaaaggtgagcaaagaacgaattgccacggagcttacgaagcttctgctgtcctcccatccggaaaagatgaagagagtatccgatacgggggcttcacgctacgtctccgaaccattttgcagggcggcttcgcttaacaaggacgagctgcgtccgctggggcttctgcctgctgtaaaatatatgaggtgggccgggcttctccgcagggagcagggggagacggcagcagccatacttcgggatttaaagatggattgtgataccatggataaagtaaaaatacttgtttcccggtggagaataccgatttccgcagagaaaccggcgattcgccgggtgatgaatcagattcctccggatctctttgacagcctgctctgtttccaggaggtctttgccgcagagctgggcgaaggctacagagagacgttaaaggcggtgaagacgcttgcggaagagatccgcagggacggtgatccggtaaatctaaaggaactggccgtggatggccgcgatctgatggcggccggcatgaagccggggccagcgcttggaaagacgctgaatgcgctgatggagcaggtgctggagcggccggagtgcaacacgagagagtatctgctgaatgccgccggattgaaatgcgagttaccataaaacaggagaagccgtttggcccctgcccgtgtctgtttgaaaaagcagctgcggatgcaggggccaaactttcttttttcacgtatatttccgttccgccgctcataccctagaagtagccgatgagctaagagttggaggggtggttgtgatagagaaatacacagaggtgctttcgcagtatgagcttgaaattctggatgtgagacgcggccgcggcgcctggctgtgtgagacaaaccagggcctgaagcttctcagagaatataaagggaccataaaacggctggaattcgaagaccaggtatttacgcagctggaagaggcctggcacccttttgtggaccgttatgtgagaaaccgtgaaggcgaactgctttccagcgcggatgacgggacgagatggattgtaaaagactggtatgccgacagggagtgcaatttaaaagacgacagggaagtcctcagagccattacgcagattgccagtttacataaaatgttgcgaaaaatcgaattcaaggaagagtggaatctcggttccatactcgtgcagcttccgggagatgagatggagcgccataacagggagcttatacgggcgcgttcctttatcaggaacaagaggaaaaagacggagtttgaactctgcgtcataggaaattatgacatgttttttgaacaggccagggacgccagactcggcatgaaggagttttgtgagcgctatggagaggaagagtgttacctgtgccacggggacttgaaccagcaccatatcctgatgtgcccgagagatgtggctgtagtggaatttaaccggatgcatctgggaatgcagatggaagacctgtaccattttatgagaaaggccatggagaagcacgactggagtttaaaactcggcacctccatgctggaaacgtattccagaattcttccgctgtcggacacagacagaacctgcctttactatctgtttttgtatccggaaaaatactggaaacagattaatttctactacaatgccaacaaagcatggattccggccagaaatattgagaaattaaaggatttggaattgcagcagccgcttcgcaatgagttcctttccagaattaaataacacaatttcgctttccttttagactgttatgatttataatgttgataacagaatggagagaaaggagtattgtgttttatgaaagactataagagtatttatgaagaatggctggctaatccatacttcgatgaggctacgaaagaagaactccggtccattaaagaggacgagaatgaaatgaaagaaaggttttatcaggatctggaatttggcacggccggcctgcgcggtgtgatcggcgcaggtatcaaccgtatgaatatttatgtggtacgcagggcaacccaggggcttgccaattacattatcaagcagggcggcgcggataagggcgtggcgattgcttacgattcgagacatatgtctccggaatttgcagaggaagcggcccttactctggcggccaacggcattaaggcctataaattcgaatccctgcgtccgactcctgaactttccttcgcagtcagggaactgggctgtatcgccggtatcaacatcactgcaagccacaacccgcctgagtataacggatacaaggtatactgggaggacggcgcgcagtttaccccgcctcatgacaagggggtaactgcggaagtacttgcaattacagacctttccaccgtgaagaccaccgatgtggaatctgcaaaggcggcgggcaagtatgagatcatcggcgaggcgattgatgataaatacatcgcccaggtaaaagcccaggtggtgaatcaggatgccatcgacaagatgcaggacagcattcagattgtttatactccactccacggcaccggcaatattccggctagaagagcgctggcggagatcggcttcacccacgtttatgtggttccggagcaggaacttccggatggggatttcccgactgtcagctatccgaatccggaggcagaggaagcctttgagctgggcctggcgctggcaaaggagaaggatgccgatttagttctggcgaccgacccggatgcagaccgcctcggagtttacgtaaaagatacgaagtccggccagtacattccgcttacaggaaatatgtcaggttccctgttatgtgaatacgttctgagccagaagaaggaacgtggagcgattccggcggatggacaggtggtgaagtccatcgttaccactaatctggttgatgcggtggcgaagtcctacggatgcgagctgattgaagtactgaccggatttaagtatatcggccagcagattttaaaagaagagaacacgggatacggaacgtatttattcggtctggaggagagttacggctgtctgatcggaacgtatgcccgtgataaagacgcgatttccgccacggtagcactctgtgaggcggccgcttattataagatgaagggcatgaccttatgggatgccatgattgccatctatgagaagtacggctactataaagacgctgtcaagtccatcggactgaagggaatcgagggccaggcaaagatccaggccattatggatacattaagaaacaacacaccaaccgaagtgggcggatacaggacggtctctgccagggactacaagctggatacgattaaggatatggaaaacggcgaagtaaaaccgaccggacttccggaatcaaacgttctctattacgatctgaccgatgacgcatggctgtgtgtaaggccatccggcacagagccgaagatcaagttctactatgggatcaagggcacttcccttgcggatgcggatgagaaatctgcgaagctgggggaagcggtgatggccatggtggattccatgatgtgatagaataataatgaagtgtaaaaacgcctgtggaatcaaaaacacaggcgtttttcaaatgattcaggactgttatagtcgtcaaacattcatatcccggcttctttcataagctccataatcttttctatgcgccgctccatatctttcccggtatatttggggaaatgtgcctcgcgcacgatcctgccgtcacacaggaacaggacgcgctccgtgcgggctgcgattctggcatcgtgcgtcaccaccatgactgcggttccctgtgtgttgatttccgtaaaaatatccatgatttcctgggcggactttgaatttaatgcgccggtgggttcatcaccaaacaggatttttgggtcattcatgagggcacggcagattcccgcacgctggagctgtccgccggatgcacgtgagatatccctgtcctccagctccccgattccggttttttgcatgagtgcccgtgccttttcggtgactcgggagacatttttctttttatcccgcagggagggaaggatgatattgtccagaatgtttaaattcttcagcagagtgggctgctggaagacgaagcccatctgtgtccggcgaaggtctgccagctgattttccgtgcaggcggttaaattgcttccgcagaaggatacgcttccgccgtcgatgcggtccatgccgctcagagcgaagagcagcgttgattttccggaacctgagggccccatcaccgagataaattcgcctttgcggaccgacaggctgattccatccaggatgcgctggtgttcggatccctcgtaaaacgatttaacaatgctttcggcatgtatgatttcttccatgttattcctttccatattcagatattgtgatcttctctattccctttgtgccggcaagtgaggcaaagaccgcggtgcagatcatgagaagcgggcagagcagacgggacaggaggggatttaccgcaaagcggaaggagggggcgccgaaaccggagaggaccagaccggccaatgccccgccagcagtattggccagaaggattccggcgaagattccgcacacggatacgagtacgaaacggcttaaatactgcagccggatgtctccggcggtgaatccggaggccttcatgactgcgatggaatagcggtcctttgcggtcagcaggttgacgaacagcagggtaatcagaccggtgagcgtaaccgccaccgcagccgcagcgatggccgccatgcgaatggaattcagcgtgggtccgtaagtctgggagacgtaatcgcggatatccgtgacttttgtatcgcgaaatgtgtctgtatattcacggacaatctgtgagagcattgagggatctttcagcccggcgtagatgacggcccaaaccgtgtcgtccgaatctgccgggaaggcggccttcgccgtttttcctccgttggtgatgtcggaatagattccgcacaccgtcagtgtctgtgtaccgctgccggtaatcagtgtgagactgtcgcccggggccttgcccagctcctcggcgttcatggcagagagggcgatctcatcgggggtgacgggggcctgaccttttacgtaggaaacaggaaatatccggtgatcccccagctccgtcaaaagattccgaacggtaccctccggcgtttccacctgaaaggacttggtagtcagtgcagtatggcggagaatggagccgtcctgttccattttccggatgatccgggcggcgtcttccgctaaatggtctgactggcgcagatcgatccgcagatcacagttaccgattcccatataggtgacgaagcccctggacgacatggtggtatacagattgatgggaatcacaaggagaaaggctgcaaagagaagtacggtgaaattgacgccgtacagccttttttccaggagtacatcccggattcccaggaagatgctgacattggaaaaatggctgcgattcagagccagccggctggctctgcgaaaagccattgatccggtaccgcgccgcatggcttcggaggcggatagtttctgtaagcgtcccagaactccgtttacataaagcagaatggagaaaaatacgatcaaaacgcctgcaggtgcgaggaataaggcggcagggccgtttccgccggcccccatgtttaaacggatattctgaaggagaaggttcttaagcaggaatgaaaaaacgatgcctgccgtacatccggatgcggcgatcactgcatatttggcgagatacagcttctttatgtcggagacgcgcaggccgattgccttcatcacacctagttcccggtagtcggattctaactgggccagaagcgtataacgaatgcataagaaggcaatcagaacggtcaggaagccgagaagcaggatcacggcgatcatcatgccgtcggataaggagcccagcaggcgaaacagcggatacgtgacggcaggaccgctggaaggaagcccggcagccgtataatcagcggcaaaggcgtccagggccgataggtcttttaaacggaactcgatcaaatgctccatggttccaaggcttctcagccgttcaaaatcctggggacttacgaggaagcgtttggaggaagagagcatggaattcatctgtgaatcccgcagaaatcctgctgtgcgaaacgggattccacagacggagacgatgtcgccggtcttcatggcggcttcctgcatgtagcagaccggtacgtagatctccccgccggcaggggtgatgacggctccgtccaggttcagaaggtaatcaaatgcaccgctctgagtggaaaacccgttgtcctgtgtactgctgattaaggagtggccattcagttcaatctcactgttgtcaatatttagaaactccagaatttgataccggtcaaccgcttcatgctgcgaggcaaaacggttgaccggctcagcatccagcgggccggagtgcatctgcatgaaatgcggcgtctctgcctgcaccatcagccggtccagggcgcccgcaaggttcagagccagaataacagccagggagacgaggatggcggccagcgccacaaacagggtggtgatcatggtagtgagctggctttttctgatatcgtttcggatgatgcggcaatcaatcatagcttacctcgtttcttcaagggccctcacggatttgatgcggcagggcagaaaggatatggcggccaggagaatcccggctgtgacgatcaggaggccggaacctctcccggagccgatagataacagtgcgccggtaccgtctgccagaatgccggaaataccataagcggccacgtatcccagctgtgacaggacgccgatcagtccccaggctctcccctggaaatcatcggcaatgttggtgcggacgagaaaatccagcgccgcgtttgcaaagggcagggaggagaagaaaagaaatccgaaaacacagatgacaacgatgttttcccgcattccaaaaccggccatgaagattcccgctgcaaagagggcggcagacaggatgaccacgcggtttttcttcagactgaccgtcccgattaccaggctggagatgagcatgcccgaggcacagatggtctcggaaatgccgaggacggtactgtctgcgaatcccaggatcatcgggccgaaaagtgtctggataaagcctaagaaaaatgtgatggcagaagacagaataaccagcaccagaacgcccttcttctgcgtgatggcattccatccttccgagaattctctggtgaaggattttgtctccattgcctgcttcgactggattcctttccggacgaccagcgtcgcggttaccgttaagaaaaaggtagcggtgtctaagagaagcagaaggcggatatcggagatggtgagcagcaggcctgcgagtaccggagaaatcaggtatttcgcagatcccgcaacgcccaccagaccgctggcctttgtatactgttccggcgtcagcaagtcggtcaccgtggccttgtaggcgggatcgagaagcgaagaaaacacagaacttatggtgacgcccacacagatctgccacaacgcggcctctcccttagagaggcagagcaggatgaaaaggagtccaagcgcggacaggccgtcacccagaatcattaagagcctgcggtcgtaacggtctgccaggaccccggcaggaacgcccagaatcagtcccggcgcaaaggccagcagtgtgacgagagcggtggaggaggccaaccctgtctgctgaaagacgtatacgcccagcccgaaggaggtgagaccgcttccaatggcagaaaccagttctcctgtccagaggagaagaaatttatggaaataattagctgtctgcttcattctgcccgacctttctgctgccgaacacccgcatgagatccgatgcaagactcccggtttctgctcccagcagccgctctatattgaagataagggcctgcacccgctcgtctctcagctcctctgaggcttccgcggcatcgtcgaaaaagacgttgctgtagaccataatcatctccacacactcccttgggtagggagtctgaaagtatccggcttccgcgccttcccggatcagcttcgtcagaatcggagtgacgccgtttaataccgccatctgtgttttctggtgcatcagcgcattctgcggccggtgcatctgttccttcagctcctgcccgcccttctggctgacattcagcgcaagaattgtacggatcagccgctctttgacagagaatcttttgtcggatgcggcctcctgcgccgcactcagaatctgtctgttataccgctcgatcagggcatccagaatatcctcttttgatttaaaatggtagtacagggttcctctcgcgattccaaccatctctaaaatatcgccggtgctggtattgtcaaagccctttcgggcgaaaagcgtatctgctgcatctaaaatttcatttttacgtatctctggttctttcaccgttctcattgcgctgtctcctttttatctcattaccgactgactgtcggtctgtaaaaagagaataccacactccggtctgtttgtaaagagaaagagtaaaaagtatggccgggaagagggcgtttgcgaaacagggccgcatttctggtacaaaaaaacagagccgtttcagctctgtttttagtaattagcttttcagacgttcctttaattctttcagcgcctctccaaactgtctggaagaagcggtagggtttcctcttaagagacccttgcggtagaaaccgagatgtttggataatttatcccggttctctgtgagggactgcagccgttcggtcagtgcggatagatcggggactgccttgccggcggtctctttgatgctggctgcagcttcgagacggcgctccgcgctttcctttaaagcatttagtttttcttccgtacgcattgcggtttctgcttttaatgtcgtgatcttaacggcagcctcaccctttaagttggcggcccgctgaatctgctcgtcgcgcaggtcagagagtttgtctgctgtttcagcttttaaaagagccatctgcagctggatttcttccagttccgccttcatctttgtcatagactccagcacacggccaagatcgagggcctctttcgtggattcaacggcatcggccacaaacaggaccccgatgatgccgcataagacgatgcacaggacaggatttagatccagaaccacgctttccacagggcgatggataaattctgttaaaacaatggtcagaaaaccccaggcaatggacgtgcccaggcagatgtagccgttgaggttaagcggttgttcggtgtagtcccagtacttcatcttaaacaggcgctccatggtccagccggtgatgtattccagcaccgaggctccgatcataccggacaggaaaaccaggaacaagttattctgaaacggcagggagacccacagcatgatgatcgccccgcttccatacaacggaagcattggaagccgcagaaagccgcggtttacgaaatggccgcattttaaggagacatatgtggattcaatgatccatccaatgaagcagtagaggaagaaaaagagaagccactgataccaggtgtatatgtacataaataaaatcctttcgtttaaatttattgacttaaagacctaccatctatcataaacgtttttgccgattttgacaaccgaaacttagcggcttctttccccttgcaagaacggcggttgtcatgtaaaatgggttaagaaataagaagattgaggagtttacgaatgagcatattaaatgttgaacatctgacacatggatttggcgaccgtgccatctttaacgacgtgtcattccgtcttttaaagggagagcatatcggtttaatcggagctaacggtgaaggcaaatccacatttatgaatattattaccggaaagcttcagcctgacgaaggaaaggtggagtgggcgaagcgcgtccgcgtcggctatctggatcagcacacggtgctggagaaaggaatgacaatccgggatgtgttaaagagcgcatttgcatttctgtttcagatggaagagcagatgaatgagatctgcgaccgcatgggcgaggcgggagaggaagagatggagtccatgatggaagaactgggaacgatccaggatcttctgatggcccacgatttctatattatcgactccaaagtggaggaggtggcccgggccctggggcttacggatatcggcatcgacaaggatgtcactgagctctccggaggccagagaaccaaagtgctgctgggaaaactgctgctggaaaaaccggatatcctccttctggacgagccgaccaattatttagatgagcagcatattgaatggctgaagcgttatctgttagagtatgagaatgcgtttattttaatatcccacgatattccatttttgaacagtgtggtgaatattatctaccatatggaaaaccagagtctggaccgctatgtgggagactacgataagtttgtggaggtccacgctgtgaagaaggcgcagctggaggcggcttataagcgtcagcagcaggagatcgcggagctggaagactttgtagcgcgcaacaaggccagggtttccacccggaacatggccatgtccaggcagaagaagctggataagatggatgtcatcgagctggcgcgggagaaaccgaagccggagtttcattttctggaggcgagaaccgcaggaaagacgattattgagacaaccgacttaatcatcggatacgatgagcctctgtcgagaccgttaaatgtccgcatggagcgaggggaaaagatcgtactggtcggcgccaacggaatcggaaaaaccacccttttaaagagtattctgggactggttccgccgctggacggaaaggtgatgctcggagactatctgtccatcggttattttgagcaggagatggcgccaggcaacaagacaacctgtattgaggaaatctggaaggaattcccttcctatacccagtatcaggttcgttccgccctggccaaatgcggcctgaccaccaagcacatcgagagccaggtgcgtgtcttaagcggaggtgagcaggcaaaggttagattatgtaaactcattaaccgggaaacaaatgtgcttctgctggatgagccgaccaaccatttggatgtggaggcgaaggaggaattaaagcgggcactgaaggagtataagggaagtatccttttaatctgccatgagccggagttttacgagggtgtggcgacgaaggtgtgggattgccgggaatgggcgctgaagctgtcataggagcgcctgtccggcaggccgccggaatctgatgatgtgaataaagaagcagccgtcctgttacagacggctgcttctttaaactattgggaatggtaggtataataaattaggataatgtctttaggggggccggatgatctttcaatcatccggtatgagtatgaaaaagctttgtgttaatcactgttttgtgattgactttataataccaggaatttgtgtgcattttgtggactttccattaagaaaaaataaaaaagattataactttatgaaagtacagtttacaagggactacacagggtaggtatctgacgggaggggttccacccgtcagattttccatgtgatattcaagctgtcgcttgtggcggctatggtggtaatcatcaaatccaccacccgccgcttgtcgtcaaaggatacattctcccaagtgtcgaggtagccggaaatctggctgacctgttccgggctgatggcttccaccgtcagttccgctatcctcgccagaagttcctgcttgcgcccgtccagttccgctatcttcacattcacataggagagcaggacattgtttgcacccgtcagactgtccaccagcttttcaatctcgctgtccacatgggcaagctccacttgcagtgctgcaattttcgggtttgcctttgccgctttctttctgcctgtcagcgtcttgtagcttgccagtttctttaccatctgctggtaaaccaccgcttccagctccgaagtgatgattttcccgcaccccggacaactcttgttatccagccgtttcgtacagcgaaggtattgcttgccggagggattgaagatactcataagggcatacccgcagtttccgcatttgatttttcccgccagccatgtatgggtagcttttcgggcagactggattttcatgttgttcatcagcttcttgcggcaggtcagccagatgtcggaggggacaatgccctcatggggagccagtaccagcatttggtctttcaagtcgttctttttgctgggcttcacatcccgcccttgatacagatagcagccgttcatgccggtaaaatcggcagcgtcattgacaatgaccgtcccttgacttttgaaaaactcgtacacatcaaggtctgcctgcacatagacaggattgcgtaacatctgcgccagcgtggggcgtatcagctctttgccatggaacaaaatgccctgttcggcaaagtaccgggtaatgtccccgtaggaggtagtgggctgggcgtacatctcaaacatcagccggatatttgccgcttcgtctggatttaccaccagcttttttgtgttgataccgtccatcttaatcggctctgtatgaaagccgtaaggggctttcccacccatcttgaagcctcgctggctgcgggaatagtaagcgtccgttacccgcttctgtatggtttccctctcaagctgggcgaacacgatacagatattcagcatcgcccgccccatcggggtggaggtatcaaacttttccgtagaggacacaaactctacattgtactgctggaacagctccatcatgtttgcgaagtccagaatggaacggctgatacggtcgagtttgtaaaccacgacctttgcaatcaagccccgcttgatgtcccgcaccagttcttgaaacttcggacggtctgtgttcttgccgctgtaccctttgtctgtgtattccttgcagttaccgcctttcaactcgtatttgcaaaattcaatctggctttcaatggaaatgctgtcctttttgtccaccgattgtcttgcatagattgcgtctattcgattattcatattgtcgctccttttcttaaaaaagaaacggagctgctgacagttttattataccgccagcagccccgcaaatcaatgatggcgttggaaaatcttatgccccggcttcctcactctgccgtttgttggcatacttgcggaacacctcataaagctgctgttccagctcccggcgttttgccgcttcctgctccggcgtgaataccggggagagattttccagcgtgatttcctttccctgaaaagtcacgacttcggtttctttcttgtatctgatatgctccatagtacctccgtatttagttttcaaagtgcagtgccgccatgctgcggcgtgaaatgttttctgtcatcaatcaccgttcccttgtgtgccgcttctgccgtttcagttccaccagtatatccggcgggatacggtctaccagccgctgaatgtcgtgcagcttgctttccaactttgcccgttccatgcggtctttgattttgccgttctcgctggctctggctcgttcttccagcttttcattttccgccaacaggtcattgattgtgaccttgtattttttcaactgcccggagaagttctccatctgcggaaaccactttttcagcatagcgagggcttcctcttttttctttccggcattcagcgggttaatgccgtccagcgtggcttcaatggctcttgcctgtttggatagattgaccgcctgcttgaacagacgggtggggatatgcttcctgcctgtcttgctggcactttccccacgctccaagtcaggatatttctccaccatataggcgtgaaaatcgtcctgccactttgtgaggttggctctgtttccgataatctcctttgcacacaggcggttgtcctctgtcagagggacaaagaccaaatgcaggtggggcgttttctcgtccatgtgtaccaccgccgacacgatattttctttccctacccgcccgattaagaaatcagccgccctctggaaaaattcctgtatctcctgtggggacttcttcttaaaaaattccggactggcggtaatcagcgtatccacaaaccgggtactgtccttacgggtacggcagccagcttgttcaatgcggcttttaatgaagtggtagtacctgccgtaccgcttgacgatatggaagttgtacttgctccggctggtgtcaatgtcgggattgctggcgtactgttccttttgccgttcgtgatgggcttccagcggtcttgccggattgcctttgtgtttttcaaatcgcaaaattgcgtgttgtgccatgaaactcctttccccattccattcctttccgggacttttccacaggaaaatcccgcagaaaatatctcagataggataggaatggataagatataaataaaatcgttttaatctctgtatttctatataccgtccggttttcgtacttcaagaggattgattatcgtacttgtggagtgcggttttcagtcctccggtgttccataaccggatttcttgaagtcggtgtttggaaccgcttcgtaggattttgggtaaatacggttgggttttccacagccctgcttctggatctccaccagtccggcatattgcagttcccgcagggtgttgaccgctttctgccgtccgcagtggagcagctccactacctcgttgatgggatagtagaggtaaatccgcccgtattcgtctgcccagccatttttccgggacaggtctgtccggcgcaggataaaggcatacagtacctttgcttcgttggacaggggggtgaatgtgggggcttcaaaaaggaaattaggaagccgggtaaagctgaccgccttttccggctgatggatataaatggtgtttgtcatatcgtgttttgtggacggttagaagccctttttctggggcagacggtagtttctattgcctgcccctgttctgtgcttgcaaagccttgtaaatcaaggacttttcagcccctaactgtccacacaagacctccttttccgttcactttctgttttctgccgcctgtgaactccggcggcacagtcgggacagtatttcgcccggttggactttgggacgaacactctgccgcagaccgcacagcatttcagctccttatcccggaaaatctctgcttccagcgttccgctttgcggcaagaccgaccagcggaaccacttacagcagaccgagaaagaaatggtctgggggcaggcgcaggtgtccccatcgtcaaggagcatacagttcccgtcctcatagttgcagcactcccggcgtatcagggcgtttgcctgtttcctctgcgccggggtcatgcggtaaagggaaccgtcctgcctgcgctctatgggaggcagtcgtttatatgggttctctctcatgtgttccctccatttttccttagccgttctccccgaaaaggcttcctgccccattcctgcggcgtgtttctcctttggtacgcaaatgcgctgcttctccgggagaggtattccttttcggacggtcattctgttttcaaggtgcagctcatcgatgaactaccttaagtctacacctaaaagaccgcccgccccgtatatccataaggtcggaaatcagcccggaaaactctctatttccacgctcttggaattgtggtagaatagaagaaatagaatggcaaatcgaaatttcacggaggtatattatgggactgttttcaaagaagaaaaatgaagaagtggctattgatgaactaacaccacaaataaaaactaagttagatgaattagcccaaaaaggcaatcagtttgaggaagaagaacaatatgaggaagctatacaagcatggaaagaagctcttagcctaatcccagagccacagcaattttacagtgaaaccatatggtttttagctgccattggcgatatttattttcaaaagaaacaatacgaaaaagcacacgaatgctttgacaaagcaagggggaatttgagcggcgagggatatggaaatccgtttgttatgcttcgattaggtgaatgttgtttagaaataggggacgaaaaaaacgccacagaatatttgcttagagcctatatgtttgaaggaagggagatatttgagcctgacgaggacggtaatgatgatggcaaaaaatattttgattatttaagaactcatgttgaaaacattgagtgaagattaagataacacagttcccatttatcgagcagacaaggagggagagcatggaactatccatacaagaacgattgaaagatttgcgtgtggagcgtgggctgacgctggagcagcttgaggagcaggtaaatctctccaagtctgcgctgggcagctatgaagcaaaggattttaaggacatcagtcactatgctattatcaagctggcgaagttttacggcgtgaccgccgattatctgctgggactgtcccaaacaagaaatcacccaaacgccgatcttgcagacctgcgtttgagcgatgatatgattgaactattgaaaagtgggcgggtggataattccctcttgtgtgagctggcggcacacccggatttcccccggctcatggctgaccttgaaatctatgtaaacggtatcgctggcaaacaggtgcagagtgcaaacgccattgtagacgctgtgagcacaaccattatgaagcagcacaatcccggcttgtctgacccgcagttaagacagcttatcgccgcccatattgatgatgacagcttttgccgctatgtgatacagcaggacataaacaagatagctcttaacttgcgagaagcacataaggacgattttttcagcgtcccggaggacaatccgctggaagattttttgcagaccgccgaggaaaccgccagcccggacaacaacccggaacaggtagctttggcatttatctgcaagcggctcaaattgaatttgaagaagctgtccgaggaagaaaagaagttgctgaaaaagattgcacagaagtcggacttgctgaaaaatccaaacccgcagcgggggaggaaataaaagaaatatattacggaggaaatacagatgagattttggggcaaagacagaaaacaggataacagaaaaaatatttggattgagcatctcaatattgatacaggaaattggtttcaagtgttttcagcttgcttaggtaaaatgatagcaatacagactgcttgtagtgagcaggtggtaaaggggcaggactggaatgttgatttttcagagggcgtaatactttttggaaatcaaaagtatccgcttcaattcatcggaagcgaggcaacatcaagtaacacatggctgtgggggtgggaaaatgtcaatggattttccgagaaaattattcaggtagccacacacgcaaaagtagtgggggaacgctggaatttagagccactaacgacagcagaatttacattggacgatacattcaacgggcataacctgtctatcgtaacttgcggcttagttgataagtattgttattacaaaggtccacattctggtggagcaatttttgttgcattttcaggtgttcctgatagtgtgtttgcctccatcgatgttcaaaaattcgtatctataacgacgcaatgtattcaacaatttcatattgatcacaaaatttttgtggagggatttctctcgtggaacaatacgcaatatgaatggaacaatcaaacattactcgctcattttcagcaagatttgaaaattgactttgaacaagtaaataatttttggcgtatttgcgctatgaataccattttatctggaaaatagcaaagccagccgagccagtcaacggtcaagatgaacggcacattttatgtgccgccgttgacagtcctgcccgtctttgctgatgggcaatcaaggcgggaaagcccaaaaatggctttcccgcctatttcaattttacgggagtaagtccacaagttcgggacactttgtcacgaagtccagcgtggaacgagggacgggggctttcatatacgccctgtctgctgatgaaaccaaccctgtgcttgcggctccacgccacacaatcacagttctgttttcctgctgcttcaaatgtgcttgcccttccgggcggcaacctcattttcgcagcaacgccgacagagcgtataacacactacactttgcaagcaaagtcgtgtgccaaggggcaagcccctttggaaaccccggacaacaaaacaggctgaatatctcgcactttcccagtgcttgatactcagcctttatttgttgtcagcagcccctgtttcgtggtctgcgtgtagttccttgtaaactgacctaaggatctgtttaaatttatttcgctgaaatcgggtatcctataacggaactgcatgttacaaacaaaagtcccgctccgagggggaccgaagcgggaaataatcatttaggggggccggatgatcttacgaccatccggtatgagtatgaaaaagctttgtgatttcaagtaagttacttgaaacaaaggcccgctatcctctcggataacgtattttcagtatacgggtaaaatgtgaccaaaatgtgtattggacataaaaaaaacataaacataataaaaataaaaaaaaccctttaaaaacaggttgttattgtatataataagggagataaacaaaattggactattagggccagtaacccgaattggaaatacagataaaggaaactctgggaaccgtttaagcgaacaggaggaaataaatgatgatgtctaatgatatcggtatcgatttaggtaccgccagcatacttgtgtatataaaagggaaaggtgttgtattaaaagagccttccgtagttgcaattgaccgtgacacgaacaaaatcaaggcgatcggggaagaggcgagactgatgatcggcagaacgccgggcaatatcgtcgcagtcagaccgcttcgccagggtgttatctccgattataccgtaacggagaagatgttaaaatattttatcaacaaggcagtaggcaagaaaacactgagaaagccgagaatcagcgtctgcattccaagcggagccacagaagttgagaagaaggccgtagaggacgctacgtatcaggcaggagccagagaggtagccattatcgaagagccggttgcggctgcgatcggcgcaggcatcgatatcgccaaggcctgcggaaacatgatcgtagatatcggaggcggtacttctgatatcgcagtcatctccctgggcggcacggtagtgagcacgtccatcaaggtggccggtgatgattttgatgaggcactggttcgctatatgcgtaaaaaacacaatcttctgatcggagagagaaccgcagaggagattaagattaatatcggtgcggcttaccgcagaccggaagtcctgaccatggaagtgaggggccgtaacctggttaccggtcttccaaagacgattgtcgttacatccgatgagactctggatgcattaaaggaaccggccatgcagatcgtggacgcagtacacaacgttctggagaggactccaccggaactggcagccgacatatttgaccgcggcattgttctgaccggaggaggttccctgctttccggcctggattccctgatcgaggagaagacggggatcaacaccatgattgcagaagatccgcttacggctgttgcgatcggtacaggaaagtttatcgagtttacccatgacggcggtaaatctgaattttaaccattgtaagcaggaaagctgcaggacaaccctggcggaacacggattccggcagggttagttttgcggctgcctgctttctgtattttctatgaaaacaaagggggaagaccatggcgacggtctgcggatttgtagaacgaattaaatatcgcaacgaagaaaatggctatacggtcttaagcctcacggatgaaggagacgaatacacgcttgtcggtaacttccattatatcagcgaaggcgagatggtggaggccactggtcccatgaccgagcatccggtttatggggaacagatgacggtggaaacctatgagatcaagactcccgaggataccgctgccatggagcgctatctgggatccggcgcggtgaagggaatcggagccgcgctggcggccaggatcgtccggcgctttaaagcagatacgtttcggatcatggaggaagaaccggagcgcttatccgaggtaaagggaatcagtgagaaaatggccatggcgatttccgaacaggtggaagagaagaaggagatgcgccaggccatgatgttcctccaggaatacggcatttccatgagtctggccgtgaaaatctttcaggaatacggtcccaggctctataccgtgataaaagaaaatccctatcagctggcggatgatatcgcgggcgtgggcttcaagatggcggatgagatcgccaagcgggtggggatcttcacggattcggattttcgtattaaatcgggagtactctacacacttcttcaggccacggcaaacggccatacgtacctgccggaggatgaacttctctcacaggcgtcagagcttttgcgggtagaaaaggaatccatagaaaagcatctgatggacatgcagatcgacaagcgcctggtgatccgggagtcagagggaatccgcattgtctatgcatcccagtattactatatggaaatgagcgtggcgcgtatgctccacgatttaaatatcagaggcagggagccggaagagacaatcagaaaaaagctgcttcagattcagaaggaagagtcgatcgagctggacgaaaaacaggttcaggcggtggtggaggcggtaaacagcggccttcttatcattacgggaggacccggaaccggaaagaccacgacgatcaataccattatccggtattttgagagtgaggagatggagatccttctggctgcgcccacaggaagggcggcaaagcgaatgaccgaggctaccggctatgaggcccggacgatccaccgtctgttggaaatttccggcatgcccggggacgagcgttctgtcggcatgcattttgagagaaatgaggagaatccgctggacgcagatgccgtcatcatcgatgagacctctatggtggatatccatctgatgcagtccttattaaaggcggtgaatccgggaacgagactgattctggtgggtgatgtgaaccagctgcccagcgtcggccccggcaatgtgctgaaggatgtcattgaagccggctgttttaatgtagttatgttaaccagaatcttccggcaggcgagccagagcgatatcgttgtcaacgcccataagatcaacgcgggcgagacggttccgcttggcaagaagagcaatgacttcctgtttattaagcgcgacgatcccaacacgattataaacgccatgattaccctggtgcagaagaagctgccgggatacgtgggggcagacccctatgatatccagattatgactcccatgcgaaaaggcgcgctgggagtggaacggctgaacaccatcctgcaggagtatttgaatccgccggataaaagcaagctggagaaggagagcggcggtgtgaccttccgggtgggcgacaaggtcatgcagatcaagaacaattacaacatcgagtgggaagtgcggaataaatacgggatccctgtagacaagggaaccggtatttacaacggagatatcggaattatccgggagatcaatttgtttgcggagctggtgaccgtggaattcgacgagggccgtatggtggagtacagctttaagcagatggaagaactggagctggcctacgccatcaccatccacaaatcccagggaagcgagtatcccgctgtggtgattcccattttcagcggtccgaagatgctgatgacccggaacttaatctataccgccgtgacacgggcccgggcctgcgtctgcctggtgggagtgccggaggtgttccaggccatggtggacaatgagatggagcagaggcggtattcggggcttaaggagaggatttgtgagatttatcaggtggaatgattgatacagcttccacctgtttttgtcatgttgagtgcggcactgtacgcgctgggagtcatcccggtcttctttttaaaaagctgggaaaagtaatgaggattgtttccgcagccaaccttttccgcaacaacctgaattttttcaccggcagccatatactctttcgcacgggtaatccggatatcggtcaggtaatcggaaaatttgcgcccggtttctttaaaaaaacgcttgctgacgtaatctacattcataaacagaacctgttctgagatgaatttaagcgtcagtacagagtttcccaaattgttttccacataggttgtgatctgctccaccatggaactggcgctgttttcctttgatggcgagagaagcagatattccaggtgatccagaatcaatggtttcagccttttgggatcagtttctccgtcaatctcaatcagccattccgtaagggttacggcagagcatgagggattgtcagcagccgctttcaggagcagatttccggacagctgttttaagaaagcggcgtcttcgattcccgtcagaagatcagcaaggctgtgaaagatatctgctgattcgtgttttatctgctgatacagatgctctgcctcggacatgagagagttgtaattgcaggtgtagagcagatgaaagttgttaatataatagatggtactgaaccgctttaatttaacaaggatgatttcaagcagtttatacaggctgggatatgtctctttctgtatctccagacccacaggctgggaggggatcgaaaggttacggatcaattgcatcagcaggtcgctgtctgctgaataatccttataaaagagaagcagggtgttatgtacataggtaccgtgcatggtgacctgcggcagattttgttcgcagaacagcttcagttcatgtaggaaggaatccaggctgtctatttcaagaaagaacacgtagagaagctggtacggggtggaataaaaatcgagatacggctcataggaacggagaatatcaggcagagcctttttctgccccaggctttcactgattacactggagacgatgttgtggtgcatgctcccggtcaggagagcatggccgctttctaaatacctcgtccgttttctggcatagctgtccttcgcggcctctgcgatgcagtctgatatctgtgatttattgcagggcttcagcagataatgctttacgccatacttcatggcttcctttgcgtattcgaattctccatatccggataataggataaatcgtgtatcgagatccataagagatacttttctgatcagttccagtccatccataccaggcatccggatgtcggtcaggacgatgtcggggtcctcatcaataatcatatcgtaagcctcaaggccgtttctgcataatccggtcagctctactccgagcttttcccagtcaataagacgggaaatactctctcttatgacgcgttcgtcgtcggcaattatcattttcagcatacgatttcctcctgatcggtaatataaggcatgtgaatccgggcaaccgcccattcctggtcattgtacagggtcaggccgtattcttttccaaacatcagcttgatccgctcgtcgatattgatgaggccgatcccaaagccgtgcggcctgatctcctgtgaacgaagtttttccagcagacactcttcaaagagtgaaccgtcatttttgaccaggaccatcaggctgccggattcctgctgatgttcaatggttatttcaatggagcacaattccgtggattcctccagaccgtaattaattgaattttccaccaaaggctggatacacattttgggaatctgagcattgtataaggcttcatcgcagtgtatggaaaattccagccggtcctcaaatcggtatttctgaatcgtgatgtaggcggttacgatctccagctcttttttcagatcaaaatgggaggtggaattgctgagtgtggcgcggagcagagttcccagcgattctatcatggacgagatttccatgtttcctgccacctgtgcccgccagttgacggattccagagtgttgtacagaaaatgcgggtttatctgagtctccagggcttttagctgagcatcctttttccacagttcatttacgtagtttacctgtattaaatgtctgatttttccggccatgctgtcaaactgccggtttaaaaggccgaattcatccctgcggctgctgtagtcgtaatcgctgtcaatcactgcattttcatcggtgctgaaggcctccatcttgcgaatcagaccctgcgtgtgtctgctgataaaggagatcatggactcagaaaagatgatagctaacagaatgctcaatataatcatgacaatactcagcgtccgaacaaaggatactgatttgaaaataggatcataggagagatagcatacgtaagtccagccaataccgggaattacatcctccgtcacaaaatatctgtgtccatcgacattcatgatatcataactccgcatggctgaagccttcctctggtcatgaatagtggccgatatgggattatcgttgtaaatgatcgtatctccggtcatgatataatactggggattctcatacagcggatcttctttgtttaaagaattcattaacccatccagatcaatggagacaagaagcgttccgagctcttccagattggagctttggatatttttaatgagccgtcccataaaaattccatattcatttccgtaatcacatatccataccggacggccgtctccgtcatgagctgcgttaaggacactgcgctcaatctcctccggtgttttgcgggagccgagaaagtttgaataggtgataaactcaggattattgagggtaatatagctgataaaattaggcttgtactgttgatagtattccaaaaccgtataggacagttttttataagcctctgtacgtatccggggattatccgaatgtctgacgtcggataagttgctttgaatattggaatcagacagcatgaggcctgacatggtttcaatgttggataagtagtaggagatggtagtcgcagagtaggaaagattgtttgctatggtcttttgaagcagttttaagtaggcgtcagagactacggagattcccgccagactgacaccggatatcagaaaaatagaaacaagaacaatggtaagtatttttcttttcagagatatattggaaaaaatcagtttgattcgattgaccaggcctctcactgtgctgccgcctccccgttcccatatgctgtgagccgttatgatgatactattatcataagaaaatacagggaaaaaagcaagaataagcgcagaagaagacggttttttgatacaggataccggaatattggattaaaattatggattttcggtgatatactgagggcagttgaggacaacgaaaaagaaatgagggggaaagaagatgacgaaaaaggagcgggtactgcatgcgatcaggggtgaagagacgaaagagattccttcctgcttttccatgcatttttcaccggaatatgcgaacggagagaatgcggttcgtgcacatgttgatttttataagcagacagatgtcgatattctcaaaatcatgaacgagaatctggtgacctgcgatcatgagcttcacacgatacaggattatacggaattccagaggattaccgcagaacagccttttatgagacggcaggtggatctggtcaaacggatcctggatgaaacgggaggagaatgctataccataggcacccttcacagcgtaggtacttcggccatgtatcatccgtttaaaccgcagggatacgggtatgaccagtccagaaaaatctttgacgcatggctgaaagaggaccctgtaaagatgctggaggctatgaaaagaatcacagacggactctgtgaactggcggtaaaatacatagaagcaggtctggacggcgtctatgtggcttcactgggagcagagagaagatttggacttaccagagagcagtttttaaactggatcgcacctttcgaccagatgatcatgagggcggtaaaggaggctggcggaacctgttttctccatgtatgcaaccgtgatgtcaatctggattattaccgcgattacgatgagaaactgtatgatgtggtgaactggggaacgtttgaagttccgtgttccttaaaagagggaagagaaatattccatcaaaggacggtaatgggtggccttgctaaccggcagggggtgctggcagcagggagcgaggaggcgcttgtaaatacgatccgctcggtaacagagacgtatggaagaaaagggtttatccttggggccgactgtaccgtggcgacggaacaggacttatcaagaatcagattagcagtagacactgcgagaaaattataaaggagaaggactatgaaaaaaagaggattggtgatgatggtggctgtgcttgcggcagcaggactggccggatgcggcggcaattcagcagaaaaacagcagaatactactcaggcggctgagagtacggcagggcaggagagcagcagcggaaaagaaacaacagcagaagcgggaaatactcagggggataagacggaactcaccattacctggtggggaagccagcagcgggcggagctgacgcaggaagcgctgtcactgtatgaagcggagaatcccggcgttacctttgacggccagttcctgtcaggagcggattactggaataagctggcgacttcagcggcgggccataccatggctgatgtggtgcagatggacaaggcgtatattcagcagtatgtggacaacagcatgttggttgatttgcagccttatgtggacagcggtgttattaatatggaagatgtggataaaacagtacaggaatttggaaggatcggagacgggctctatgccatctgtatcggtgtaaactctcctgcactgctgtataaccaaacgctgctggaggaaaatggaatagagctgaaagacaacatgactatggatgagttcctgaatgtgtgcagacaggtaaaggaaaagacggggtataaaaccaatctgcagtataataatggaacctcatggatggacttcttccttcgttcaaagggagagtacttatttggggacggtgcgatcggcgcatcgaaagaaaatcttactgagtattttaacctctataagatgggaatcgatgaaggctggctgattgaccccagtgttttcgcagagcggtccatcggacagccggagcaggaaccgctggtctacggttcagatccgtctaacatgtcatggtgtgcgttctacttttccaataatatgaatgccgtcacgaacgcagcgccggagggtatgaagatcggtattaccacctggccatccgacgatgcagtgaaatccaattatttaaagccaagcatgttcttttctgtctctgttgacagtgagaaaccggaggaggccgctaagcttatagattactggaccaattcggtggaatgcaacaagattcttttaggtgagcgcggagtacccgtgtcgtctgttgtggcggacgctattgccgcagatatgagcgaatctgatcagaaggtggtcgattatattaataatgttgtaacgcccaagtgctctacggtcagcccggcttcgcctaacggagctacggaagtatatgatgttgtatataaaatgcaggagaagatctgctacgaggagatcactccggaagcggcggcagaggaactgttaaaacagggcaacaagatattacagagcaagcaatcataggaacgaaggggctgctgcaaaggagcggcagccctttctgcgcctgaaaacagcgaaaaacagtcagaatggcggtggttgatatggatcatatatggtttaaaataaagacagagttaaataagaacagtacggcaggcgttgtatttgcactgccatttgtcattggatttttgatgtttatggtagttcccatgggaatgtcgctgtattactcattttgtgaatttgaaatactgggggctccgaaattcattggtctgggcaattatctgaaaatgtttacggaggatgaaaccttctataaatcaatttcggtgacctttttttacgccttagtctcggttcctctgcgtctcatatttgcactgatggtagccatgattttgcagagaacgacgaaagcaaccggtttctaccgggcagcctattatcttccgtccatcatcggcggatcagtggcgatatcgattctgtggaagcggctgttcgcagaggacggcacgtttaaccgtattcttcagatcataggcgtcaacagtcatttttcctggctgggtaataaacataccgcgatctgggtcctgattattcttgcaatctggcagtttggttcctccatgcttatcttcctgtcggcattaaagcagataccgttttccctctatgaagcatcgcgggtagacggggcggggaagacaaaccagtttttccggattacactgcctcttttaacacctacgattttctttaacctggtgatgcagatgatcagcggctttctggcatttacgcagtgttttattattacgcagggaaggcccatgagttctacgcttttctacagtgtctacatgtaccagcagtcctttgaattttacaatacgggatatggcgccgccatggcgtgggttatgctgctcttgatctctgtcataaccttgttcctgttctggtcgaaaaagttttgggtgtatgaaggagggaactgaggcttatgaagagaaaacggatggtcgggaaaattgtgtatcatatactggtcagcatcggagcatttatcatggtatatccgctgctctggatggtgatgagttcttttaaggagacaaatacaatctttaccacggcaggtcagcttattccgaaggaatttacgctggagaattatagaaacggctggaaggggttcggaaaagtaaattttggcaccttttttaagaattcgtccctgatatcggttttagcaacagccggcaccatactgtcctctgcttttgtggcgtatagcttttcaagatgcagctttcgggggaaaaaactcctgttttccgcaatgctggtgtccatgatgcttccggcacaggttctgatgatcccgcagtatttatggtatcagaagctgggctgggtcggaacgtatcttccacttatcgtgccttactgctttgcggtccagggattctttgtttatctgattatgaattttattaatggtattccaacggagcttgacgaggcggccaagatcgatggctgttcctattattcgatatttttccgtattattctgccgctggtggtaccggcgcttattacagccggcatcttttcctttatctggagatgggaagactttctgtcaccgctgctgtatgtgaataaatcggaattataccccatcagcctggcgttgaagctgttttgtgatccggcttccacttcagactacggtgccatgttctccatgtcagtcctgtcgattttgccgctgatgattatttttatcctgcttcagcggtatctggtggagggaattgcttcctccggcattaagggataggtgaagtctatgaaccgggagagagaagcagaactgagacaatggatagatgcacatgaggaggaactggtccgggatatcaggaagctggtaagaatcccaagtgtctcgcggccggaacaggaacggtcagatgatacggtgaaagcggcgcactgcatgatggaaattgcggcacagtatggacttcatgcggagaattgtgaggactgctgtgtaaagatactttacggggctggggaaaacgaggtgcaggtatggggacatcttgacgtcgtgcccgccggtgagggctggatctatccaccgtgggagtgtacgaggaagggcgattttctgatcggaagaggtgtttcagataataagggggcggtaatcgcggtcctttactgcctcagatatctgaaggagcataacataaagccatgtttccgtattagtcagatctgcggcctgagcgaagaaacggggatggctgacgcagcctggtatctgacgaaatggccggcaccagattttgcatttgtatcggactgccgtttccctctgtgctatggagagaaaggcagatgtgtgctgactctgaagcgggactctgttccggacgtgattctggatatgtcagcgggtgaggcatccaacagtgtaccggcagaggccgtgatctgcattgaccgttccgctcatatgggagaccggaaggtggaggctttgcagctgggcatggacatgagagaagaactgtccggcaatacagtgcgctatacggtgaaaggcataccggggcacgcagcggcaccagaccgctgtgtaaaccccattggtctggcaggtatgctgctgaaagacggaagcgggctgaaaccggaggaaaagcattttctggaattttttcagacagcctgtctggatggatatggaaaaggactggggattgcctccagtgatccggtttttgagaagctgacgtgtgccggcactgttctggagatgaaaaacaggacggttaccctgacgatggatatcagatatcagccttcagtaaatgcggcggatatcgtgaagcaggtgcagaaaacagcgggactctatggatttgtactttctgccgaagaacatagagatggatactgcgacagcatcgattcggaggaggttaaggcgctgctgtccgcgtacgaccatgtggtaaaggacgggaaaaagccgtatgtgatgggaggcaatacctatgcgggaatgataccaaatgcggtttgttttggaccgggtattcccaaggactactctgaacttgaactgccggcagggcatggaggcggccatggctgtgatgaaattcaatcgatatccagtcttaagaaagcaatggaggtctacgtgcacgctttcatgaatctgaatgacttatatgaaaagaggagcagaaaagaagaaagggattgaaaaaaagaacataactgctataatgggactatacttcggtatggtcccacattattattcggaacatccacagcattactcttatcttttttattcagaaacagaatcattcatgacagattcccaacaggagaataaaatatgaggaacgagactattacggttctgctcagagcctttttaaccgatctcctatttccccgccgctgccccgtctgcggcgatatcgtgctgcccagaggagagctgatctgcccggcatgtgtgaaaaaactgtcttttgtgaagcagcctgtctgcaagaagtgcggaaaggagatatccagtgccgagagggagtactgtctcgactgtacgaagcataagcgttccttcgattatgggcgggcactgctaaattataatgacaccgcgaaaaaatccatggcagatatcaagtacagaaacaggcgggaatatcttgatttctatgcggaggcggtctgtctgcggtatgggactgctttgctgcggctgggagccgacgctctggtgccggttcctgtccatccgtcgcggcggcgtcagaggggattcaaccaggctgagatttttgcctgccggattggagccagactgggaattccggtgcgtacagagctgctggtgcgcagtaagaagactgcgccgcagaaacagttaaatccaaaggaacggcttcataatcttgaggaggcgttcacggcgggagaggtacccgaaggggtaaggcgggtgattctggtggatgatatctatacgaccggaagcacgatcgaggcgtgcaccagggctcttttgcgggcgggggtgaaaaatgtctattttattgcgatttgtattggacggggacagtaaaatattgtaatataggaaaagaaattagaaacgcaggaggaactgtttatggaaatcagaattgcacaggaggaggatgttccttatcttctggatatatataactatgaggtgctgcacggggaggcgaccttcgatatcaatccaaggacgctgtcggagcgtctcgactggtactatgcccataacataagcaatcatcccctgattgtggcggtggaagacggccatgccgttggctatgccagcctgtctccctatcgtgtgaaggaagcctacgcggcaaccgtggagctgtcggtctatgttcacagagattaccggaagcgcggaattgccaggaagctgacgctgcatatattgaatatggccagggaggatgaacgcatccataccgttatttccgtgattaccggcggaaaccaggccagcatccatctgcacgaggaactgggatttctgcactgtgggacgatcaaagaagtgggcgtgaagtttggaaagtatctggatattgagaattatcagatgatggtgtaagacagggaaatacggtgcagcgcttttgaaaataacaggtaatggcagcggaagcgccggtctgaaaatggccggtgcttttccattataaataattgtaaaaaacacttgacccttcccttacgtcaccctgtataatggtaacataaagatcccagagcaaaggtggtgatgcagaagatgcaagggtattatacgtccggagaattcgcaaaaaaggcaaatgtatcgatccggaccatccgttattacgataaacagggcctgcttaaaccagctggtatgagcgaggcgggataccggttatatacggattccgatttcgcaaagcttcagaagatactttctctcaaatatctgggcttctccttagacgagattcgttcaatcaccatcaatgatgatgacaacggctatgtggagcagtctctggagcttcagctggatctggtgaagaagcggattgagcatttgaagctggtagagcagactctctcggagacctcgaagctggtaaaggacaatccggttatagactggaataaaatcctgcacttaatccatattaccaatatggaaaagagtctggtggagcagtacaagaacgcggccaacttaagcatcaggatcgatcttcacaggaaatatgccaggaaccccatgggctggtttccgtggctgtactcccagctggatttaaaagacggtgaaacggttttggagacaggctgcgggaacggagaactgtggagagagaaccgggacttaattcccccggatgcggttatctgcctgtctgatgtctcggagggaatgatacaggacgccagggaacatctaaagggagtgcccggaagattttcctatgaagtctttgactgctgcaggattcccaaggcggaggagagctttgataaggtctcagccaaccatgtactgttctatttaaaggacttggacggtgcgctggaggaggtgcggcgggtgctgaagccggacggaacatttttctgcagcacttatggccgggaacacatgaaggagatcagccagctggtgaaggagtttgattcgcggatcgtgctgtcggaagtgaatttatacgatgcgtttggtcttgaaaacggccgtgagatactgaaacgccattttggcagggtggaagagatcctttatgaggaccatttagaagtccgggacgagggaccgctgatggagtatattctctcctgtcatggcaatcagcaggagtatttgagtgagcggtacgatgaattccgggactttttaaagaaaaagatcgagaaaaaagggacgctttttgttaccaagagagccggtatctttcgatgccggaagaactgaaaccgaagaaacaaaacgcgggacagattttgtaaaatataaaatacggaggaacacactatgaagggaattatcctcgccggaggctccggcacaagactttacccgttgaccatggtcacatcgaagcagcttctgccgatctatgacaaacccatgatctactatccgctgtccgttctgatgaacgcgggaatcagagatattctgatcatctccactccggacgacacaccgcggttcgaggcgctcttagggagcggaagccagttcggaatccgtttatcctacgccgttcagccgtcaccggatggactggcccaggcgtttatcatcggcgaggaatttatcggggatgataatgtagccatgattctgggcgacaacatctttgcgggacacggcctgacaaaacggcttctggcggctgccaataagaaagagggcgctaccgtattcggatattatgtggacgatccggaacggttcggcatcgtggaatttgattccaacggaaaggctatttccatcgaggagaagccggagcatccgaagagcaactactgcgtgaccggactctatttctacgataataaggtggtggagtatgcaaagaatttaaagccttccgcccgaggcgagctggaaattaccgatttgaaccggatctatctggaagagggaagactggatgtggaacttctcggacagggctttacctggctcgacacaggaacccacgaatccctggcggacgccaccaactttgtccgcaccatggagacccatcagcacaggaaagtggcgtgcctggaggagatcgcgtatctcaatcactggattaccagagaccagctcttagaagatatcgaaccactgaagaagaaccagtatggccattatctcatggatgttctggccggcaaatatattgatattaagtaaacagacagagtgataaaataaaggaaaaacaggaggaattcacacatgaaaatcatcgttacaggaggcgcaggcttcattggaggcaacttcgtccatcacatggtaaacaaatacccggattacgagatcatcaacttagacttactgacttacgcaggcaacttggagaccctaaagccggtagaggacaagccgaattacaagtttgtgaaaggtgatatcgcggaccgtaagttcatctttgacttatttgaaaaagaaaaaccggacgtgatcgtcaatttcgcggcggagagccatgtggaccgatccatcaccgatccggagagcttcgtgagaacgaatgtcatgggaaccaccaccctgctcgacgcctgccgggagtttggaattaagagataccatcaggtatccaccgacgaggtgtacggcgaccttccgttagaccgcccggacttattcttcacagaggagactccgcttcacacctccagtccatactcttcatccaaggcgagcgccgatttattcgtactcgcttaccacaggaccttcggactgccggtcactatctcaagatgctccaataactacggaccctaccatttcccggagaaactgattccgctgatcatcagccgtgcgctggcagatgaggagcttccggtctatggaaccggcgagaatgtccgtgactggctccatgttgcggatcactgcgaggccattgatttaattatccataaaggcagggaaggcgaaatttacaacgtcggcggccacaatgagagaacgaacctggaagtggtaaagacgatcttaaaggcattagacaagccggaaagcttaatcaagtatgtctccgaccgcccaggccatgacagacgctacgccatcgacccgaaaaaactggagacagagctgggatggaagccgaaatatacctttgacacgggaattgagcagaccattcagtggtatctggacaatgaagactggtggaagcacatcatcaacggagagtaccagaattacttcgaaaatatgtatggagaccgtttataatatgccgttccggctgacgcgatggaggtatctatgagagtttttgtaacaggagtaaaaggccagctgggccacgatgtggttgatgagctggaaaagagaggtcacgaggcgatcggtgtggacatcgacgagatggacattacggatgccgaaagcgtaaaccgtgttatccgggaagccgctccggaggcggtaatccactgtgcggcttatacggcggtagatgcggcggaggacaatttagagctttgcagacgcgtcaatgcatacggcacggaaaacattgccaaggtatgccgggagctggatatcaagatgatgtacatcagcacggattacgtgtttaacggccagggcacccgtccctgggagccggatgatgagagagaaccgttaaacgtctacgggctgacaaaatatgagggagagctggccatcgaggagaatcttaccaaatattttactgtgcggatcgcctgggtgttcggcgtaaacggcaggaatttcataaagaccatgctgaatctgggaaagacccacgataagatcactgtggtatccgatcagatcggttcccctacctatacctacgatcttgcccgcctgctggtggatatgatagagaccgacaggtatggccgctaccatgccacaaacgagggactgtgcagctggtgcgattttgcaaaagaaatatttaagcaggcgggcatgaaggtagaagtggtaccggtcacgtctgaggaatatccgtccagggcgaaacggccgatgaacagccgcatgagcaaggataagctggaagcaaacggatttgagagactgccgtcctggcaggatgcactgggacggtatttgaaagaaattcagtaacaggtgtataaaccatacaaaaacaggattctctgatgcagtaatcggagaatcctgttttgatcttacaggagagtgttcccgcgaagtatcagtgctcttttctgtattcactgggagtcatatagtaaaatttcttaaagaaccgtatatagcttctcacgtcactgtagcctacggcttcgctgatccagctgatcgtctcttccgtatgcgtcagcagatccagcgacttctgggtgcggtgatagtttaaatactccgacaacgtctttccggtagacagcttgaacagcttcgtcaaatagatggaactgactcccacgaagccggcaatctgtggaatggtgatgggctgtgaataattcagttcgatatactggaccgccttctgtatgtatccgtaggattccgtggaaatcttgttttttgcatccagcatcccgaacagacagctgcaaaaatgcttgttgatttcgtcaacggtggaggcgttttccagtttgcgcacagatgcgttcatctgaatgtcgggaatatccccgttcatctccaaaagcgaggcatagatggtgcagaccgtaataagggccagacgcttcacttcctcctcgtccccgttctctaaatagcggtttcggaaagcgtcggtatgctcctttaagccggtgccgtttttatcgatgatggcctgcgtaatatgagatacgatatcctgatcaatggaggaggtgaactcgttctggtagctgaacaggacgaagtcatcggcatccgcagccgtgaagataaaattgtgccgtgccagctgccatacctgccacggagccggttccgtctcggagcagatgccgatggaaaacagcggatagacactgagagtctgcttcatccgtttcttcagtgcggtgcacagtctggaaagctccttcgacagcgtatcggacagcccggtgtttaagataatgcagatgcttttgttgtcaatatagaggctgtaggcggtgccaagggcggaaaaggcatttgtggtattggttctgatgaccagctttaactgttcccgtctcgtatagtcctccatctgatcgagagagggaagagaaatcaggataacagcgtaatacgggaacggaaacaggagcccgtgttcctcatattccggcggaagactggtgatatccacatagttatagaggatgccggagagcagacgttcccggaccagctgttggttttcatgcatgacggtcccgatgtcagacagctgtgcattcagattgtcgagagcggtgctgatcagtgaaaattcatcctcccggactcccggtatctccgtgtagggattgatcccgatcttcttcataatcgcatccaccgggcgcagcatgatcatgccgtaaaccatggaggcggcaaagtcagccgccgctgcggccagatagatcaaaaaccactgcaggagcgtggcgcttaccgcagtcagaagttccagcttcgacgcgtggaaggaacatctggctccgatcgtggaaaaggaggaaaaggcggtggtgccgggcagcagaaggccttcgttttcggaggcagtcagcccgttagcccagttcttcatgactgcgtcagaggaggaccagagcagatggtcctggaagcagaccgtagccgtgtagggggtgtagcccgcggcctctgcggccgctttctgaagccggccaagagagtaggagacggttacatatcccctcccctgcgatttgtacaggggaagcctgcgcgcataagtaattacggcaactgccggatcagggctgtagtagcgcttatagggaacgttaatcagccacatctcttcgcccttcatattctcaagggtttcaatcagttctttgtcatagaagtcatcataatcatacattccgccgctggaatcaaagattctttgagaccggttgaaaaagaggcagatggactcgtaatgatacagagtggaataaggcgttacatcgttggtcatgcgtaccagctgatccagcgtaggtgatttcgcttccagaacccgttcgatggacgccagatttcccataaataccgcgctgtttttcatgtttgataaattatcctggactgacagcgcgacataatttgccttcatctccagattctcatgcagcttcatccggttttgaagcgtgattaccacgccgccaatgataaagataatggtagtaaacagaaatgtgataaagaaaaatgaacggaaatgcctggatttcagaatgtttttccatttgctgtccctggtgtttttgtgcttaattcccaatggtcccatcctttccaatgattagttatatccaattataacaaaaaaggcactgacagtcaaaaggttttgtacgaaatgagcataaagtgttttgctgtatggtaaaaaataaaacagaacttagatataatgtacaaaaacaatagcaaaaaatcaacttaattggtaaaaaagcagatgaatttttgctattctccttgaaaacagggtaaatgtgacggattgtgaaaaaagagacgaaataggattaattcttgtacttattttcgtacaatgttctggtatagttttgtcataaagcacgataaggagggagaaggttggggaaagcagctgtacgtaaaaatgggaaggtgaggaacggaccgggtatccggacctatatatggaaacacaaatatctgtatctgatgctggtaccggcgattgtctattatattattttctgctacgtaccgatgtacggggtgacgatcgcatttaaggattttaatccgatgaaaggaatatggaagagctcatgggtcggctttgagacgtttcagaagctgttttccatggagaaattctattctgtattctggaataccataagaatcagtctgatccgtctggtctttggttttccgtttccgattattatcgcactgatgttaaatgaattgcggcatgtgcggatgaagaaagtgattcagacagccatctacatacccaattttatctcgtgggtggtacttggcggaatcctgacaagcatcctgtccatggattcaggaattgtcaacggagtgattcaggggctgggctttcagcccatcggatttctgacagatgaaaagtttttcgttcctaccatggtggtatccatgatctggaagaccttcggctggaataccattatctatctggcggccatcacgggcatcgatacccagctgtatgaggcggctaccgtagatggggccaaccggtggcagaaactcgtacatattaccgttccgtgtatccgttccatcattattgtcattctgatcaccaggatcggaagcctgatgcaggccggattcgagcagatattcgttctctaccatccgggtgtatacggaactgcggatattatcgatacatatgtataccggatgggccttcaggatggcaaattcgagctggctacggcagtgggattatttaaatccgtcattaatttctgtctggtagtggctgcaaacaagattgcaagaatgtcgggagaggagggaatctactgatgctcagatcaaaaaaacaggaagcgggaagccatatcaaagcgtccgtcggcagtaaagttttcgatgctgtcaacgtgacactgctggttttacttgcactgacgaccttttatcccttctgggactgtatggtggtatccttttcctcgctgaaaagttatctggccaccaatatccatctgtggccttccgagtggtcgctggacggctatgcctacatggttaagagtgcggagctctggacctcctacgccaacagtattttcattacggttgtgggaactctgatcaatatgatgattacgaccatggcggcctacgtgctgtcaaaaaaagatctgaagggacagcggtttttcatgttcatggcggtatttaccatgatgttctccggcggaattattccgacttatatcgtggtcaaggacctccatctgatgaattccctgtggtccatgatccttccgtcagcgatcaatacgtataacctgatcattctgcgcaatttcttcatggatttaccgctggagctggaagaggcagccctgctggacggctgcacggaggtgggagtactgttccggattatgcttcccatctcaaaacccgcactgacgacagttacacttttttatgcagtagatcactggaatgacttcttttcagcaattatgtatatcaacagcaaacaggcgtggccgctgcagctgtttctgcgctccatgctgtttcagaacgatgccgcgtattccagcggaggagagagtctgttccttttgggacagccgatgaagatggcggcggttatgatggcaattataccgatcatgtgtgcatatccatttttccagaaatattttacgaccggcatgacggccggcgccgtaaaaggataacgagactgagacacacgggaaaggtaaaacagcagcatctatagaaaggaaagagagggaaaaaaatgaaaaaaagacaggtaatgagtttggtactggcaggggttatggcggtctctttaactgcctgcggcggaggaaccgggggaacagctgataaggcggaatccggacagacggaggcaggaaaagccgaggcttcttccaaatccggggagagcataccgcttcgctggctgacgacgggcgacgcggcggcaaaggcgatcaaagctgatgacagaatagtggcagccatcaatgaaaagctgggaatcaatctgactgtggagattgtaccggaggcaaatacggaaaaagtcaacgtggccatggcttccggagattttccggatgtggttacgggtgcctatggaaccagtgctacacagcagtggattgatgacggtatggttattccgctcaatgattactttgagacaatgcccaatataaaaacgtggctggaggatgagtatcagtggtcggccatcgacggaaagtattacggactgccgtttatcacccagtacaatgcggcaaatgccctgatcatattccggcaggactggctggataatcttggactggagtatccgaagacactggatgacatgaaaaatgtgctgaccgcatttacaaacaacgatccggacggcaacggaaagaacgatacatacggatataccgcagaaaaaccgagcagtaccagcggagttacgccgtttgactgggtatttttcgcctacggccttccatatgccgattattctctgaatgaaaacggagagattattccattttttgaagatccatcctttattcctgccatgcattatatcaaggatttgtgggattcgaaggtagttgatccggaactgatgctgaatgaccagtcgaagaaggaagagaaattctatcagggaaagagcggagccatgcttgcacctctgttccgccacgtaacgcgtcatgaaaacagcgtaaaagaactgtatcccgatgcttccatcagctacggacttcctccggaagggccgagtggcgcaagaggactgaacaaacagggaaaaaacggcatgatgacctgtatcaccacagcgtgcaagaaccaggacaaagcggctgcgtttatcgattttatggtctccaaagaaggcaatgacttactgagacttggtatagagggaatccactatacaaaggatggcgacacgatcatatttaatgaggaagagcgggcaaaagatgcatttgcagatgacggctgggcacacgcattggcatggggctccttctactggccgttagagagcggatatattccggtatctgatccaaaccgggagcgcgcgctggagaccgtcgagttagccacggaatgccagatgccaaacttaatcaaacagaagactccggcggagatcgagaacggctctgcggtgaacgacgtgtttatccagtatttctccgatatgcttcagggcaagatatccattgaggatggtgtggtatcacttggaaaagagtggagaaatcagggcggagacgaaatcttaaaggaagtaagcgaagtgttcaagacagaaaaataggtggaatgtatgagaaagaaaccaaatatactctttatacttactgatgatcagggggcctgggcgatgcattgctcgggcacccccgagctttataccccgaatctggacagaatcgccgcttcggggatgcgttttgacaactttttctgtgcctcgccggtctgctcaccagccagggcgtcgcttctcaccggtaagattccgtcgggccacggcgtcctggactggatcagaagcggaagcgtggacgcggataaatttgccgctcagggaagggaaaacccttatgcggatggttacaaaaatgagaggaagcccatcgcctacttagaagggcagaccacctatacagacattctggcagaagaagggtatcactgtgccctggccggtaaatggcatctgggggacagcgtgacgccccagcacggatttgaaaaatggtataccatcggccttggcggctgctgttattatcacccggatatagtggatcacggggagattacggtggagcatgggaaatacgtgacggagctctttgccgataaggctctggactacttagatgagctggcggagagcgaagagcccttctacctggccgtcaactttactgcgccccacgccccatggggaaaggagcaccatccggccaaatggattgattattacgagaactgtgactttgcctccatcccggatatcccggaccatcccgatctgctgaccgggccggtctatggcacggaaaagagaaaggagaatctgcgggggtattttgccgccgtaagcgccatggacgaacaggtgggcaggattctggatgctctggaagagaggcatttgacagaggacacgatagtgatcttctccgccgataatgggatgagcatgggacagcacggaatctggggaaaggggaacggaacctttcccatgaatatgtacgaatcagcagtgaaagtgccgtttatcatatcctggccttgctttattaagccggggagtgtatgctgtgaattagtaagcgcatacgatttattcccaacgctgctggaactgacgggactgtccggccgcttcccggaaggccttcctgggaagagcttctgcggactgctttcggggaaggaagagacgcggaccggggaaatcgtcatttttgacgagtatgggccggtgcggatgatccgggacagggaatggaaatatattcacagatacccctatggagcgcacgagctgtatcatcttaccgatgacccgggggagacgagaaatctttatggcatgccggagtacgaagcgaaggttctggagcttaaaaagcggatggaaacctggttcctcaagtatgcggatcctgctgttgacggggtgagagaaggcgtcaccggctcgggacagctgtgcagacccggtatttatgctgtacgtacagatgtatatggcccggtggggacgtaaagccagtgcagcaccaccaaaaaacggaggagaagaatgatggcagtacaaccgaatttcttatttatctttatggacgatatgggctggcgggatctggcctgtaccggaagcacgttttatgagacgccgaatatcgaccggctgtgcaggcagggaatggtgtttgccaattcctatgcctcctgcccggtatgctctccgtcgagagccagctgtttaaccggaaaatatccggccaggctgggtgtgacggactggattgacatggaaggaacgtcccaccccttaaaggggaaactgatcgacgccccgtacatcaagcatctgccggagggggaatatacgatcgcccaggcattaaaggatgcgggatacgatacgtggcatgtgggaaaatggcatctgggcggaagagagttttacccggaacatttcggctttgatgtcaatataggcggctgttcctggggccatccccatgacgggtacttcagtccctatggaatcgagacgctttctgagggaccggaaggagagtatttaacagacaggatcacagatgaggcggtccgtctgctgagaaaacggcaggcctgcggcagcaggaagccattttacatgaacttgtgccattatgccgtacataccccgattcaggttaaggatgaggaccgggcgcgttttgaaaagaaggcgagagaactggggctcgataaggagacggctctggtggaaggcgaattccaccatacagaggataagaagggccgccgggtggtcagaagagtgatccagtcggacccgtcctacgcgggaatgatctggaatctggatcaaaatatcggacgattgctggaggcgcttcgggagtgcggggaagaggagaataccgtggtcgtatttacctctgacaacggcggattagccacaagcgagggctcgcctacctgtaatctgcccgcttcggagggaaagggctgggtctatgagggaggtaccagagttccgctgattgtaaagtatccgggccgtgtggctccggggagcagatgcgacgtaccggtgactacccctgatttctatcctacattcctggaactggcgggcgtaccgcaaaaagcaggaattcccatagatggaagaagcatcgtgccgctgctgtctggaaatcccatgcctgaaagaccgattttctggcactaccctcactatggaaatcaaggcggaacccctgcttcctcggtggttatgggagactataaatatattgagttctttgaggatggccgcggagaactctacgatctgaaagcggatttcagcgagacgaataatctctgtgaaaagatgccggagacggctgcacggctccggatgcttcttcatggctggcagcgggaggtctgtgcccgttttccggaagagaatgcggaatatgtgcagatgtgatgaaaaggcttaaaaaaaataagcgaggattcatgggttcaaaatgtggattgaaataaaagaagaggattgacagatgaggcgtgataagaattaccagataaaactgatgagtgctctgacgaaagtatggccgggacaggagccggaagaagacccgtgctacagcgtttttacgatgctgcgtggggagacattcagctttgtggcagcatatacctgcggcggtgaaggaaattcagccgcggtggtaagggtggaatcaccggtggagcaatactgccgcatcagagagatcgttccggttccatccatacgcccggtaaacagccgtgtggacagcaattacctgtgcacccggccgggaatgtatccggatctgctgacggaaccggctggcggttgtgtcacatttacaccgggacagtttaaaagcctgtggattgatatggagattccggaaaacggtccgtatgggaaatttccttttgcggtagtattcgtatcgccggagggggaggaactgtgccggagggaaacctccatacaggtgtatcagacagttcttggaccgcagcggctcattcatacggagtggtttcatggagactgtcttgccgattattaccgggtgcctgtgttttctgaagaacactggaagatcatggagaattttatcgcggctgccgcagccagaggctgcaatatgatcctgactccgcagttcaccccgcctctcgacacggcgcccggcggagatcggaccacgattcagctggtgggagtaaacgtgcttccgaatggcggctatgaatttaactttgccaggctggagcgctgggtcaccatgtgcctgtcctgcggcatggtctattttgagatgtcccacctcttcacccagtggggagccggtcatcctccgaagatcatggccgaagagaacgggaaggagataaaattgttcggctgggaggacccggccgtaggaggacgctatacccgctttctggaagcctatcttccgaaactgacggaaaaactgcgggaattgggaattgccggggttaccagatttcacatatcggatgagccggaaccgcagcaccttttgtcctataagcaggcgagagaatccgttgcgccttacttaaaggatttcgtgatcatggatgccgtctccagccttgatatctgccgggaaggtgagattgactgcccggtgtgttccagcgaccatatcgaaccgtttctggaggcaggggtaacgcctctgtggagttactactgtacggcacaggatttcctggtcagcaaccgatttatggccatgccgtccgccagatgccggatatacggtgcacagatctttcgatatgccatggaaggaatccttcactgggggtacaatttttacaattcccagtactccttaacgaagctggatccctaccgttccacagatgccgacggagcctttccgtccggagattcgtttctggtgtatccgggagcggacggaaaaccggaggaatctgtccgcatgatggtcatgtgccatacgatgcaggacgtgagagccatggagcagctggcggaaaagaaggggagagagtacgttatttccatgctggaagaagatctggcggaaccgatcacgtttaagcagtatccgaagtcggagttctggatgattcagatgagaaaccggattaacagggaactggaagaagcataaatgagatacagatgtccttctgccttcgtatattataaataaaaaatcagcccgccgcgggaactttccttatataaaggagtcctgcaggcgggctgtttttgttgtattactgaagcataatcttgataatctctttatctgtctgtttcataccttcttttccgatatatcccacgcagctgatggtttcacccgcgtcctcctgaaggatgccgctgtccggctggtaggctttattattcatggcgagatagtgagccatcatggctgcatccaggctcgtggcgatcttggcggcacaggagatcttggcgccgtcgcagataatgccgggaatattggccagaacattaccaatggtattcttaatctgttccagcgttccgcctactaagtaggtgatggcggctcccgatgcacaggaagcggatacggcgccgcagaaggccgacagcttcccgataaattccttctggtagattgtcagcagactggaaaatgcgagggcgcggtataagcgctcctggcagatattgttctcccgggcgtagacgatcaccggaacggaggaagcgatcccctgattcccacttccggaattgatgataaccggcatgtcacagccacccatcctcgcctctgatccggctgctgcataggccttcatacggacagccacaccatccggataggattccttgataatctttccaatgcccagaccgtagtttccggccatgccttcataggcaatgttcatattatgaatgatgacacggtcaagcagctcgtggatatccttaagcggcacctgatccgcaaaatccttgatattatcgacggagagcagactgcggtccgccagactgcatcccccttccatatggtcggagctgaaaagtacttcgccgtctttggtgattttggtgatgttggtgtgatcataacgaacctccagcgtcaccacggaagcatccttatgcagttccagaatgatgtgcagcggaatctcggaatctaaatattccacggtacagaccccgtctttcagcatggcagatgcggtcttcctgtcctcatcggttaagtcttctaaaacttccatacatttcgaggcattgcctccgacaattccaagcatgacgccggcttcgatgccaaccatatgttccgagttgggaatcgtgacgcaccggacatttttaatcatgttgccgctgcagtgagcgatgactctgtcgggcagacagcccagcacttctcttgccctggcgccggcataggcgagcgcaatcggctcggtgcagcccatggcgggtatcagttcttcagccagaatctttagaaattcatcgtgtattctttggttcatcatgggtagtatacccctttcacttaatcataatggcggcatgtaaatcagacagaatccggtttttaaccctgccatgctgctccggactgatcccaccgattggcagctagcaatcggaacagtattatttatgttaataaaaatttatcaaataaccgggagaaagtcaatggttttgggcagattgtacagatctggttattgtaaaagaacaggcgtgctttttttattttcactgaccatataatattttctttagcaattggtaaaaatattgcataaacagtaaaaaagaaaaggagtaggcaaatggagaagaaactggatgtggtcatgttgatggaagagtatcgaaaatatctcgtttacaacgaaaaaagcaaatcaacaatcaacaaatatctgcgcgacgccggcaagtatcttcagttcctgaaaacccgtgaaggagcaggaaatgagataacgaaagaaagtaccatggactacaagatggaactaatggaaaagtataagcctgccagcgtaaattcctatttgacggcagtaaacagtttcctcacattttacgggaaaacagactgccacgtcaggcttttgaagattcaaaaacggatctttaccgatcagagccgggaattgaccaaggcagaatatatcaggctggtagagaccgcgcggtacgataaaaaggagaggctggcgctgatcatggaaaccatctgcggaacgggaatacggatcagtgaactgcaaaatataacggtggaatcgctgctgagcggatatgccagcgtctcatgcaagggaaaggaacgaatcatcttaattcctgtaaagctgaaagagaaactcagagaatactgcttcaagcatgagattcagtcaggaagcatctttattacccggtcgggaaaacccatagaccgcagcaatgtctggacggagatgaataagctgtgtgaaaaggcaaatatctcccacggtaaagtatttcctcataatatgcgtcacctgtttgcaagaacttattatggaaagcaaaaggatattgtgcatctggcggatattctggggcacagcagtattgaaacgacaaggatttatacgatgacgagcagctttgaatatgaaagacaattagaagaaatggatttaataatataaaaatacaacataatacacattatgttgtgacaattataccgctcgcagatttttatgtcaagatttttattcagtaaactacatattacacattatgttgtgataagcatacagcaacaaagtttcattgtcaatatacgaaacggcatttttttggaatctgtaaggctttgcggtaattcaaaatattaagatgaggtctgcgcattgacagcggcgtttattccggctcgaaaagtggccggaaaacaccacggcgcggccttttttactacatattgtgtaatatgttgtgaacctaataaagataatattttcttaaccaggttagaataccgacgcagacagtaagcgcaatattgcatcactgaggcggaggaatctgacaaatgagtaaaattgggagggaaaaaaccggactcctggacgatctgtggaaaaagactggctgcttgtatttatcggacttaaagcagccggcatggagggctgtctgctgttctgtcataagagagattcaggaggaggagtacacgctctgggaatggagcgacgcagcaagatatttaagtaatgcggacggggtaattgcgagtacaaaatttcaatcaaaagaagaggcaaagagagcaatcctgaagcccggtcaaccaacggggcccgatatccgctcaaagcagaagcaggaggagaaaaatgaaaggtaaaacatggaaacttgcagctgttacactggggcttggcatcagcgcggcggcagccgtctacgcgcagacaccgggctggaacttaactggagaagggtggcgctatctgtctgcggaaggacagtatcaggcggccggatggttccaggatacagacggacgctggtatcattttaaccagaacggaattatgcagaccggatggttccaggatactaatggtgtgtggtattttctggccaccgactcaggtgcgatgaaaaccggctggcatcaggatccagatggcaagtggtatttcctttcctacaatggtgcgatgcagactggcctgattaaagtagatcagaaagtatattttatggaaccaagcggagctctgtttgcaggagataaggaaattgacggagttgtctatcattttacggaaaatggaacggtgggatccgcaccgccagtttccactgcgcaggtatggtctggaaatggaaaccagaccagtagttcggacagcagttcatcgaaagaaaaaattcgggtgagagacgtagtggagagtgatatcagagacgctgtaaatcagacgagtgcaagcgaacatatcgtaagcgcctcggtcagcggacagagtatcagtgtgacgcctgtcgctgtttcgacaatggtggaaggacttccggcggcacagtctgtctttggagtatttctgtcttccggatatatcaacgaagtaacgatcagcggtcccggaggaagtgcggtggttcatgatacgagcgatctggtgggagcggccagaagtctgggatttttgggaagcggaagcttttcccaggccagaggttcctacacggtgacggtatcctattccggaacactcgattatggctatgaagacggaaccctgttatattccgttacagtcaattgagtgatgaaatattgtgatgattcgcggatataaatttttaacacttatccttttatcgttttttttgtcgtttttattttttctgataacaccgtcggccagctatgccgcagggttaaatgccagtgagcaggagctggtggcaaaggcaaaggagacatttgaatggaacggaaaaaaataccgggctaaacagacctatcttgatcagctgactgcgtatttaagcagggatgatgtggatttgagcgcagatacctgcgctgctgctgccaaagagatgtatggcagtgtggaacgcggcgtgatggaaggctatctctatgaagtgaacagcaacagcagtgggaagcagtcagacggggatccggttacagcctctgaaacagcttctcaggaagaaaaaagagcagaacaggaatctccttcggaagaaatcctggaagagaaagaaagtgcttccgtcgtgttccaggtgccgcgcggcattgtgccggatgagggctggaaccacaaatacgaaacagatatcggacagaccggggaagccagcctcactgagccgagctcgtggctgagcctgctgaatccgtctttttaccgccttcttatgatttttgaatccgtctgtactgtgcttttatcaatggctctggccgtaaccgtccgaggacggagactgagacaccggcgaaagatcagaaaagtgatgcagacggcagtgatttttatgacagctgcagcatgtctcctgtcaggaatgtatgccgcgctgcgtgtgggaactttttccgaacaggcggtaatgaatcagatcgaaaagacctcctggtaccagacggtttatgacgatatgaaacgggagacggttatgaccatgtatctcgccggagtgccggaaaacaagctggagaactctgaggttgaggacacggtaaagtattctaatgtagtactgacggccaggcaatatatgaaggcaacacttgagggcgattcacagactcctgtactgtccggcgtttttgaaacattccggacttctgtaatggagtattatgaaaaaaaagatccgggctcagaagcagtcaggacaggagtccggaatcttctggaaggtctggaagcacgctgtgtgaaacagatgaactgggccggtatggagtggtggcgcggcaagacacagggattcctgctttggtttcccgctttactgggcggcgccgttctggtagctgggctgggaaccgcggaactgatctgtctgagccgctccagttaccgggcggtaaagagaatcggaggcagtcttgccggaggttttatcagcctggtaaacatcggacttctgattggaagatttggcggaaccgggactgcttgggcaaaaccctcttacatgaaagaatttgtccgaaatatgtcagtccaggccgcatacagtgtccttatgatcggaatcataggctgttgtcttgcagttatgactttctatatatccagatgtatcaagtaccaaagatgaaatgggagaggatggcatgagcggaatgagaaaaagaaaaaacagagataagaatgattatcaagatcgtttcgggggggggggtaaaaatgcccttcaacctgtttgatcttcattgtcatctgctctatggcgtagatgatggcgccatctctttagaggaatctctgcgtgctgttcggattgcgtgcgaggaaggaatccgccatattgtttttacccctcattatacaccgggaaagctgtccggggagaaggaagttatattgagacggatgaaagagatcagggaagctgctgaaaatgcagggattgaggggatcaagtattactgcggcaatgaagtactctatgtttccggcgtggaggagctgctgaagcagggggagatcttaacaattgcagataccaagtacgtgcttctggaattctatcagggggtaagataccaggatatgtttcaggggctttctcacgttgtgcggacgggatttattccggtgctggcgcatgtggaacgttataactgcctgtaccccaaattagacagaattgaggaactgcgggatctgggtatcgtaattcagatgaacacagagtgcctgatgcctcagattccgagtgtgcggctgctctggtacaggaacttaatgaaagccggctatgtgcagctgatttccacggatgcacacggtgcggacaacaagccgccgcgtataaaacgggcggtggaatggatggagcggcactgcgattgcagcctcgttgagcgggtgctttacgaaaatccggccagagtactggaggaccggatactataagaattgcagagggagaacaatgaaagatacaagagatgatgagatagagattgatttacttcagcttttctgggtaatgaagagaaggctgtggattatgattctggcggttgttgtcggggcggcggcggccatgttatataccacgaccctggtggaaccggtttatacctcctcaactatgatttacatattaaataaaacgaataacattacatccctgtcagatcttcagctgggaacacagctgacaaaggattacaaagtgctggtaaccagccgcccggttcttgagcaggtgacggaaaacctgggattaaacctgggatatcagcagttaaatggaaaaattacggtcaacaatccaaccgatacaagaattctgactatttcagccaaagatacaaatccagaaaccgccagggctattgccgatgaggtggcatctgtttctgtggcacgcattgccgaaattatggactcagtgcccccgaaaattgtagaaacgggaaatcttccgaccgcgccttccagcccgaatgtgaaaaagaatacggtactcggaggtctggcggccggaatcgctgcagccggcattatcattctgctgtatctgatgaacgatagtatccgaaatgccggagatatagaacgttatcttgatctgaatactctgggccagataccggaatttgaagaaaatgaacgaagaaaaaagaaaaagagcagatggggcagaagggcggtggagtagatgcagaaagtagagtttaagaagttgccgcggctggatttccgtgccaacgaagcgtttaaaaccctgagaaccaatatcacgttctgtggagatgctcagcgggtcatcctgtttaccagtacgattcccaatgaggggaaaacatcagtcgtatttcagctggcccgatcctttgcggaggatgggaagcgggtgcttcttctggacgcagatatgcgcaaatccgtattgatgggccattaccgggttgatcaggagacaagaggactgagccattatctcgtaggtcaggaatctgctgagaacgttgcatatcggactaatattgataatatggacgtaattttcgccggtccttctacgccaaatccggcagagcttctgggaaatgcaaaatttgaagagatgctccgcggcgcgcgcgaacattatgattacgttctgattgattcccctcctttaggcagtgtcatcgacgcggccattattgcgagaaatgtggatggggcagttatcgttgtggagagcggagtaatcagttataagatggttcaaaaggtaaaggggcagctggaaaagagcggatgccggattctgggagcggttcttaataaggtgaaccaggagagtaagggatactacggtgggtattacagtaaatactatggtaaaaattacgtaaaatactccggatacggatccggtgggagcagcggtaaagcagagaaaagtgaagaaaaaacagaaatgaaaacggcagctgccggcggcgaagagaatcaggtaaaacgttccagacggcgcaagtaggatacgaaagggaaaaaatgataaagacacgtattatagcaaataaatggtttcgttcgttactatttcttatctatgacatctgtatgattcagatctgctcatttttagctctttggatccggtttgatttgtctgcaaaatccataccctcacaatatataagcgcggtcacatcatacagcgtgattttgacggtcacaaccgttctggtgttcacgatatttcgcctgtattccattatgtggagcagcgccgggattgtcgaactggaatccattgttgcggcctgtggcgtaacgtttattcttcagatcattggtatgaaattcctgaacattgaagtaccgagaagctatcacatattatggcttttgtttatgacatcagttgttgggatcagccggatgagctaccgggcgctgcggatggcagggcggcatctgggaagaaaacgtgaggatgcggtgcggattatgatcgtcggcggcggccaggcgggaactcttctgatcaaagaattaaacaacagcgaaaaagtaccggggattccagtctgtatcgttgatgatgaccgcaataaaaacggaaaatatattagcggagttccgatccgggggacgagggaggagatccctgagctggcagagaagtacaggattgatgagatttatattgcacttcccacggtaaccggtgtagagcggaagaaaatcctggaaatatgtcagcagacaaaatgcagtctgaagattcttcccgggctgtatcaattgatgagcggagaagtgagtatatccaaactccgggatgttgagattgatgatctgttaggaagagaaccgattaaggtcaatttagatgagattatgggatacgtaaaagacaaagtcgtcatggtgaccggaggcggcgggtcaatcggcagcgaactgtgcagacagctggccgggcacggggtaaagcgtctgataatctttgatatgtatgagaataacgcctatgaaatacagcaggaattaaagcggaactgtccggaactggatcttgtcacactgatcgggtcggtgagaaatacgaaccggctgaattcagtttttgaaacataccggccggacgtcgtataccatgctgcggcgcataagcatgttccgctgatggaggacagccctaacgaagcaataaaaaataatgtgataggcacgtataagactgccagggcggccatgaaatacggtacgaaacactttgtcctgatttctaccgacaaagcggttaatccgaccaatatcatgggggccagcaagcgcctctgtgaaatggtaattcagatgtgcaacagcaagagcagtacagaattcgtcgcggtgcggtttggcaacgttctgggaagcaatggaagcgtgatcccgttatttaaaaagcagatcgaaaatggcgggccggtcacagttacagatccggatattatccggtattttatgacgattcccgaggcggtaagcttggtgctgcaggccggggcttatgcgaagggcggagaaatctttgtccttaatatgggggaacccgtaaaaattctggatatggcagagaacctgatccggctgtccggatacgagccatataaagatattgacatcgtgtttacagggctgcgcccgggagaaaagatgtatgaagagcttttgatggcggaagaagggctgcaggggacgaagaacagccggatctttattgggaagccgattgagatggattatgggaaattcgaacagcagctgtcagaactggacgaggcggcatggaaggaaacctcggagatgagggatctggttcagaagattataccggagtatcattttagcagaacaaattccaattaactaaaatcgtcgctttgccgcgttttagtgtgtttggatgtcagaaggagttgttaagtatccgcctgtgagatgacggagtggcgaagcacgccctgagaatgtacctgacaatttagtctcagcgtctgtatgtttctgaaagtagaagccataaaaaataatggctttgatatgttgtggcagtggaatttgagggaataaagagatgtggtatgtgatacaagtgaggacagggctggaggaatccataagaatccagtgtgagaagttgatagacagacatgcaatggaacggtgcttcatcccatactgtgagaaaatgaagtgttactatgggaaatggcataaagagaaacagattctgtttccgggatatttatttgtagttagccaggatgtggaggcactgtttctggaactgaaccgtataattggactaacaaaactacttggtactggaaacatgattgtaccgttgacatccgaagaagaaagtgttttgaagcagattagcaatgatgatcaaatagttactatgtcgaaaggattaatagtaaataatcaggtgattatactggagggccctttaaaaggcagggagggatatatctgtaagatagacaggcataagcgaagggctcgactggaacttcatatgtttggaagaaaacagaatgtggagttgggattagaaattttagaaaaaagatagtaaatgtttccggggacagagaggagccgtagttactttgatttgtaatgaggaaagaggaatggaaaaggaatataagatatttgataaaaaaatatatttatcaagtcctaccaggcatgaagaaatgcgtacttatatgcttgaggcttacgatactaattggctttcaacagtaggggagaatatcaatgaagtggaacgacttacttgtgagaaggtagggtgtaggtatgcggttgctttatcgtcaggaacagccgcattacatatggcagtgaagctggctggtgtgaaaccggggactccctgcttttgttcagatttgacgtttgatgccactgtaaacccagttgtctacgaaggcggcgtaccagtctttattgatacggaatacgatacctggaatatggatccggttgctttggaaaaagcatttgaactttatccagcggttaaagtggtagtagcagcgcatctgtatggttctcctggaaaattggatgagattaagagaatctgcgaaaaacatcacgcaacgattattgaagatgctgccgaatcactgggggctgtttataaaggaattcagacaggatcatttggctgctttaatgcgatttcctttaacggaaataaaattattactggctctgcgggcggaatgctgttgactgatgataaggaatctgcagaaaaagtgcggaaatggtctactcagtccagagaaaatgcaccgtggtatcagcatgaggaattaggttataactatcgtatgagtaatgtcattgcaggtgtagttcgtggacagtatccgtatctggaagagcatatcgcgcagaagaaagcgatttatgaaagatataaagcaggattcagagatctgccagtgaccatgaatccatatgatgaaaaaaaatcggaaccaaatttctggctttcctgtatgctcataaatccagaagcaatgtgcaggcagctcagagatgatcaggcagcgttatatgttacggaagcaggcaaaacctgcccgacagaaattctggagacgcttgctaaatataatgtagagggacgaccaatctggaagccgatgcatatgcagccattttaccgaatgaatagatttataacaagagaaggtaacggaagggcaaaaaccaatgcctatatagctggcggagcaattggaaaggatggaagaccttccgacgttggaatggatatattcaatcggggattatgtctgccaagtgataataagatgactccggaccagcaagatattgtgatcgatataataagaggatgttttgaatgaaaaggctggcagaaagaactggaacaaaagtatttataaagaagaaacagggaatttatgccaggtttataaaaagaggaatggattttgtgctgtcattcatagcattggttattctttcacctctattactggttcttacaattgccggggcttttgcaatgggaggaaatcctttttttatacaggaacggcctggaaaagatgaaaaaatatttaaactgattaaattcagatcgatgactagtaaaaaaggaaaagatggaaaacttctgccagatgaacaaagattaactccatatgggaaatttcttagaaaaaccagtctggatgagttaccggaactttttaatattttggcaggacagcttgctgtgtgtggtccaagacctcttcttcagtcttatttactccgatacaatgattatcaaaaacaccgtcacgatgtacgtcctggtttaacgggatatgcacaggtacatggaagaaatgcagtttcctgggaagaaaagtttgatatggatgtagagtacgtgaatcatattactttttggggagatataaagattatactccagacggtgttgacagtattaaaacgagaaggaatttcttcagaatcatcagccacaatggaggaatttatgggaactcagagcaaatagaggaaaagtacagtgaatgaaaatgtaattgtaataggtgccggaggtcatggaaaagtaattgctgacattataaaaaagtccggtgacatggtgagtggttttttagatgacaatccgagtttgtctgatacatttatgggatatccgattttgggaagtacagatgtattcgaggattttaagaaatgtcaatttgtgatcgctataggggatgcagtaatacgcgaaaaaataacagagaagctagatggtgtgaaatggtatacagcgattcatccttcatctgtgatttcggacataggggtatctattggagaaggaactgttattatggcaaacgtggtaatcaatacgggaacaataattggaaagcattgcattattaattctggtgcaattattgaacatgataataaaattgatgattttgttcacgtctccgttggtgcaaaacttgccggtactgtaacgatagggaagggcacctggattggaattggagtcagtgtgagcaataacatttctatttgtgcagactgtatggttggagcaggcggagtggtgattagaaatattgagaaagcaggaacttatgttggtgtacctgtagagaggtcagatatgaaagaaaaatttaggggggggggggaaaataatctaataaatattatttcttacattccttctggattacatgtatctaaatacattgcaaatgggaggaatgtagcatgaagatattgtttaccagtataggaagacgggtagaactaatacaggctttccgagcggcagcagataaattaaacataggtttaacaattatcggagtggatatcacagacacagcaccagcattgtttttctgtgatgaaatgaggagggcgtgccgggttagtaaacctgaatatataccttggcttctttcgatttgtgagcaggaaaacgtggattgcctgattccaaccatagatacggatttgcttcttttggcagagaataaagaaaaatttgaagcttttggaacaaaagtattaattagtgcggtagataggataaaagtgagccgtgataagcgattgactgcagattatttcatttcacttgggcttaagtctcctctgcctgttgattcggtagagaggtatgcttctggttatcctgcatttattaagcctaaggatgggagctccagtataaatgcgtataaggctgaaagtatttatgatttgcaaaattatgcagaaaagattgaagattatattatccaaccgtttatttccggaagagaatatacaattgatattttctgcgattacgaaggaaatccagtgtatatcactccgagagagcgtcttgcagtaaggtcaggtgaagtactgaaaacacaaatatgtcaagatgaaaaaatgattgcggaaatgcaaacattaatagcagattacaaaccgtgtgggcagattacagtgcagttaataagggaagagaagacaggttatgattattacatagaaataaatccacgttttggaggcggttcacctcttagcataaaagcaggagcggatagtgcggaatcagtactgcggatgctgaatggagaaagactgcattatattgaaaaagctgcaaaaagcggagctgtttactgccgttttgatcaaagtatctgcatcaatgaggaaggaaaagatgttgggtggccagaaaattattaaaactacgaacattttggacacagtaaaatatatcgatggattgaaagcaattatatttgatatggatgatactctttatagtgaaaaggaatatatcaggagcggttatcggaaaatagcagaattatttcctcagattgaaggagcagatagacaattatggaatcttttcttggagggaaagcctgcgattgatgaattcttaaaacagcagaatcttttttctgatgaaaataaagaaaaatgtctgaccgcatatcgcttacaaaaaccagatattcatttatatccaggtgtcaaagcaatgttattggatttaagaaaaagatatctggtcggtctgattacagatggaagacctgagggacagtgggcaaagatcgtggcattgagaatagaacctttaatagatgaaatcatagtgacggatgaacttggtggtattaagtataggaaaccaaatgatgttgcatttcggttgatggcggatagaatgtgcatgagttttgaacaaatgtgctatataggcgataatgcccgaaaagattttatggcaccacaaaagttggggatgcggtgcatctgggttagaaatgaggacgggttatatgttcttggagggtaaaatacattaccgggagagtaaaggggaataataaagtgaatgtactttttttgtcattgattgattttgaatcattctcagatcggaatatttatagtgatttactgcgggaatttataaagaatggtcacaatgtatttagtatatctcctgttgagagacgcatcgggagagaaacttatatgatacaggaaggcagtagttgtattcttaggcttaaaattggcaatatacaaaaggtaaattcgatagaaaagggtatttcgacaattcttatagagccgttgtttatcaatggaattaaaaagtatttttctaatgtaaggtttgatttggtactttatgcaacgccgccgattacatttgctaaagtcattaagtttataaaaaaacgggatagagcaaagagttatcttatgctgaaagatatatttccacagaactcactggatttgggaatgctttctgcttttggtataaagggcttgatctatagatattttagacgaaaagaaaaggcgttatattttctttcagataccattggctgtatgtcccgggcgaattgtaactatatattaaggcacaatccagaagtggaatctgataaagttgagatatgccccaacagtatagaaccattagatttgagagtgtctgacgaagataagaatagactaagagaaatgtatgggctgccattggataagaaaatatttgtttatggcggtaatttggggagaccacaggacgttccatttatcattaactgtttaaaggcttgttcaaatataaaaaccgcttattttgttattgcaggaagtggaacggacagacactatcttgaggaatacatagaatcagaaaaaccacagcatgtgaaattatttggattctttcctaaggaagaatatgattctatgatagcatgttgtgacattgggctggtttttctggatcacaggtttaccatacctaattttccatcaaggttgttggcctatatgcaggcaggtttgcctgtactttgctgtacagataaaaatactgatgttggcaaagtggttgtaaatggcagatttggttggtggtgtccgagcgatgataagcggcaatttgtgagtactgttaaggaagctgtgaataaaaaagattaccggcaaatgggctattacggtttcttgtatttgaaaaataattttgcggctgatcttacatataaaatgataaaacatagaggagaaaattagcatgagtctttttacagataaaacattgatgattactggaggtactggttcttttgggaatgctgttttaaatcgttttttacaaactgatattggtgagatccgtattttttctcgtgatgaaaagaagcaggacgatatgcgccatgagtttcaggcaaaaatgccggaagcttctgaaaagattaaattttacataggtgatgtgcgagatttacagtctgtcaataacgctatgaatggtgttgactttatttttcacgcggcggcacttaaacaggttccctcatgtgaattctttcctgttgaagctgttaaaactaatattctggggacagaaaatgttcttaatgctgcgattgaagagggggttgaatcggtcatctgcctttctactgacaaagcggcctatccggttaacgctatgggaatttctaaagcgatggaagaaagagttgctgtggcaaagagccgtacatctaaaaagaccaaaatctgctgtacgcgttatggcaatgttatgtgcagtcgtggttctgttattcctctttggattgaccagattagaaatagtaacccaattacgctgacggaacctgaaatgactcgttttatcatgtcattggatgaagcagttgatttggttctgtttgcttttgagtacggcgagagtggtgatattctcgtacaaaaagcaccggcttgtacgattcagacgcaggcagaagctgtatgcgagttgtttggaggaaagaaagaggatattaaaattatcggcattcgtcatggagaaaaaatgtatgagactctgctgaccaacgaagaatgtgccattgctattgatatgggaaagttttatcgtgttccgtgtgataaacgcggtttaaattatgataaatactttagtcagggagatgctgagcgaaatccattaactgaatttaattctaacaatacacagcaattaacggttgatgagagtaagaaaaaaattgctgcccttgcttatattcaggaggaattggctaagatggggaaatagaaaaaagtatattgggagacggtatcgtatgaaggttctaatgattaattgtgtttgtggtattcggagtacgggcagaatttgtacagatctttctgaaattttagaaagttatggccacgaatgcagaatagtgtatggaagggaaactataccagaaaaatatcagcatattgcactcaaacttgatagtaacatagagataaaaattaatgctttgaaagccagaatttttgataatgaaggatttaatgccaaaaaagagactaaaaagttgattgaatatattgggaagtataaaccagatataattcatttgcataatttgcatggttactatctaaatgtagaattgctattggggtatcttgcagaacgtgatataccagtagtctatacaatgcatgattgttgggcgataactggacactgtgcacattttgctaaaattaaatgcgaaaagtggaaaacaggctgctttaactgtgcaataaaaaacgagtatcccgccagctttttaatggattcatcaaagaaaaattgggaaaagaagagagcattatttcaaaagcttaacaatataatcattgttacaccttctgaatggctagctaatattttaaagcaatcatatctcaaacatcagtcgattattgtgattccaaatggggttgatatggaagtatttcagccaacagaaagtgattttcgtaagaagtataagctggaaaataagcatattgttcttggtgtcgcaacagcatggaatgaacgtaagggattaaaagaatttatgcttttgcaaaaggaacttgatgattcctatcagcttgtgcttgttggacttacacaaaatcaaatacagaagttacctgatggcgtgatagggatagaaaggacaaacagtatgcaggaacttgcaggattatattcaacagccgatatttttgtaaatgcagggcaagaggagacaatggggttgactacagttgaagcaatggcatgcggaacaccggcggtagtatctgatttaactgctgtacctgaagtgattgattcggatggaggactaatttttacagattattctgttgaatgtatggcagagaagatccgttctgctgtaggtatgtcatttccttatacacgcagaagtgctatgaggtatgaaaaaaagagacaatatgaaaaatatttagaactttatgaaactatgattactcgctgaggtgatttatgagaattttagagatttgtgtagatttggatggtggtggaattgaccgttatttatataattattgcagtcgaattcaaggtattcagtttgactttgctattgtagacagtaaaaaaaacggtattttggaaccagctttaaggaatctcggcagtaagatttatcgtgttcctcgcatgtcgaatagattgaagcacaattacaaagcactttatgctattatgacgcaaaacgattatgatgcggttcatgtccatttggggtataaaagctttttggctttattgtgtgcgaaaagatgtggtataaaaacgcgcattgttcacgcacacattgcaaatgtaccagaatctaaaaaagaaaaaataatccgctttatacttactataattacaaagcattttgcaacaaatcttgcggcttgcgggattgaggcagctaaatgggtatggggaaccaagtcatataataaaggaatagttaaggtacataataatgctatagaaacaaataaatatacatacaatgcagcaataaatgcaagttataggaaacaacttgatatagatgatgatattcttatcatagggcacgttggaagattatgtagccaaaaaaatcaactccgtttaattgatatatttaatgtgctgcataagatgaatccaaaatcatgtctggtattgattgggagaggggagcaggaagaggcggttaaggagaaaataaagttacttgaattaactgagaatgtaaagctgctcggcgtccgtgatgatgtcccgttactattaagtatgatggatgtattcatattcccaagtaaatatgaaggattgccgtttactttggtagagacacagtgtaatggtttgaaagccgtatcctctgatgcggttacagagcaggtaaaagtcagtgaatgtattgagtttttaagtttagaagattcagatgaaatatgggcagaaacagctattagggcagcgcagaatggacatgatatatctgcaaggctgaaagtaattgaaggcggatatgatatcgatgtagaagctaagaaacttagagattattacacatatctaattaaaagacaaagtgagtaatgagtatgagaataaaaataagccttcctgctctggaaaaagttatgaaggctgagaaagtggatcaatataagttgaaaaaacttttgattaatgctctgataattaggctttttatctgcgttttggttcttttggtcgggaagaacatgaatgaaatatattttatttcggatgatgccgcttatgagaatctggcaaaggcatatcttcagtctgcttcatcacccattgatttgggtgcattaactcttattggtgccacaggctatttacagatattctggccatatgtggtatgtatttccgcatatgtatttcacagtatttatgcagccaggtttatcaatgttttcctttcaatattaacgataaaactgatatatgatctgacaaaaagtatttcaaataatcatcctacggctatacgtgcagcaagaatatatgcttatttaccatatcccatattggtctgctgctttccgattaaggacatatatctaacggtagctgtcttgtatgtatttgtaatatttattaaatttcagaatttacaaaaaataacaattattcaatttatattgagtattatgcttttaattggggcttattttacacgaggcggcgttgttgaaatgatgtcattgttttttattgcttttttaatgaaacgttttgcagacacgcataattatgctgcgattatgctttgtattactttcacatttgttttcttgtatgtctttggcggattgattttcgattcgttcagcataaaaatagataattatgggggatatgcacaaatggatacaacaatttctgcaatccagatgagtagtgtaacccaaatatataagttgccatttacctatttttttgcttcattgcaaccgataccattgtcactatttacacctgaggctggaaaaatgtggtctcaattaatatattatgggaatttaacaatgattccagtagcttgtggaaattttctttatattttttataaaaagaaaaacagtttgttttggatctgttctgctgtaatgtattgcgctgtgaccacattatctttgggcatatttaggcattatctgtttttacttccgcttgagatgattaactattctttatatatggaaaatgctactcaggttaaacggtctaattgtctggtatttgctgcatgttgttttgtaatgattttgttgtattcatgttattgtcttattagataggaggtttaaatcatgcccttgagcttattttgcgatgcgctgccgtattctgaaatgtctgtgcagtataaagattggtttgacaagctgcagttggcaccactgatgcctaatattgcatacagttccagcttgcattggcagttgtattgtaataaatatccagacgagcggggcatattagttgattgggtaagagaaccagaaaagaacaaggcagtccgaatattgtctacgattttaagacctttagatgtaaatgaaacattgggatggttttccagaaaagtgttggatagaattgttttccgcagaaatatgtttgctaatgtgccttatcaattcagaaaggattttactgaaaaggcaagatatttattctgggattatagtacatatagccaggaagagttattcaaaaaatatactgttgtttctcaagatgagggacatttgtcatttgaaacaacgatggatcagttgaacagaacgattgaaaaaggagatattaatatttttggtgttttgggatttgctgattctatgggacatcaatgccggcgtggagaagaatattctagaaaattaaagagatacatggaggttctcaaaaaatccatcacacgctatatgattttacacccgcatgaacctgttttaattgtgtcagatcatggcatgagtactataaataatagcgtggatttacatttggaacaacggtttggaaagcaaagcaaaaaaacatatattgcttattcagattctgcaattatgtgcgtgtgggctgaacggaaagatttactagctgatatagaagcgtatttaaaaacaattgagtttggacatctgttgacagatgaagaaaggaggtactattgtgcttccgacaggaaatttggagatttactgtttatccttcgcgagggaaatgtatttgcaactaactggttcggtaaaagcaggcggaaacagcaaacggatggagctggtatgcatggattttggccggaaaataccgcaaaggatcagattgcaagtatagtgttgattaatggaaaaataaaacttaaaaattattatgattatcatagtgcttatcatataatttatagcattatgtgtggagaaacagaatgagttacttttataaaagcaatcctgcggcagagaacttaattaggaaatattttcaggttttaagtgaaaaaaatgaatgcattatgcaggggaggctttccataatgctgctgggaagtttgtccagaggagaaggcacgtggatagatcgcgaaaacggatttgaaatgctaagtgatattgaattctttaccattcatccctctggattttctgatttcaatagttggaataagattctggatgatacgaggtttgaagtcttcgatggagatatgtcattgctttttcacattgataatacttatgtttgtcgtgaaaaattgccggatctggaacgaaaattattaacttttgatgcacggaatatgggaattactgtagttggagaagattttaaaaatttgattccggaaattgatattcataatatcaattattatgatttaaaagatataatgactcaccgagttttttcagttttatattatggatttccacttaaaagatcaggagatgaaatcagttatcagtattccctggcaaaaaactcattggatttgatgacagttatgctggtaaagtatggacagcttcttagtggatttggtaaccgctgtcaggcaattcaaagactgaacgtggatgaaagaattagacagtattttcaattttgtttgagcataaagttgggacaaacatgtaatatttcattttcgattagtgaaatggaacagctgtttatctttatatcagatcaattatatgaagagtttaaagttcctcttcataatatactggttaattggaaaagtatcattagacgtaatcttggcaagatcaaaagggcggtgttctatagacattttgtttatggagaccattataaaagattatctgcaacatttcataggatagaaccaattacaaagagagagattctggataatatagtcttaaatggatatccaacagaaaaatagaaatgggagtagaggattgataatatatgagaagaatgcttaagaagatactgattagaacagaacagaaaatatttgctgttatacatagggtgaattatcactattatttaacgcactacccactacttttacagaaaatggggattcgattttctggagatattaagaatactggatttatatcaagtaccgtagcatttgattcgtttgattatgcgagttacattacaataggagagaatacaattatttcttcggaagtgcagatgttggtacatgattatacaatagggaatgcaatgcttgcattaggtgcaggaggagtgaaggcagggcatcttcctcatttcctaaaagaaatcaaaattggaaataattgttttgttggaatgcgatcgataattttacccggaacagaaattggtgataatacaattataggtgcgggttctgttgtaaaaggaaagataccagctaacgtaattattgcgggaaatccagcaaaagtgattaagaatatagatgattatgttgaactccatatgaaattgcatgactatattgttaattgatttattgtttagaacaggagaatatattgaaaaaagcagctcggaattcaattatttatatggctggcatgattataattgcagtaataagctttttcaacacaataatattgactagaattttaccgggacaagtttttgcccagtatgggttattaacaacatttactaccgcgtcaataacagtaatatcactgggtatggatgcagcgtatacacgttttttttatgaaagcggttattcagctggccgttatctgcttaaaagttgtacggttccattttttgtacttattgtttttatgcttttacttttagaaccaaatcatctgctgttaaattatgtttttgaagacggcgtaactaagcaatttatatggctttttgtaggttacttactattctcattgtttggaaaatttacacagcttaccgcacggatgggagaatttgcaatcaattatgtattatcgaacttaattgcaaaagctggttttgtggttattatttttgcagtatgctgggtaataccagatgtgactttaagctgggtagcgttttcttttgcagtggcatctgcttttgcaatgtttattaacatatctacattatataaagtcaaaactatacaggtgagtgagcataaaagagttacgacaacggaaatgctgaaatatggaatgccgtttatgatcagtaatgtcatgatgctgattattccactgatagagaggctcattgttagagaacttgctggatgggaagtattaagtatttatacagctgcttctgttttttatacagtcattgccctgatgaaaaatacgattgataacatctggaatccgattgtatttcaatactataaaaatgaagaggtattcaagccattgcttcatgattttggtcttgctgttacatgggttacggtaattggattgggattctgcattcttttgcgcaggtggttagttttgattttggattccagttattttgatgtatatctgattgcaccagcgattatgtatacagcgtgttttgagatttatactttgatttattctgttggaattaacactgctaaaaagacagtacatatgattagtgctccaatgattcaaattattatttctgtaatattgtgttgcctgctaatccctgaatttggattattgggtgcaggcattgcatctttatttagtattattataagcaggatatacagaattgtattgggattgcattattatggaactgagcgaagagaatggaagattgcactgctatggcttatctgcgcggttgctgctgtatttacgatgtattccacaaccatagtttctgatattactgtttgcatcactttatgtatattaagccttgtggtaattaatactgagggagttaatttagtaaaaaaaatgaacggtttattattttcaaaaaagatttaggtgaggagaatagagaatgaacaaaatattatggggggaatatacgaaaactctctataaaaagattttattaaaaaaaatatattcatagtacaagagatgagcataaaaagcatttgcttgaaagtatcgacttaaaagcaatcaatactggttgtccaacgatgtggaagttaactctggaacattgtgctaagataccgactaaaaaagcgaaagctgtaattttgacactgatggatagttcagttaatttgaaattggatcaacagttgattaatttattaattaacaactatagcgaggtttttttggcctcaaggtttgagggatatggagtattttagttctatgcaaaatattgaatgtgtacatgtcgtttcacctgatatttttagttataataggcttcttaactctgttgatagcatagattatattagaactaggcttcatgcggggatttttgcaatgcagcataaaaaaaggacttttattcttacagtcgataatcgggcatcagatatatctaaaacatataacattaatgtttttgaaagatcgaacatgtatggtttacgagaagcgattgaatcggattttcaaacaaaagtagaaatcaatttggataatattatagcgtggaaacagcagtttttaattaaagaaaattaagcagtagtaatcatgcgttatagtatgttttgttgtaggaataaaataataaaataaaactcaggagcagatgaaatggaaattaaaactgattattctgatgtaatctttaaagaaaatggtaagctgaaattattaatcattgttggtactcgtccggaaatcattcgtttagcagcagttatcaataagtgtcggaaatactttgatgtggttttagcgcatacaggtcagaattatgattacaatctgaacggaattttttttgaaaatcttaacataagtgatccagaggtctacatgaatgcagtaggcgacgatctgggagcaacaattggaaatattattaattgttcttacaagctaatgtaccagatcaaaccggatgccctgttgattttaggagacactaattcatgtctgtcagcaattgcagcaaaacggctgcatataccgattttccatatggaagcaggaaaccgctgtaaagatgaatgtctgccggaagaaacgaatcgccgtattgtagacattatttctgatgtaaacttagcgtattccgaacatgccagaaagtatctgcatgaatgcggcttaccaaaagaacgggtctatgtgacagggtctccaatggcagaggtgctgcaccagaatcttgaaggcattaaaaagtcagctatccttgaaaaacttgtcctggaacctcagaaatatatccttttgtcggcacaccgggaagagaatattgatacggaaaaaaatttcatgtccctgtttgcagctattaacaagctggctgaaaaatatgatatgccgattttatattcctgccatccacgttctcaaaaacgtctgttaacgtctgggtttgaactggacaggcgagtgattcaacatgaaccgttgggatttcatgattataaccatttacaaatgaatgcatttgcggtggtttccgattctggtacattaccagaggaaagcagtttcttttccagtataggacatcattttccagcagtttgtatccgaacaagcacagaacgtcctgaggcattagataaggcatgctttgtattggcaggtattgatgaaaaatcacttttacaggcagtggatacagcagtgcaaatgaatctggaagaagattatgggattcctgtaccagattatgtagatgaaaacgtaagcacaaaggttgtgaagcttattcagagctatgctggtgttgtggataagatggtgtggaggaaaacaaactaaatatatcagttttcttttaagtattttacgataagcattcttgatttattagtgataaaggagtgaaattaagtgaatatattaattactggtgccaagggttttcttggaaagaacctagttgaaaacttaaaaaatataagagatggcaaaaattgtactcgtccgaatattcacattgagaaaatctatgaatatgatattgactctattccagagcaattggatgactactgcagggaggctgattttgtttttaatcttgctggtatcaacagaccaaaagatccagaagagttcaagaagggtaacttcagttttgcaaacagattattagacactctgagaaagtacaacaatacttgcccagttatgctgtcaagttcagttcaggctgcattagagggacgattcggtacatctgagtatggcctttcaaagaaggccgcagaagatttgttttttgaatatgcaaaaaaaaatggtacaaaagttttggtgtatcgtttcccaaacctggttggtaaatggatgcgtccaaattacaattctgcggtaggaacattctgcaacaatattgctaacgatttgccaataactattaacgatccatcagttgtgcttgaagtgctttttattgatgatttggttgaggaaatgtttgacgcattagaaggaaaagagcattattgtgagtttaatggtgtggaggcagtacaaaaagtagaaggtaaatactgctgtgtaccagttacttataaggagacactgggaagaatcgcagaattactgtatatcttccacgatcaaccacagacacttattatacctgaaatcgttcctggtagttttgaaaaaaagctgtattcggtgtatttatcctatttgcctaaggaaaaagtagcattcccattaaagatgagtgaggatgaccgaggcagttttacagaattgcttaaaactgaaacgtgtggtcagttttcagtaaatattagtaaaccgggagtaacaaagggacaacactggcataatagtaaatgggaatttttcattgttgtatctggctgtggacttattcaggaacgtaaagtcggtacggatgaaatatttgaatttacagtgtctggtgacaatatggaagccgttcatatgttgccggggtatactcataatatcatcaacctttcaaaaagtgagaatctagttaccgttatgtgggcaaatgagcaattcgatccaatgcacccggatactttttttgaaaaggttcaaaactaagaactatcttatgaaataacaatgaccgggatttggtaaggcccaattagtgataatgacagaaggaacaaaattctatctttgtctaagagaaacggataatagtaaaaaccaacatacaaaggagaacaaactcatgtcaaaatacttcggcaccgacggtttccgcggcgaagccaacgaaaccctgactgcagaacacgcatacaaaacaggccgttttatcggctggtattatggattaaagcgtccggatggacgcgcaaaggtagtaataggaaaggataccaggcgctcctcctatatgtttgagtacgctctggccgcagggcttacggcctccggggcggacgcctatcttctccatgtcacgacaacacccagcgtatcctatgtcgtcagaacagaggatttcgactgcggcatcatgatttcagccagtcacaacccgtattacgataatgggattaaattgattaattattacggggaaaagatggaggaagagacaatcctggatgtagaggcatatctggatggcaagaccggcgagataccatttgcaaaaggggagagaatcggcagaaccattgattacgctatcgggaggaatcgttatatcggctatctgatatcactggccacccgttcttatgggggattaaaggtgggcctggactgtgctgacggcagcgcatggatgattgccaagaatgtatttgacaccctgggggcccagacttacgtgatccacaacaatcccgatgggatcaatatcaatcaggactgcggatccacccacatggaagctctgcagaagcatgtcgtggaaaatggattaaatgtgggatttgccttcgatggagacgccgaccgctgcctctgcgtggatgagcacggaaacgttgtggacggagacgcaatcctttacatctatggttgctatatgaaggagcgcggcaagctggccggaaataaggtggttaccaccattatgtccaacttcggtctctataaagcgtttgacgcggcgggaatcgaatatgaaaagaccgcggtcggagataaatacgtctatgaaaatatggagacaaacggttaccggctcggcggggaacagtccggtcacatcattttccggaaatatgccgctacgggagacgggatcctgacggcaattaaaatgatggaagtgatgctggaaaagaaaatgacgctcagcaaactggccgagccgttaacgatttatcctcaggtattaaaaaatatccgtgtcagagacaaggctgccgccagaaacgacgaggcagtgaaagacgcggttgccattgtggaagcgagtctgggcgctgaagggcgcattctggtacgtgaaagcgggacagagccggtactccggattatggttgaagccaatgacaaacaggcgtgcgaggcttatgtggataccatactgcagacgattatcgacagaggatatcaggctgaataacagaaaatataaacgaaaacaccggcggttccataccgccggctcattttttattgggggaaataaaggaggagttgaaatggtatacgaccgcgccggggttgcgaaaagaatcaggcagaggcggaaggagctgggaatgtcgagtgcggaggtagccggcaaaataggcagagccgtacattattacggcgatatagagcgggggacctgcggcatgtccatagagacacttttggatttggcacattatctggatttatcggtggattatattctgtttggccaggcaggagaagaacgcattgacaatccggatttagcataccgtattctgaaaaaatacgatgaaaaaacgcagaaagaggccattgaaatgatgaaattttatctttgtctcagagaatccggtaaaaaataaaaggacttctgctctgcgatcagcgggggcattttatgcttatcacggcctcttgttttggaaacggaggaatccgcaaatgacccggacggtgtgccgccagactctgaatactgatccaaatattgataccggcagttgatacagacctctgtaccttcgggaattactgcaccgcagcatacacaacggtcaaccatagctgattacctccttttagttcctgaacacaacaattcttttgacactaccagtttactccggttcgtttttaattatgcataaaagtgcagactcagtggcgggagagagaaaaaacgcattttataaaaattgtctatggtaaggttgcataaaacaagatatataaaaaccctattcattgtggagtatttgtggaaaaaatttcttttttcgttgaaataaacaaaaaaatggtgtatactataaacatatttgaaaaaggagggtttttacatgaaaaaaattctgagtttagttttggcgtctgcaatggttgcatcttcgcttgcaggatgcggaagttccaagactgcagagacacaggccccaaccacacaggctccggcagagagcgctgctcctgagggatcggacgcggctccggaggctcctgcggagacggttgcagcaggtgcgatcgaggacggggcagaattggtttactggccgatgtgggcagagacagagcctcagggtcaggccatatctgaggcaattgatgcatttacaaagtctaccggtgtaaaagtagacgttaactgggccggctcacgtgatacacgtaagacactggaaccagcgttatctgccggagaaaccattgatatattcgatgaggatatcgagcgtgtgaatggtacgtggggtaagtatcttctggatattcagagtatgtacgacgcttccccattgaatggcgcacagaacgccacgctgattgaattagcaaagcagcagggcggcggaaccttaaagagtgttccttaccagccatctacatttattatgttctataataaggatgcttttgataaagcgggaatcaccgcagttccaaagacatgggatgaattccttgcagcctgcgagtcactgaagacagccggtatcattccaatgaccgttgatgatgcttatatggcatgtctgtttgggttcctgatggaccgtgtagcaggctctgatacgacagaagccgtagcagcaggcgactttacaaatgaggcagtcttaaagaccgctcaggtattggaagaacttacttccaagggctacatagatccgcgtgcagccggcaacgtatatccgcagggacagagcaatatcgctgacggcagtgttgccatgtacttaaacggaagctggcttccaaacgaagtaaagaatcagaccccggaaggtttccgttggggcgctttctcccttccgcagattgctgaaggcggtgacggagcagaatccaaccagtacggagcacagtgcttcgcaatcaacaaagacacgaaatatccgaatgcagcgtttgctttaatccagtggctgacaagcggcgaatgggatcagaagcttgcagacgccagcatgggcgtaccgatggataacgatgccaagtggccggaggcgcttgcagatgccaaggctgtactcgattccaccacacacagactgaactgggctgtaggtatggagaacgataccaatgtcaacgcagctattaagaccaatatggccatgatgatcagcggcagtacagatgcacagaaattcgcagatgagttcgccaagattcagaagggatcctgatcgctttaactgattgagcaatgaaggggcggtggcgccactgccgccgccccttttgtattcataatagaaaatagtgttctatggagaatggaggggactcttatggcaaagcaaaaggcagtaaaaaaaggcggcaatccgttgcgccggaatacgactcccatgctggtaatgtttctgacacccgcagtgctgttgtacctgattgtatttctctacccgacgatccgtacgtttatcatgagcttctgcaaggtagagggcgtgacggatcctgtttccacatggcagttcagcggacttaccaactatgtgaaatcctttaacaataacatgtttcagacggcgatgctgaatctgggacggctgtggctggtagggggcatcgccgttatggcactggctctgatatttgcagtagccctgacgaacggcatgcagggaaagaagtttttccgaagcgtgatttatctgccgaacctggtatctgcggttgccatgggtaccatgtggctgtattatgcgctcagtaaggagaactacggtctgctcaatacgattatcggctggtttggcggcagtaacgtcatgtggacggatccccatcataagttctggagcatgttaattgcctattgctttggtatggtaggataccatatgctgatttttatgagtggtatcgaacggatcagcgcggattattatgaggccgcttccatcgagggcgccaacgtgtttaagaaattctggtacataacatttcctctgctccgcggatcgatccgtacgaatctcgttatgtggacagtttccagcgtaggcttctttatctggggccaggtatttgatccggtcaacttatctgaacagacggttatgccgctgaattacatgtatgagctggtattcggagcgtccaatgcagtccaggctgcccgtgattccggagtcggcgcggcaatcggcgttatgatggcagttattgtagttgccgtattcagcttaaccacactcatcatcaagaatgatgacgcggaattgtagggaggtagttatcatggcaaaacaaaaagagataaagccaaagttaaatgtaacgagagaaattccacggctgcccggatacattctgtgcgtgatctggctgatatttaccgtgcttttgattggctgggttatgctggcatccctgtctaccagccgggagattttaggcggagagctgtttaagttcaccagcggcctgcattttgaaaactatacgaatgcgtggaaatcgcagaagatcagcgtgttcttcctgaactccctgatttacacggctgtttcctgtaccctgattatcatggtggcggcacctgcggcatatgccctgtcacgctttaaattcagggggaatatgatcctgcagaatatgtttgcgacagcgctgggcattccggtcattatgattgtcatgccgctgttctccattattacgtcattaaaactgaccaacacccggggactcattatgttcctgtatattgccatgaatgtgccgttcagcattttcttcctgctggcattcttctccaatctgtcctatacgtttgaagaagcggcggcgatcgacggctgttcaccgattcagaccttctggaagattatgtttccgttggcacagcccggaatcatcactgtgacgatctttaattttattgccatctggaatgaatttttcatgtccatgctgtttgcaagcaagcagaatgtgcgccccatcgccgtaggtctttataatatggtaaaggggatgcagtataccaacgattatggcggcatgtttgctgctgtcgttatcgtatttgcacctaccttcctgctgtacctcttcctgtccgataagattatcgcaggtgtaacgggcggagcgatcaagggctgattatgaataagaaaataattcagaagaaatggaaaactatatgcgaccgacattgatatttgatcaggtgtatttaaaaaccgcccctaagggacctgaagcctcggtgcccaacctgttaggtatggacaatatgcagaataagacagaattcctgttagacgagtacgatgagatctacgaaggctatggaacactgaattcagtatatccgtacagggattacacctgctacacacgggaatgcggccttcacccggtgaagacggcagttctggaaaatgagtacctgagagccgtgttcctgccggaattcggcgggcggctctggcagctgactgatttaaaatcggggcgcgagctgctctataccaatgatgtgatacgtcccagcaacctggccctgcgtgacgcctggttctcgggaggagtggaatggaatatcggcctcatcggccatactccgctgaccatggaacctctttttactgccaggctggagaccggcagcggacttccggttcttcgcatgtacgagtatgaacggatacgcaggatggtctatcagatggatttctggctggatgaatgcggcgcttacttaaactgccggctgcgtgtggtaaatcataatcaggaagtgacacccatgtactggtggagcaacatggctgttccggaatatgaagacggccgcgtgattgttccggcagacagcgcctacagcagcggaggaggaagtgtctataaggtaccggtaccagtggtggacggcatcgatatctctcattaccggaatattccggggcaggtggattacttctttcatattccggaggagtcaccccgctatatcgcgaatgtggcttcggacggttttggacttcttcagtattccacccgccgtctgtgcgggcgtaagctcttttcctggggcaataacagcgcctcagcccgctggcaggaatacctgacggaggaggccggacgctatatagaaattcaggcaggtctgggaaagactcagtacggctgtattccgatggcaccccacactgcatgggagtggatcgagcggtatggtgccgttcagttaaatggccgcagtgactcttttgaagaggacagggagacgctgacagagatggttcgtgccgaagcaggagatacactggaaaaggtgctggagaacagccgtgagtgggcggtgaagccaggggaagtaatataccggggcagcggatacgcagaccttgaaaatgcctgccgcctgcgcagaggggagagaccgctttctcctcatctggatttttccagtgaggatcaacgccaggctccatggcgtgtttttctggagacaggccgttttccatcagcggatccggcggaaatacctgctgactgcatggcagatgatttctggtatgagatgctgaaaaagcaggcggaacaggatcagcgggagaacctgcagcctcaggcagaaccgcagtcccggggagatcgaaagccggggaaagcttccccagactggcatcttctatatcatcttgccttaaattacatggcgcgagggagaaaccgggaggcggagtcgtgttttattgaaagtatccgacagaaggaaaatgcctggagccgttacgggctggcgtcgctgctctgtctggaaggccgggaatacgagagggccgtgtccgtcatggaacaggggcttatggagcgggcaggggatctttcttacattaaggaaggtttccgggttctggcacgatgcggcgggtatgacgcgcttattcgtgtttacgaacagcttccggaggaggtggcgtccgagtcccgtgttgtgctggaatatattatggcgttataccggaccggcagtttccggaaggcgtatgagcttttaacagcagacggcggcctggtggcagctgatttgcgcgaaggcgaaaattccattgcagatctgtggctggatctgcgcagagcattaaatatgccggaggaagaggtgcctcatgtgtttgatttcagcgctgaaatccggcaaaaccggaaaaaatgatggttgatctgcagcgaagagaatactgctggtgacagcaaggccgaaacaaggcggagggagtcgaaaaaacggctcctttcgttatttctcaggaaagccggttttcctgcttgcaattttttgaccttcgtggtatacttaaaaaactttataaaacaatagtttttcgcaaaaaaagattgacgaatcctgacccatatgatatagtaattgggcgaatggaagagcttaggtcttttttttatgctcaaaattacgttttgcggcagcgcagcgcgtagatacctgaatatagaagaatggccgaataacaacaacgaaaatttaagtggaggtggaagtcgtgcgcacaaagatcacactggcatgtacagaatgcaaacagcgtaactataacatgaccaaggataagaagactcatcctgacagaatggaaaccaaaaagtattgtagattctgtaagacacatactttgcacaaggaaactaagtaatcggtttgacgtaaaggacgtgaaattatgggagatacagtgaacaacgagggagctcagaagaagaatttcttccagggtttgaagactgagttcaagaaaatcgtctggcctgaccaagaaaccgtaacgaagcagacaatagcagtactggctgtatcgattgctttaggactgattatcgccattcttgatttaatcatcaagttcggtctcagttttatcttataatgattaagggttaaggtgagtgtatgtcagaagcacattggtatgtagtccatacctattcaggctatgagaacaaagtaaaagtcgacattgagaaaaccattgaaaacagaaacttacaggatcagatcctggaggtgtcggttcctctggagtccgttatcgaactgaagaatggtgtggagaaaaaggccgataaaaagatgttccccggctacgtactgatccatatgatcatgaatgatgatacatggtatgtggtgcgtaacacacgcggtgtgacaggctttgtcggtcccggatcaaaaccggttcctctgacagaagaagagatggcgaacctgggattcagaaatgaagaagtcattgttgattttgaggttggagataccgttgtggtaatttccggtgcatggaaggataccgttggtgccatcaagtccatcaacgaaggtaagaaatccatcacgatcaatgttgagatgtttggccgagagaccccggttgaactgaatttcaacgaaatcaagaagatgtaacaagtaaaagcggccttttgtacgattggaaggctcgtgggagggaaatccccgacaataccacatttatttaggaggtgcctaattatggcaaagaaagtaacaggatatatcaaactgcagattccagcgggaaaggctacaccagctcctcctgtcggaccggcacttggacagcatggtgttaacattgtacagtttacaaaggagttcaacgcaagaacagctgatcagggcgacttaattatcccggttgttatcactgtttatgctgacagaagcttcagcttcatcacaaagactccgcctgcagctgtattattaaagaaggcatgcaagcttaaatccggatctgcagctccgaacaagacaaaagttgcgactatctccaaagaagacttacagaagattgccgagacaaagatgcctgacttaaacgcagcatctctggaagcagccatgagcatgattgctggtacagcaagaagcatgggtatcacggtcgctgagtaggccggaagctgcatttttataacgtgggagggacatccccgacaataccactaggaggttatttataatgaaaagaggaaaaagatacgcagaggcagctaaaacgatcgatcgtactgttctctacgatgcaccagaagcaatctcattagtaaagaaagctgcaagtgctaaatttgatgaaacaattgaagctcatatcagaaccggatgtgacggacgtcacgcagatcagcagatccgtggtgcagttgttctgcctcatggtacaggtaagactgtaagaatcttagtatttgctaagggacctaaggctgacgaagctttagctgcaggcgctgatttcgttggagcagaggaattaattccgaagatccagaacgaaggctggctggattttgatgtagttgttgctacaccagatatgatgggtgttgtaggacgtctgggacgtgtactcggaccgaagggcttaatgcctaacccaaaagctggtacagttaccatggacgtaacgaaggcaatcaacgatatcaaagccggtaaagttgagtacagacttgataaaacaaacattatccacgtgccagttggaaaagcttctttcgaagaagataaattagcggacaacttccagacgcttatcgatgcaatcatgaaagcaaaaccaagtgctgttaagggtgcttacttaaagagcgttactctgacttctaccatggggcctggcgtaaagctgaacgtagcaaaattaatgaactaattttgttttgtggttgacattaatcataaatcatgttacaatacgcaaagtattgactgccgaagacagcaggtgccgcaaggcataaggtgtaaacgcctgccgaggaacgtacaagtatcgttttaacgaatgatctgtagacctctctgtctttaggcagagaggtttttattttctttctcataacaccggaacccggtacatgagaagggcctctccgtcaggacagagaaattctttttgcggtttatacgggcggaccggccgggtttccggtcaggtttagactaaacaggaggtaaaccataatggcaaaagttgaattaaaacagccagttgtagacgagatcaaggaattatttgacggcgccgagactgcagtagtcgtagactaccgtggcttaactgtagctcaggacactgaactgcgtaagaagttaagagaagcaggcgttgtatacaaagtatacaagaatacaatgatccgttttgcaggaaaaggcacagcattcgaggctctggagccgaatctggaaggacctacagcattagctgtatccaagacagacgcgacagctccggcaagaatccttgctgagtttgccaagacagctccggcattagagattaagggcggcgttgttgaaggcgtatattatgatgagaagggcatggctcagatttccagcattccttccagagaagttcttctcggaaagttacttggaagcatccagtctccgatcaccaactttgcccgcgtgctcaagcagatcgcagaggcgcagggcggcgaaagcgcagaagcgtaattttcttaaggaagacaagcgcagcgcggcctgaatttagaaaattagcggttcagtgacttaagggaactgaacttccttaccaaaaatcaaacatatattaaatggaggtatattatcatggcaaagttaacaacagctgagtttattgaagctatcaaagaattatccgtattagaattaaatgatttagtaaaagcttgtgaagaagaattcggtgtatccgcagcagcaggtgttgttgtagcagcagcaggcgctggcgcagcagctgaagaagagaagacagaattcgacgttgaattaaccgaggttggtcctaacaaggttaaggttatcaaggttgttcgtgaagctaccggcttaggcttaaaggaagcaaaagacgtagttgacagcgctccgaaggtagttaaggctggcgcttccaaggaagaagctgagcagatcaaggcttccttagaggctgagggtgcaaaagttacattaaagtaattgaggctcttctttcccccgaatctgttatacagaatcgggggtttttattttgcagggaaatagctgctgctcatttcaggcggtgtgaattgggatgaaaatagcttaatctacaaaatatttaaattttaggaaaaatgctgtaatagtcttgacaatttaggaaaaaaggtgtaaactacacccgtattatcgaatgaggttatgatttcacatatttttgtaagtcattattttcggatgatgctttacaaaaatatgtgatttttgtttcatgagataaatcaaataatttttttatttttataggaggtacgcgttatgaacaacggtacagtaaaatggtttaatggagcaaagggttatggttttatcacaaacgacgagactggcgaagaagtattcgtacacttctccggaatcatggctgacggctacaagactcttgaagagggccagaaggtaacttatgatacaaccgaaggaaaccgtggtctgcaggcagttaacgtttgcttagcataattgcatttccagctgaataaaccaaaaagatgaaagccgttgtccgattgccggggagcggcttttttatgtaatgggaaagggctcctgttacataaaaagccttccgggcacgcgttcgaaagaccggttccggtctttccagaatctttatacaatctttatatcacttccctgatttccactatcttttttatgggcttttccactacaataaagctgtaaaaatatgctttcatgatagaggggaggaacgtttatgttctttcataaaacgaaaaccattattatagcaggtgcgagccgatttggggccggactggcagggaagctgtcagggcgcagtacgagaattgttgtaattgatttgaatgaggatgccttccggaagctgccggaggatttcagtggttatcagattgtcggggacggaacggatatagatttgctgaagcaggtgggaatcgagagcgcggaggtatttattgcggctacggatgacgataatgtcaatattctggcttcacagatcgcctgccggatcttccatgtgccggaggtattttccaggctcaatgataaaaataaggaaaaactgattcgcggatttaatatcaaaccgatctgtccgtttgttctgtcggtaaatgaatttgacaggctgacagaaggggaatatcaggaggcaggaatttcatgaagattgtggttgcaggtggaagagatgaggcggatttcctgattgggcttcttctgatgggaaaacataagattatagcaatcaacggggatatggggtactgtgagcatctggccgcgtcctacaacgccgcttctgtcatctatggtgatccctgcaaggagtatgtcatggatgaggcgggtgtgaaaggatatgatatcctgattgctttgagagagaaggacgcggataacctggagatctgtcagatggccaagcgcctgtttgccattaaaaagacggtctgtacggtgagaaatccgaaaaatgtggagatattcgagatgctgggcgtggacagggcaataagcgccacctatatgctggcccactatatcgagcaggcttcggtgattgaagatctggtcagggtgatgcctctggagaatcagaaggtactggtcaatgagataaaggtgaattcggactgcccggtggtggatcgcagaattgcggatatggagcttccctttaatacaattatcagctgtattataagagagacggaggtcattgttcccaacgggcagaataagattatggcaggagaccgcctggtggtgatcaccacaccgcagagccagaaggaatccgttaaggccatcctgggcagtgaagacaatgaatgatcatatgattttatgggaaacactgggagcagagaaccatcacgagagacatgttctgaagggataccgcctgatcgccggttatatggggatcgtaatgattctggcgggaattatcacgctgcttcctctgtttaccctgttcttttatccggaggaaatgggacaggcgcagtactttgtggcgccgggcgtctcgtcaatcctggcaggctatctcctgagcctggtgcttcgcggaaggcgggcgggaaacctggaaaaaaatcaggaaatgatcgttgttctcgggacatgggtcattgtcatcttcgtaacggcgataccatttgtgctcagcggaacgtattccgtgacacaggctgtgtttgagactaccagcggactcagtacgacgggactcagtgtggttgatgtcagcacggctccccatattttcctgatacacaggacgatacttctgttttttggagggatcgggttagtgcttgtcatgacgtcggtactctctgatgtatatggaatgcggctgtatcacgccgaaggccactcggaccgtctgcttcccaatctgattgaatcggcaaggctgattatcgggatatacagcggatacatcctgggaggtacttttttatatattctgttcggtatgagtcccttcgatgccataaaccacgcagtggcggctctttccaccggcggcttttctaccagggcggagagcatcggctactataacagcacggccatcgagatggtcacggttatcttaatgctgcttggcagcacgaatttttttgtgcatctgcttctgctgaagggaaaattcaaagaatttatctcccactgtgaggtccggctcatgctttttctgctggctctctttgtgcccatcctgacggtgctccttatgaacggcgtatacagtaacgtgccggtgagcctgcgggcagcactgtttcaggcagtttctgcactgaccacgaccggattccagacggttgagagctttgccgcatggacgcctgcgatgatgtttcttatgattctgctgatgctgattggcggcggggccgggtccacggcgggcggcttgaagatttaccgcgtttatgttatgctgaaggaaatcttgtggaagctggttcgtgatgcgcaccccgaccgggttgtatttaccgaacagattaaccgcggcggtaagaaggaagtcataacagacagggagaagaaccggatcaacgcatttgtcttcttctaccttcttttgtttgcagctggaagctttgtattctgctgctatggctattcgattcaggactccatgtttgagtttgcctccgccataagtacggtgggactgtctgtcggaatcacgtcgtacggagccagcccggtgattcactggacggccattgcaggcatgtttctggggcgtctggagatttatgtcgtactgattgcagcggccaggatggcgtccgacggaaagaattatctgcacgagaaacagatgaaacggaaacggcacagaaatcgaaacaggaaaagggatcattatgagaaatgatatcgcgtctgcggaacacatcgttaaaatactgaaaaatgcatcaaaggtggctgtaatctgggtgctctctacgatgtttgccattgtgctcaaccatatgggagtccgcattgagaatctgcttcttatctatgtggtcggcgtcgttatctgcagcgtggagaccagcagcatgtgctggggaattggttcatcggtcgttttcgtcttcacttttaattttctgtttactgcaccgaagtttaccttccaggtggacgatccgaattacgtcatttcactgatgattttcatcattgtggcgtttattgtggcctcgctgactgttaagctgcagaggcagatggacattgccaacaggaggacggagattacaaccaagctcaatgcgatcggcagcggatttttaaatctggcaggccgaccggccatcgccagatacagctgtgacagtttgaaaaaattgacggagaaacgggtggatatcctgatccgcagcagcgacaatgaagaattctccgacagtatagcagagtggtgctaccgcaattccatgatctgcggccacggagaggctcagtttggtgaaaatacttctctttacgttccgattaagaacagcaacaagacgtatggagtcattatatttgactgctgtgacggtgatttagaggaagaagagagggtttacgtggacacggtaatctcccagattaccctggtgcttgagcgggaacggctgaatgaggagaaggaagagacgaaaatacagatcgagaaggaacggctgaagagtactcttctgagaagtatttcacatgacctgcgcacgccgctgaccggcattgccggaagctctaattttctctatgacaactatgggagcctggatgaagaaactgcaaagagtatgctgaatgatatctgtacggatgcagagtggctgaattccatggtagagaatctgctgaatatgacccgcatacaggaagggcggctggatatacagaagaagaaagaagtcgtggatgacctgatttcaggtgctgtcaccctggtctccaagcggctgggagatcaccgcttaaagaccgtcactccccatgatatcgttctgcttccggttgacgccagactgtttacccaggttctggtaaacttaattgacaacgcgatccggcattcgggaaacgatacgaccattacggtttccgcccgggtgatggggaactttatcacctttaaggtatcggataatggcagcggtatcccggaagaacggttagacaagatttttgataacttttttacgacagcctatgaaaacggcgataagcagcggggagtcggactggggcttacgatctgcaaggctattgtggaagcccacggaggccatataaaggctgtcaataatgaggggggaggaactacatttcaggttgatatgccaatggaggtaagacagaatgaatgatgcagatatcctggtcatcgaagatgacaagaccatacagaattttataaaaataacgctgaaaaccaagggatacaggtgtgtactcgcagacgacggcctgacgggcatctcgtatttttacgccaataatccggatctgatcctgctggatttaggactgcccgatatagatggtatggaggtattaggccagatccgccaggagtcggaggtgccggttatcgtggtatctgccagagggatggagcaggagaaggtgggggcgctggatgcaggagcggacgattatattaccaagccgtttaatgccggggagctgctggccagaatccgggttgcgctgcggcaccgcagttccgcgcccagacaggagccggtctttgaactggataccctgaaaatggattttgaaaagcggaaggtcagtgtcaggggagaagaagtccacttgaccccgattgaatataagatgctgtcgcttcttgtcaataattccggtaaggtcctgacgcatcactacattcagcaggaggtatgggggtacgatactactgacgactaccagtcccttcgcgtatttatggcaaacatacgccgcaaaatagaagaggattccacaaaaccccggttcatcttgacggaagtcggcgtcggttaccggttcgtggagtcgtagacagaaaaataagaggcattccaggctgctgaaagtatgatcagccgcctggaatgccttttgttatctgcggagccgtttgagctgtccaagtccccgggacagggcgctgcacagggtattcacacagagaaccgccgtttgatcaaacacaaaggcaaacaggaaggagaggaccagggtaacggccactgtgaccgcagtgccgcctaaaatgccccaggaagaggcgtaaagccccagctgttcttctgctgtatgatgaaggatataccagtggatcagaaggatggaaaacccgtatttactgatgattctgactgtcggccccggtttttttagcttttcttccattccggtaaaccaggagaagatggctcccgacataaacagcatggttggcgccttatttaaaaatgcatcggtataatccggcagaacacaggatatggccgctgtgatgagaaatgaggctgccccgagaatcataaacggttttcggtaacgggaggagaacggcctggtccagaaataaccaaacacgaataccgattcccagccgcataaaagtgtgacaaaatggaactcaatgcccaaaagcggaagccaggacagcgctccgttcatgaaaaaggtgagcacgacaaaagaaagcaaaagtcggtcagacatattctgtaccataaccttgaaaaatggcgccgccagatagaaagccagaatcacgtacatcagccagaagtggggattccactgggaaggaccggaaagaaaccgtctgcaggcatccaaaaggtttttggggtcggtcagtccggactggtacagccccatatacagatagaataaataatatacagccatggggatgaccactttaaagacccgtttccggtagaaaacggagactggctcttctttttgattcagcagcagcgctccgctgagcatgacaaacaacagattgcagtttaaaaacagaacagccataatccgcagagccatgaaagcagacgttccggctgccggcgcagaatctgactgaaccacatgtgcggcgattacaaaaacaactgcaagcacccggatatagtcataggctttaatccggttcctgtcataactggggtcccaaagcatgctgcggatatagcaggaaaaagaacctgcctgttttaaacgccggtaatgggcatgcaaaacgataagaagtatgaaaatcatcaggatatattttgtcttaagcactgtattcctccgctggattctgtatttgtatcaatcatatcttaaagaatacgaagtagtcaatcaaaactcctgatccgtctttacagcctttttatatccgtcacgtattcctccatagaatcttaacgacccgccatgctatcataccctcagttcaagaagaggaggctacattatggaaatgggatttatgttaggtataatcggacttacagcactttttatcctggtttacctgattatcattttactgagaggtgacaaacaatgacgaatacagcgatccagatgatattgtattgtgccgttctcattgtactggccataccgctgggcaggtacataggaaaggttatgaatggagagaagacggttctgaccaggcttctttctcccgtggaaaatggaatttataaggttttgaaaattaacagagaagaagagatggactggaagaaatatgcggtatgcgcaggcgtattcagcgtcatcagcctggcggttctgtggctgatcttaatgcttcagaacatacttccgctgaatccggaagggcaggcgggaacctcctggcatctgggcttcaatacggcagccagcttcgtgacaaatacgaactggcaggcttactccggtgagtcggctctcagctatttttcacagatgattggtctgggagttcagaacttcgttactccggccgttggtatggcagtcctgttcgccctgatccgcggctttatccgtgtgaaaaagaaaggtatcggaaacttctatacggatgtgacgaagtccacggtatacgttctgattcccctttccctgattgtatccgtctttattgtatccagaggtgttccgcagaccttccggggacacgaggaggtacagctgcttgaaccggttacggttgagaatgaagacggcactgcaaccgttgttgacaaacagattgttccccttggaccggcagccagccagatctcaattaaacagctgggaaccaacggcggcggcttttacggagtaaactccgcccatcccctggaaaatccggatccatggagcaacttatttgaaatgatttcactgcttctgattcctgccgcactctgctttaccttcggaaggaatattaaggataaaaagcagggagttgcggtattcctggcgatgtttatcatgctggcgctggccctggccgtggtgggatatacagaacaggtaagcacaccccagattgcgcagggcggcgccgtagatatcagcacggccggtcaggcgggcggcaacatggaaggaaaagagacgaggttcggtattgcaacttcaggaacctgggcggcatttacaacggcagcctccaatggctcggttaactccatgcacgacagttatacgccgctgggtggtatgataccgatgcttcttatgatgctgggcgaggtggtgttcggcggtgttggctgcggtctctacggtatgctggcatttgcgattctgaccgtattcatagccggactgatggttgggcgtacaccggaatatctgggtaagaagattgagccttatgagatgaagatggcggtcctgatctgtctggcgactcccatcggtattctggtgggcagcggtatcgcagcggtgcttccggctacggcggacagcctgaataacccgggcgcccacggattatccgaagtactttatgcatacgcctctgcaggcggcaacaacgggtcggcgtttgcaggatttaacgccaacactccattcctgaacacaagtattggccttgtcatgctctttgtacggttcctgccgatgttcggagcactggccattgcgggcagtatggcgcagaaaaagaaggttgcagtcagcgcgggaacgctgccgacccacaatgcaatgtttatcttcttactgattgtggtggttttgctgatcggtgcgctgagtttcttcccggcactggcgctgggaccaattgcagagttctttgagatgataggttgatggaggaaaaaggcatgagtgaaaagaaaaagacgagtatttttgccgataagaggatcatgacccgggccctgaaggattcactgatcaaattggatcccagggaacagattaagaacccggttatgttcatggtatacgtttcggcaattctcacactggtaatgtttgtattttccctggccggcatccgggatgcaaaaccgtggtttattctggcagtgtccgttattctgtggtttacggatttgtttggcaacttcgcggaagcgattgccgaaggcagaggcaaggcacaggcagatgccttaagggccaacagaaaagacgttatggcgcttaagattccgtctccgtcacagaaggagaagggaacgcgggtcacctccacggagctgagaaaaggtgatttggtttatgtggcggcaggggaacagatccctgccgacggagatgtcgtagatggcgcggccagtgtggatgagagcgccatcacaggcgagtccgccccggtaatccgggagagcggcggtgacagaagcgctgtgaccggcggtactacggtaaccagtgactggctggttattaaagtcagcaacaatcccggtgagagctttatggataaaatgattgcaatggtggaaggtgcatccagaaagaagacgccaaatgaacttgcattacagatctttctggttgctttatccataatctttgtgctggtgacgctttccctttacgcctactccatgttttcggcaggtcagaagggaatcgagaatcctacggcagtcacctcactggttgcactcttaatctgtctggcgccgacgacgatcggcgcgctgctttccgcgatcggtatagcgggtatgagcaggcttaaccaggccaacgttctggctatgagcggcagagcaatagaagccgcgggcgacgttgacatcctgatgctggataagacaggtacgattacccttggaaacagacaggcggatgcattgattcctgtggacggtgctgaccggacggaactggcggatgcggcccagctttcgtctctggcggacgagacgccggaaggacgaagtattgtggtactcgccaaggaacagttcggtttgagaggacgcaacatggaagagctccatgcggaatttgtcgaatttactgccaggacccgtatgagcggaatcaattatcagggcaacgagatcagaaagggggccgcggatgccgtgaaggcctacgtactggctaacggtggcgtttacagcgcggaatgtgatcaggtggtaacaaagatcgcaaaccagggcggcactcccctggtcgttgcaaaaaatcacaggattctcggtgtcatcgagttaaaggatattgtgaaggaaggcgtaaaggagaaatttgcggaccttcgtaagatggggatcaagaccatcatgattaccggcgataacccgcttaccgcggcatccattgcggcggaggccggtgttgacgatttcctggccgaggcgacgccggaaggaaagctgaagatgatccgtgatttccagtctcagggccatctggtagccatgacgggcgacggaacgaacgacgccccggccctggcccaggccgatgtggctgtggccatgaatacgggcacccaggcggcaaaggaagcgggcaacatggtggatctggattcctcgccgaccaagctgatcgatattgtaaaaataggaaaacagctcctgatgacccgcggagcgctgacgaccttcagcattgccaatgatgtggcgaagtactttgctatcattccggcgctgtttatggggctttatccggggctggcagctctcaatattatgaatttatcgagcccgtacagcgcaatattttcggcactgatctataatgcgctgattatcgtggccctgattccgctggcattaaagggcgtgaagtacagggaagtgccggcggcaaagatgctgaccggaaatctgctggtatatggactgggcggcatcataatcccgtttattgcgattaaagtcatcgatgtaatgattgtagcgcttggattcgcattatagaatggaagtggccggatatgtatgatgacatctttagcaacaaggtgtatatattatttcgcaatgctgtgatcaccgtgattctgctcgcgctcggaagcctgattgcgtcgggaatcgtggagacagtggtttgtgaatggatataaagaggagaaaaggattatgaagacgataaaatcagtgataccgaagatgttaggattcttcctgatactgaccgtgatctgcggagtggtgtttccgctggtggtcaccggaatagcgaaagtatttttcccgaaacaggccacgggatccattctggtcggggaggatggaacgaaatacggaagtgagctgctgggccagcagttcacagaaaacaagtatttatggggacgtatcatgaatgtggatacctccacctttaccggtgagaatggagagccgctcatgtattcctgggcttcgaataagacaccggccggggaagaactggaggaattgattgcagagcgggttgagaagatcagagaggctcagccggagaaagaaggccagcccgtcccgcaggacctggttacctgctcagggagtggcctggatccggccatatcaccggcggcagccgaattccaggtgtcgagaatcgccagggagcgcgggatcacggaggacgatgtgagagccatcattgaaacgtatacggatggccgtgtactgggtgtattcggagaaccggccgtcaatgtgctgaaggtaaatctggcactcgacggcatcacgtggaaggaatagacgaaaaacttccagaggcagctggcaatcgtgaggggtgggaaatgaaaaaaaatgatattgacgaaatggataaaaaacgtgacccggagaagattcttcaggagataaaggaacaggaagaagagcaggaagaaacgggcataaaaagacggggaaaactgaagatatttttcggttacgccgccggtgtgggaaagacgtacgccatgctggataccgccggagaggcaaaagcggcgggagcggatgttgtggccggctatatagagccgcatgccagaccggataccatagcgcttttagaaggtctggaggtgctgcccccgaaattaattgaccacaaggggattaagcttcgggagtttgatctggatgccgctctttggcgaaagccggagattctcctggtggatgagcttgctcataccaatgcggagggctgccgtcacaggaagcgttttcaggatattcaggagcttttagacgcagggattgacgtatatacgacagtgaacgtccagcacttagagagccttcatgatatcgtggcttctattacccatatacgggtgaacgaacgggtgcctgaccgtatctttgatgaggcggataagattgaactggtggatatcgaaccggaggagctgcttaccaggctggcggccggaaaaatctacggaaaaaatcaggctggccgggctatgagcaattttttcaccaaagagaatttaacggctctgcgtgagatcgcgctgaggcgtacggcagaccaggtcaataaggccgtgatgaaggaacggcaggcggcgggccgcgattattatacgggagagcacgttctggtatgcctgtccccgtctccaaccaatgagaaggtgatccggacggccgcaaggatggcgggagccttccgagcggagctctccgccgtcgttgtggagacgctggaagcggcggagagagaagacaaagtccgtaagacgatggagaataatatcactctggcaaaacagttcggagccaaagtcgtgacgctttacggcgatgatatagcggaacagattgccggctatgcgaagaataacggggtatcaaaaattgtaattggaagaacggtgagacccaccgggttatccgcaattgtaagacggaggaggaacttaattgacagactgattgccttggttccggggatggatatctatgtgataccggatgtgcgggcagcggtacagaagcaccgccatcttacagggaagaattctgctgcagtggagccggcgcgtgtggctgtggatgcggctgcagccgtctttctgctggcgtcagccaccattctgggacagggaatagaggcctgcggtctgggagagatgaatcagatcatgatttatatcatggcagtgattctgatatcaggattttccagatacagggtgaccggcgtgatggcctccgcagcctcggtgctgctgtttaacttcttttttacagttcccagatttacgtttcaggcggtggcctcagtctatccatttacatttctgaccatgctgctctgcgccctgacggtcagttctctggcagccaggctgaagcgccaggtgcgtctgtcgaaagaagaatcggaaaagatgcagatactgattgccatcagcaataaactgaagctggctgcggacagcgatgagatactggatatctgtgcgaaacaggtaatgaaattactggaaaaaaatgtgattatctatcatgccgtgggaggagaagtaaaacagcccagagtctatttatctaatgatgctgaggaaatggccggcggcattctgcttaacgaagatgagacggctgtggccggatgggtctgcaagaattgccacaaggccggctgcaccaccaatacccttccgggagcggccggtttatacattccgattcagaaggatggccgggtattcggggtaattggaatcgatttaaaggaaggtgcgccgatcaaaccgaatgataagaatgtactccacgtaattctggatgagacggcggtcgtactgaaagcccagatgatacacggatatttatagaatgtttatgagtgcagcggtctcaaccgtagaatctttattctgtcgtgcgatataataaagacagaaaaggaggggatcgcaatgttggaagcatttttaacaaacctggctcctgtaaagagaatggcagacagactggaacagaaacatccggtattgagcatgctggtattccagatagcagtggctctgtttttaatcgccgcagtaggaggaatcgccctggcaggcggaggcatgatatggctgttctaccaccttgtgggaacgatgtaggcggaaatagaacgtcgatataaatatagaatttaaaacattatataatataaaatacaaaataccggaaccgcgttgttcccccatttgacaggggaaatatacggttccggtatacttggttatccggtgcttttattaataggtgccggaaaatggaaatgccggtgaatggacctgtcacggctgcttatacaggtattcgatcaggtccagggatctctccagaccgagcttgcttacattgatcagaagctgatgggaatccgggctgccccagttctgatcggtatacgtctcatagtaattcttccttctgcggtctgttctcttgattgcggtggctgcttccttttccgttaaatgatagcggtccataattcgttcgatgcggtctttcatatcggcgcagatgaagatattcagacagtcgggattctgacgaagaacgaaatcagcgcaccgccctacgataatacagggaccccgtttggccaggctctcaatgatggaagactgtgctaagtaggtgctgtcgtttaagggcagtccgtagccggtgaaagaattcacatggtccgggtagcggtaggcagacagaaaggtatttaaaacggattcgtccacctcttccacgctgatctccgacagtcccatcttctcggctgccatctccaccagatcccggtcgtaaagcggaatgtccagtgcttttgacagcctctcaccgatctcgtggccaccgctgccgaactgacggccgatggtgattattttatgtcccataacatccactcctttcaaaagaatctcatgtgcgtatgcaattgtgcaataataatgattttatatctttattatatcgtattcaaggtgaaaaagatagaaaaatatgaaaataatccggttttattttttatcgtctgttcatagaatgaatcataatagtgagaaagccggagatggaaatgaaactgagatggaaaataatatgtctgtttgccgtccttgcgctggatattgcgctgggaagaagcatgtatggcttttatcaggaagctaagagtacgctgtttcttccggctgacgccggggattcggcgcagagcgaggtgcggcgccagttttccggggaaaaacagattgcgcttaccttcgacgacggtcctcattccgtctataccagccagctgttagacggactcagagagcggggcgtacatgccacgttttttctcctgggggaaaatatcgacggaaaagaaggggtgatccgccagatgaaggaggatggccatctgattggaaatcacggatatacccatgtgcagatgagtaaggagacgctggaaagcgcctgcggacagatcggggagaccaaccggaaaatcgaagagattacaggacagaaaccggaatatcttcggcccccttacggatcgtggaatgaggagctggagtgtgcgaccgacatgacggtggtgctgtggtcggtggacccccttgactggaagctgcagaatacgaataaagtggtgaaaaagatcgtgaagagtgcagagccgggagatattatacttttacatgatgtttttcccacgtcggtgcaggcggcgctggaggtggtcgatactttaaaaaaacagggatatacgtttgtcacggtggatgaattgttggtggactaaccattgacactttgggaaaccggggctatacttttgttacgactgatgggtttccggcagctttaccacgtgagtctgccgggagtgatattgtatacaatgcaggagaaggacaatggatttatttgattttatgagagagaacaccatggataaggaatctccgctggcatcccggctgcggccggcgacccttgacgaggtggtggggcagcagcacattatcgggaaggataagctgctgtaccgggcgatcaaggcggacaagctgggttccgtcatcttttacgggccgcccgggacgggaaagacgacgctggcgaaggtgattgccaataccaccagcgcagattttaagcagatcaacgccacggttgccggcaaaaaggatatggaggagatcgtgaaggaagccagggattcccttgggatgttcgggaggaagacgatcctgttcgtggacgagatccatcgttttaataagggacagcaggattatctgcttccgtttgtggaggacgggacgctgactctgatcggagccaccacagagaatccgtactttgaggtgaatggagcgcttctttcccgttcccgtgtgttcgaactgaaaccgctggagcgggaggatatcagggaactgatccgcagggctgtttatgacagggataagggcatgggtgcctacaatgcggtgattgatgaggaggccatgaactttctggcggatgtggctaatggagatgccagagccgcgttaaacgccgtggagctgggaattatgacgacagagcgggatgcagctgatggaaagattcatatcgacatcgacgtggcccaggagtgtattcagaagcgggtagtgcgttacgacaaggacggggacaaccattacgatacgatctctgcatttattaagagcatgcgggggtccgatccggatgcggctgtctattatctggccagaatgctgtatgcaggcgaagatatgaaatttatagccagacgaatcatgatctgtgcggccgaggatgtgggaaatgcagatccgcaggcgctggtggtagccgtggcggcggctcaggcagcagaacggatcggtcttccggaggctcagattattctctcccaggctgttacctatgtggcttcggcacccaagagcaatgcggcctgcaacgcggtctttgaggctctggaggcggtgcgttcgagtaagaccatgccggttccggttcatctgcaggatgcccattacaagggggcggcgaagttgggacacggccaggggtacttatatgcccatgatttccccaatcactatgtgaaacagcagtatctgcctgacggcatggagggaagtgtgttctaccggccgacggagaacgggtatgagaaaaaaataaaggaacacatggagtttatccgaagcgaggcggaggaatcgtgagaaaggcggaatttgtgaaatgagcataccagacagaaataaacgccgcatgatcattctgtccctcgatgccgtgggaggaagggatctggcatatatggagacgctgcccaatttcggttcgttctttaaacgggcggccggctgcggggaggtggtgagcgtatatccaagcctgacgtatccggcccatgtgagcatcgtaacgggccggtacccgaagaatcacgggatcgtcaacaacttacaggttcagccggagcgggaaccgtcggactggttctggcagcggaaatacgtgcgggggacgaccctgtatgacgaggcggtgaagcgcggttaccgtgtcgcctcccttctgtggccggttatgggaaaggcgaaggttcattataatctgcctgaggtgcttccgaaccggccgtggcagaatcagctgggagtgtgcgtgatgaatgggacgcctctttacgagctggagctccagatgaagttcggctccctgcgggatggcatcagacagccgcagctggatcacttcgtccacgcctccatgctgcatacgatggagaaatacaggcccgatctgatgctggttcatctgaccgatgttgacacgaaccgccatttgtacggactggacagcccggaagcgatggcggccctcagacgccatgacgaaaggcttggagagcttcttggactgctccgcaaaatggggctggaggaagagacggatgtcgtaatactgggagatcactgccagctggatgtaaaggaagcgatttatcccaactactattttgtaaaggccggactggccgaagtaaaaaaaggcagaatccgtaattggagagcaatcgccagggactgtgacggttgctgttatatctatgtaaaggacccggaatgcgtcaggcggacggaaaccctggtgactcgcatgatggaacgggaaaacagcgggatcgcccgtatgttcacccgggaagaagcggccgcactgggggcagatccggaatgtgcgtttgtgctggaagcggcagatgggtattacttccagaacggctgggaagaatacaggagaaaggcaggcgcttccgaccatcatacggattttcatatccaggcggcgactcatggatatcttcctgaccgggatggataccggacattttttatggcagcaggtcctcattttttaaagggggcccgggtggagaaaatgtcactggtcgatgaagggccgacgctggccggaattctgggcctggatctgggccaggtggatggacggacggtgaacgaactgattcgttaaccgtccgttaaaaaaaactttcctttttggcaatcagggtatataataaagctatcgtacgacctgacgtcagattttatttacatctgtttacgatattctatcgtagataattcccatgaatatgaaagaactgtcatatggagtagttaaaataaggagaacgttatgcgtgaaaaattagagacattatcattggctaaattaaaggagtttgccaaagaacaggagatcaagggctacggttccatgagaaaggcggaactgattgatattctctgtgcaaaggcggaagaaaaggaaggaataagtgctccggcagttgtttcaaccgggaatgacgagccttctgcgaatgacggcgaaccgtcgaaaaaagccggcgaaccggtgaagagagaagcagaaccggctaaggaggagaaggcccctgcgcccgctcagacacaggcagcccctgcaaacagagtgaatccgaatgaaaagaagagaaccgtggttcgttcctaccgccaggaaggaacgcagagaaccggtaattacaggcagggccagagtgatgccgcggagagaaatgaccgtcaggagagaaacgaccgccaggacaggccggagcagcgtcaggagagaaacgaccgtcaggagagacaggaacagcgtcaggacatgaaccggatggaatccatcagggagacggccgaggaggcacgcccggaattccagccaagtccggagcttcaggaactggacagcggcgtcgatgcgtacggcattttagaggtgatgccggatggatttggttttatccggtgtgagaattacctgccgggtgagaacgatgtctatgtggctccgtctcagatccgccggtttaatatgaagacaggtgatattatacagggcagccgccgggtgaagactgctgcggagaagtttgcagccctgctgtttgtaaaatacattaacggttatccggcaagcgccgcggaacacagaccgaattttgagaatatgacccctattttccccaatgagaggcttcatatggagacgacggggggccgcaataccacggccatgagagtactcgatctcctgtccccgatcggtaagggacagagaggtatgatagtatctccgccaaaggcaggtaaaaccacgctgttaaagcaggtggccaaggcggttaccgtcaaccatcccgatatgcacgtcatcattttgctgatcgacgagcgtcctgaggaggttacggacataaaggagtcgataaccggtaataacgtggaagttctctattctactttcgacgagcttccggagcgtcataagagggtttccgagatggtcatcgagcgcgcaaagcgcctggtggagcatggacgcgacgttatcattcttttggacagcatcacgcggctggccagagcctataacttaacggtagcacccagcggccgtacgctgtccggcggtctcgatccggcggccttacacatgccgaaacgtttcttcggtgcagccagaaacatgagggagggcggaagcctgacgattcttgcgacagccctggtagatacgggaagccgtatggacgacgttatctatgaggaatttaagggaaccggcaacatggagctggtgcttgaccggaagctgtctgagaagcggattttcccggccatcgatatcttaaagtccggtacgcgaagagacgatctgctccttacgagggaagaggccgaggccgtggatctcatacgcaaggcgaccaataccctgaaggccgaggacgcagtggagaagatcctggatctgttcaccagaacgcggacaaatcgggagtttgtggatatgtcgaagaagattttccgatattaatgttttgtcggtctttgtaaaaaatatgcttgcattaaaaaatattctatgatatactgtataagctgtttattagagaaaatggatattatgaaagcaacgaggagtcttgacagataaaagatgaatcgtctaaacaaactggcggtcaataccatccgaatattcggatgcaacagcaaagctgctatatcattttggattttccatccagagtgcggattgatataatcggatcaaacagcagtttgcttgctgtgtcattttgagtttataaaaactcagggtgcagattgaaataaaataatagaaatcagattaggtgaggtgaaaatcatgaaagaaggaatccatccaaattactaccaggccaaagttgtatgcaactgcggtaatgaatttgtaaccggttctacaaaggaagatatccacgtagaagtttgttctaagtgccattcattctataccggccagcagaaagctgctgctgcacgtggacgtattgataaattcaatcgtaaatatggcgttaaggccgctgaataagttagagcaaagaaaaggttgagtttggtggaaacactttagctcaaccttttttgggatttatagagaggtggtaacatatgaagtattcagggatcggcggacaggccgtgattgaaggcgttatgatgaaaaacggggatgagtatgccaccgcagtccgcaagccggacggagagattgaagtgaaaaaggatacgtacatcagtatgggagagaaggtaaagttcttttctctgccgtttgtgcggggagtattcagctttatcgattccatggtgctggggatgaggtctctgacgttttcagccagtttttttgaggatgatgaggatgcgggggaccccgggaaatttgaacagtttttggaccgtgtcttcggtgagaagctggaaaaggctttgatggcggtggtgatggtattttcggtgatcatggcgattggtattttcatggttcttccattgtttctggcgaatattttccaccgttttatcgcatcgcagaccgtgatggcggtggtggaaggggtaatcagaattgctatttttattgcgtacatcaagattatttcccacatggaggacatacgcagaacgtttatgtatcatggagcggagcataagtgtattaactgtctggaacacggtctggatctgacggtagagaatgtcagaaaaagttccaaagagcataagcgctgcggtaccagctttctgcttatcgtgatggtaatcagtattctgttcttcatggtggtgcgggtggacacagtctggctgcgtgtagtcagcagaatcgttctgattccggttatcgcgggggtatcctatgaattcctgcgtctggcaggcaggagtaattcgaagatcatggatattttaagccgtcccggcatgtggatgcagggacttaccacgacagaaccggatgacagtatgatcgaggtcggcatcgcgtctgtggaggcggtttttgactggcgggagtttttaaataagaattttccggagaagcagggatgaaactgacattacagacattatgggaggaaggcgcggagagccttaggcggtccggaatcggtgaggcggagcttgatgcgaagtatctgctttttgaagcgtttcagacagatatggtgcatttcctcatgcacagaaacgaagaggtgaaggatgaggattcggttaaaagaaccgtagcggattaccgcagtatgatagaaaagcggtcggagcggattccgctccagcagattacgggcagccgtgagtttatgggactggagttttcggtcaatgaacacgtgctgattccgcgtcaggatacggagactctggtggagcaggttttaaaggattttcagggaaagaacccggaagttctggacctttgcaccggaagcggctgtatcggcataagcctgtcaatccttggaggctggcaggaggtgacgctggccgatatttctttgaaagcgcttttggtggcgaaaaagaatgcggaagatttgatgactgcgaagctgcatcccatcaggctttcgtcggaaggtcaggaggaaagtccctggagatggaggcttacctccgaattgccgggcatggaagacaaaacggcgggcgtacagaatattacgctggtagaaagcgatctgttctcctctctctccggtgacggtaagcggaagtttgacgtaatcgtttcgaatccgccgtacattcctacgaatgtgatcgaggaactggaaccggaggtcagggatcacgagccgaggctggcgctggacggtatggaagacggcctgtatttttacagacggctggcggaagaatgcggcagttatttaaagccgggagggaccgtttattttgaaatcggatacgatcagggtcaggcggtgagcgggctccttcgggaagccggctttcaggatgtgctggtgtatcaggatgcgccggggcttgaccgggtggttaaaggtaccgcggcttcataaggttcctatgcaaagttactgtaatgtaagagtttggaggttaatttcccatgtttgataaattagacgatatattgattcactatgaagagctgatgctggaattaggcaatccttctgtaacggaagatcagaaccgtttccgcaggctgatgaaggagcaggcagatttagcgccgctggtagagacttatacagagtataagaaggcgaagacggctgtggaagacagtcttgccattctggacgaagaaaatgacgaagagatgcgtgaactggcaaaggaagaattatctgatgcgaagaagcagatcgaagctctggagcaggaactgaagatccttcttcttcccaaagatccgaatgatgacaaaaatatcattctggaaatccgtgccggtgcgggaggagacgaggctgccctgtttgcagctgaactgtaccgcatgtacgtcaattattctgagagccagcactggaaagtggagctgatcagtgtcaatgagaatggaatcggcggcttcaaggaagtggtggccatggtcaccggaaaaggcgcttactccaagttaaaatacgagagcggtgttcaccgcgtccagcgtgttccggagacggagagcggcggacgtatccatacttccactgctaccgtggcggttatgcccgaggcggaggacgtggatgtggtgatcgaggataaggactgccggattgacgtcatgcgtgcttccggaaatggcggccagtgcgtcaatacgacggactccgcggttcgtctgactcatattccgaccggtattgttatttacagccagaccgagaaatcccagcttcagaacaaggagaaggcgttccgtctgcttcgttccaagctgtatgatatggagctggagaaaaggcagaattctgaagcggaagagcgccggagccagatcggtacgggtgaccgttccgagaagatccgcacgtacaatttcccgcagggacgtgtgacggatcacagaatcaaacttacgctctataagattgattcgattatgaacggagatattacggaactgttagacagcctgattgcagccgaccaggcggcaaagctggcgaaggtgaatgagaacgtataagcagactgtgtaacggtttggcgcaggttcaatggcgcgaagccggtgcagataagaggttgagagtgccgccctgttttgataaacagggcgttttttgtgtttggctgcatatcgaaacatttatgttctaaatcatataatgatagaaaagacagtaacatcccttaagaggttaatatggccaatgactccttaggttccatcatcacacaggggaattttcttcgcatcgatcgggcacttgtcgaagaagtttcttcatccggcagaaataccggatttatcataatttcctattcagttccgtggcaaagcggaatcactacgattcagcagctgcggctgaatattaatcagaatactgcagttatgaattctctcggaatgcctatccgtttgagcgatattcgcagaggcatgcgggtggatgctacattctcaccgaacatgacccggagcattcccccacagtctgccgcatttacaatcgtcacaagacagccctccagaccttctgtcagtaccacaacccagcgagttgtctggatcgactgcagcaatagtcagcttctggccggtatgcccaataatatcagcagaatgacgagatataatattacaaattcaacgatcattctgaatcggaatggactgccgattcgtttatgcgatcttcggccgggacagctggtagaaatcactcatgccagtttccagacggcgagtataccgcctcagaccacggcgtatcggattcaggtgagataggcggggattttcaggaaataactgtggtaagctgtggaaataactcataaaagtaattcatgaaaggcttgtaatggtgggaataccactgttaccggccttttacgctgccatgaaggatggaatgatgaaaaatggattatgagagagtaagatttccaatgaagttccatttatagttttccaggatctgtaacatgtggtataatgccataagaagtcggtgatttcttacgaaaatattttatctaaaagactgttcaggcaggctgattcatcgcattttactcctgaacgaagtgaaaggaatgtagaggagagatgaaattaacagcattaaagtgtccttcatgcggtggtcctatcgagttggatgagaaggacgagaatgtagggtactgccagtactgtcatacgaaatactatctggaatcggaacagccgaaagtgtttattgagtataagccggaagcctttcgcaacagtatggccacgaagaaggagtcgggaagcaaagcggcagccgcagccggagcggtgattggggtaattggcatcctggctttgatcctggtgcctctttcggggacatcaaagaatgccagccggtatcccgacagggacatgacagccgcggccgctgcatcaggggaacagtccagggaggagagtaaggtgccggtcacctattcctcatcctttgaggtgttgataaaagaggctctgggaatgagcatttcttccgttacagaggaggaattggggcggtttaagtatctggccatgagaaaaggggaggccggctggctgatcacctacagctttgaaaatccggcagaggctgcggaacaggggaaggatgcggatatccatgtggttgtctgccaggaggcgttaaaggttcaggatattgccgctttgcagaagctggagtatttaaatctggatcatacggaactgcccgagggcagtctggagacactggaatccttaaaaatgattacctgtgactacatacagctggacatgctgcgccttgcactgggaagcagagcccaaaatctggagcggttgaacgcttctcatttaaagagtctggaagagctgtccggttttccaggcctgaaagcgctggaaatggaagactgccgggatattgcggacatatctgcactggctcaggttaaggatctggaacgattaaagctctgcgatatggacgaggtgaatgatttcactgtcttaaatgtgcttaagaagcttaagagcctgacgattgatgcagaaaacttaaaagatatcagttttattaatcatatgccggagcttgcgcatcttgaaattacggattccaggattctcctgctggatccgcttttggggaaagagagtctgaaagagcttgcacttgtggataacagtgaggtgcgtgattatggtcctgtcgggactcttgcaggtctggagatattggtactaaacaaatatacttctcaggacgatccggaccttacggctcttgccggtttgaagcatggagaattccatgggatgatgggaattcgctttctcggaagtctgacagggctggaagaactgaaggttcagggctgtaatgtggatcagccgtctgtaattgcttccctgcctttgctgaagaagctggtataccggaaaaactggggaaacagcgatgacttaagcttccttgcgggctgtcagggacttacttatttagacatgaatcattcggaattttatggtgatgtgtcctatgcatttaatcttcctgcactggaaacactgattctcgatagcagcagctttgaaataaaattcgaccggcttcaggataatccagccttaaaggccctctctttaaaccgcgtgaaattgtataagaatatagaaatgtggtccgatggcatggttcgttcaatcaactacgataatgtacttctcgatgagaatacggagtttttagctcattatccctctctggaatacttgagtcttcgggaaaaccagcttactgatctccagtttgccgccggacttaaaaatctgagagaactggatgtcgcggataattatgtgaccgacacccatgtactggatcagttggagtatttggggaaaggaagttcggtgaagcggccggtggcagacgtagactggattgatacagccggggatttccattgattattcaggcgcgaagctgcggcgccgccctgggcggattgagcagaatgaaaatcggaaggccgatctgcttgattcgcacagaggcggcaatttttatgggggggaaaagcggggattggcttaccggattttttatcggtgaaaataatttgagagattttgaaaaagtccttgattcttttataattatcggttatacttaatttacaactaaacgaagtgaaatatacgtaatatttagcgcgctccgtatcattattttctaataatccaaagtactttattgatctgttactctcttttttattccccaattttgttttatatactggttttataaagataattttatttaagaaatactcaggtgatggcgagtgatcgggaaatcggttgatacatcggccgacatgacgcggcagcaggttttatgtcttttatcagttcattatttctgtttttctgtatccggaattaaaattctgccggaataatccaggagtttagtaaaaaattattgattcggaaggggctgaggaatgcagggggttcctttttaacaacttaactacatacacggtataaggagtgagaagagatgtgcagaaaatggctgtttttttctctggctgtattgaccgctttgatggttattccggcagatccggtttatgcccggccgaagccggagatcacggtgctctcagagattatgtttggaacgtcagaagaatatgtgccggaaattattcatgaggagggagggcagttatatcgattgaagagctgggaactggagccggtcattgtgaaccccagagagaagtatgtggaacaggagattttctatgaaagcgtagaagggatagagggtgttcctgaacggcggaatattacctcagaagaggatttttcgggattgaaggtgagcgccgattatccggtaattaaaagaaagaaggtgaaggaagaatggcgtgatgatttcacgtttccagttgtatttcattcctatggggcggaagaatatttcctgggcgtagaaaatgtgccggttgatggagacgcactgcgtttggagctgtatgaggaagcccttctttcggaaattggagtaacgactgaaaattacagaattaccagtactgtgtgggatggtgctccgtacatggatgaagacgatattctatgcagaaatgcaaccgcttttggcaagcggaaggtgagggattatctggttacctatggaggaacggtcaggtttcctgaactggaagggcatcggtgcagggctgtatatactctgaaggagtttgaacgaacaccggctgaagagaagcgtattgtcaggaatggtgcggtgaacacagcggaagaagaacgggattctgactggatcatcagaagggaggccatggtgattacagtgtccttagtactggttctgttcgtcgtgatgctgggggcatggctgataaagcgggttgtggaaaagagagaggagagaagcgaatgatgtggacaataagaaagaaaagccgttggtttgcattctggctgggattgctgctgaccgctgcatttgcggtcccttcccatgcggaatgcgcagagaagaatcgagcagataccggccgctggatttatagaacagattatggcactgcggaggaaaaacaaaacagtatggagcagggaggagcctggtaccgtttgaatgcagcggatgaagtggatactggctggatcttcacggacggcttctggtattttctggatccgggagacggaatgcagaaaggccgtatgatgaccgggtggcagtggattgatggaagatgctactattttgcagaaacttcttccgatttctatccacagggagccatgtatgcggcttgtaaaacaccggatgggtacctggtaggtacaggcggagcctggctggatgagcacggagacgagtggtatatcgctggcagaggtctgtcggcgctgaaaacagatgatggaaatcatctcccggaacttgatgcaggcagaaaaagaaagtacggaagcggcggcggaggaggaggtacggggggaggcggaagccgcctgccggaaggtggaaataaagaaggtaatacagataaggatcagcccgaggagaagaacgattcggaacgtgaaagctttccggagacagatgacagcaccacggccccggcaacaccgtctgatgcggcgctggtttcatgggaagtgcgttttgttgaggagaaagatccgaatagaaagataattcgcacgcaaagtggaaaaagtgaggaaggaacagaggtgactgtggattttccggagatcgttccgggcagtgacggctggcagtatcaggcactggaaaaaagccccaaacaaatcatggtgtccggcaccggtattcagaaatatacggtattgtttcgtaaaaccgatcgaattccagatgaatccgggcaggaggaaggggagcggaggctggaaagctggatcaggctggctgaacatgcagatcttgaaatcacgggaggcagaacggaaggctggagcgtgataacagagaatcaggaggagagccgggaacggcttcgtaatctggtttctatggtacatgacaaaaagcggcatgaaatctatctgattgcgcggaatcataatccttctaccgtggtaatcggccaggaatttccggatatatcgaatatttcaggactgcttatggatgaatttgtgagttcggataaccgctacagcgttttgcgaatcggatttcagagaatctggagaccggaatcctgtgttcataagatggaggcactggagcctgtagtgccggactgtatatccggtggtcatgaacggcggcggtgcgcattgtgcggttacgaagagaccgttcagtttccggcctccgggcactgtgatgaggactcagacggaatttgcgatatctgctgtcaggaaatcgatgatgcggctgttcctcaaacggggatttaccgggaaggggatatacagatacgaaatattggcggaaggcaataccgattccgatgcattgatgaagattacagtgatgacagagagaatctgggatatggagcactttttctgtgtgagacggtgatacgctccgacattgtaagcgatcagcagtcagtgagaaaatggaagtttggcatggataacaactataaaacatccgatatccgaacctggcttcagaaaaatacggacgcctcgatgagagaggtatcttttgtctataccggcgtgaatacggcataccagggaaggaccagggcgggagcatatgagcagtttacatttgatgatttggaaggatatgagaaaccattccagatgatggaagatcaaatgtttatattttctctggaggaagcggtaaaataccgggatgttctgtggaaatttgatggaagcagccagaataatccgcagtctcagtattctccttattccaaaggatattatttgagaacacctcaatttgaaggagaagataactttcaatatgggaaaggaatatatgtggtcgatctggcgaatggcagtctgcatccggtcgaggtctccgatacgagtataggcatccggccggcttatgtcatcgcccggcgttaaagcgtgtttaaaaatgtattcctgtcagctgactgaaagcgattttaaacatactctgggagcagcaaagataaatactgagaaaagggaggaagaagacgatgaaagagaggaaagacatgatagcacagggcaggagaagatggtggaaaaaactgctggcctgtcacttatgcggtattttggtattcccggccttctgttcctatccggtttcggcgctggatctggaaggcggcaggaagcaggccgcgagttccagtgcgttggaagcgtttggggaagcggaggagaatggcgaatcacagactgcgacagcctccgatgcatcgcgtcaggagacaaaggcttcgctttccaatgcggtgagagcgataaactcactggggaatatctgggattcatggagtggaaagacaagttttgaatttctgaatggaactcagggggatggttctgagagccggccatttttgattaagaaccgggaacagcttatggggctttcggaactgaccgcgatggggatgacagttccggatgcggaaggtgcagactatgcgggggattatacgggatgtttctttgcccttggcggaaatattgacatgcagggggtggactggattcccatcggtttttaccgggactcttcagagatgccgggtgaggtggagtatgcgtttcaggggaattttgacgggaatggatatacgatcaggaacctgcggctaaataaactggggaattacgatcacattggtttgtttggtgcgatcgctaattcaaagattcacgatttctgtatgatcccggatacggagataaaaggaaatgacagaataggaacggtagccggctatgcagttgattcagaaatccggaatgtgacagtcaaaaatgcagcgctgaacacttccggaattgtcggaggaatagcaggagagataagcggaaccataattgagaacgccgtgtgcgataacgttcttattgatgcccgtgccggtaaggaggttatttatattggaggaatagcgggtatcgcatccaattccctcatcgcagactgtactgttgcaaccggcacaggtaatacggcacgaatccagggaaccggatatacagggggaatagccgggctgcagaattctgcagatatctacaatgtctacgtgaatggaacgatcggaggttatcattccactgcaattggcggagtgacaggaaagtatgtatcaggaaagttaaaagtagcacggtttgaaggcaccatcgggaattcgcagctgggagctatggcaagagaaggggcgtttatcggaacaaggcatggggcagccacaaactttaactatattgacgatgtggcgtatctgttcaccgatcgtgagagtaagatcagcgccaatgtatgtggatcagagatcgcggatgataatgactatacctatgcagcccatatcggatactggcacagcggtgatttgcattacacgctggttcagggaggaaccagcaaaaatataactgaccggtatttctatgaggaactggaagacggtattttgtcggtaatggatgagacagatgataaccgttataccatcgatcattttgctcctgattcgacaggacgtcccgtacggggatacttaattaatgtaaatcagattgacacgacagcaaatggccggaatttttacgatgtggcagtgctggaagtaaggggagtatcccagtattccggtgttcttaataagaatcaccggggagctgtcgcggccggatcggttgtctatgtgaatacatcaccaaacaatacagaaacagagaaatttcaaatgaacggaactccatattacatagatggagacggaatcaaaaaaaacatcgcgtattctgctgacagtcactgttatacctttcgtatgccggaagaagatatcgtggtagacgcagtcgataaaaaagtagcggcagcagtcgatgtacagccggatgtctgtcattttactgtgacacagaccaggaccggtaatcggaagaatcccgcaaagacgacagaaatccgaaataaagcaggaaagctgattgcccggtacatcaacggactactggaacagggaaccgaagtgcagccggtcacgatacaggcggttattgatgcaaataatgatgtgagtgatgaacgggtgagatggagtatagacgatgcggatttaatcagactggaaaaaaacgatgatgaagactcagatggatatactgcaaaatcggccagtatcacggtaaatttaaatgccggattttttaatgatatcatccgtgagcaggagcgaaagcagcaggaggagaattaccggtacagaatacctaatacgatttatggggctggtcaccagaatggggctgttgcaattctgactgcagaaacgaggccgtcggcctctttcgaagggaagccctgtactgctaactgccggattaatgtaacattccagattctcgacaatacactcgtcgctgcagagggggcagtgctggataaacagacactggagtatacggttacgagacggttgacagggaaccggatagaaccggaagagagtattctggtaacggctccgcaatcgttaactgctgaattcgaaccggattatttttcgagggacgaagtatcgtggaaggccagtgatccggccgtaatcaggataaatgaagaagaggcatcttataaagaagtttcggtatctgcctataaggatgcaaaatggatcagggatatcatagcggcagataatggaaaaaaggagaatgacaactatacgctgcttactggaaatggggaacggagtgcctgcgttacagtagaagggacggataagctcgggaaccgggcaacggcggaatgcatggttacggtccattttgtgacagaagacagaaccaggattgttcctgatgcggttaaattaaatcaaacggccatggaataccgtctaacctatgataaggccggagatattcattcagaaactgtgggaaaaggcgggtttgagcggagaacgctgactgccacagtcagccctgatattgaagacagcgaaagtcacagaccatttgaccgaagcatagtgtggagctcatctgattcagaggcgttgtcggtagacgcagatggaacacttacggtaaatgacggagcgccgtggattttggaagcattgtcgaggcagccgtatcaggctgtaaaaacggtggatattacagctgcggcaaatgacggactgcggacagacagatgcagggtaacactgaatttccaggcgaactgtatcgaggcggaccaggaaaaggaggtatttcctatcacccttacactgacaggaagacgttcggctccggtattgaccttcagcggacaggaagccagggagctgagtgcggtcatctattccagtcatcctgatgtaagccaaattgtgtggccctctgaggatccggatctggtgacagttacacggaacgggacagtagctccggtattgctggacgaaaataatgaacagaaggctctgtggattagagatctgttaagatccggggcatacagcggtacgaaaacggtattggttaatgcgtcaacggccgacggaaaaatgaaggattccgtattgattgaattaaatctcaaggtgatcgatcgtacctacccgtctgggggatcagggggcggcggtaccgggggaatgagcaccactaccggtgtgacgccttccggaaaaacaaccgggcaagcgggagcgaatggtgcagtcaccggtacctggactcagactgcaaatggaaaatggatctttgcatctgacaggacatatgcaaatgaatgggcctatattaacaatccatatgcagccgggaaccagccggaggcagcctggtttcgatttgatgaggaaggatttatggttacgggctggtttacggatcagaatggaaatctttattatctgaatccggcaatagacgggacacaggggcagatgcttacggggtggcagcagattgatgggagctggtattatttcaattcatcttcaaaggaagtaatgggaaagcttttaaccaatacggtcattgacggaagtttcctcgtgaatgaaaaagggcagtggataccataacgtacaaatcttctgccggtatgagatctagcccggaatccggggcccgttcattttacccaaaggaggaactatgagaaaaggaatgtggaaggaaacggcaaaaaggctggcttcgatttttctggccggtatgattctggcagcgaccgtggttacaccggtttctgcagttcatacttactactggccggatgctgttactgcagatgcaatggcaataaagaactggacctggacggcagaaggagaagaggcggcacgaaacccttctgtgggacttgttcctacaggattatcacagcaggaaacggccttgatgggaggctatacaagcaagttctggtttcaggcggaaaaggctaagacaatcacaattcccggaacctcggcagaacttgatttttctaaatttcatcaccgttactttgcctgtgcggacagtcataataccggattttttgcgcctgtgggggcgcagattgccttccagaagatgtattatcccaccaacagcctgggagattatccggattttttaaagaatgcccccatggatatgaagacaaaaaagtttgcccttcttctgatcgctatgattagtgctgcctatgaaactccggccatggaggacttaagggactctgatcggatgtccatgtattattaccttctctgggcgtcaatctggagtaatgataaatatgtggatcagggcatgtttaaaggagagtcgccggagggagactgggactttgtacagtactttgtaagaacaatgctgaactcgaagctgaatccggatccgtatgggagcacagccatttatgatgcattcaaagacggaggcccggcacagaagtatttctttcattgctggaaagctgcaaagtttctgtcgacatttgactatacggtcgatatgggaagctcactgcctgtctcggcgcctgtgctgggtgaggatggtatgtatcatataacattcacctatggagatctttcggattatgaaaaagaagtataccggcgtatgacggcggaaaatcttgcttcaggctgggaatataccaatgatggaagttccattgattttaagtcggcggatggaggatcagacggcaatgcaattgccacgttaaagcttcaggaaaattcggaggaagatcgtttttataattgcggtttcggcgtgggcggtctggccggctttcgcggttgtgcgaaaagaggaaggaatggagagtttggctggggaaatactcagatatatttttcggcagtatctgaaccgctggagattcttgtaggaggacggattcctttgaacccgggtgcagaatggaatatggaggttcaccgctatgaacatacggaaacctgggacgcccactataatatccagctgcagaaatatgattctgagacaggacaacctcttgccggttctaagtgggatattctggaagcctttgatgatacgcagctgaatgatacagaactggaagacttcgataactgggcaaacaggagtggaagccagttcttaagatgggaaggctgggattatggggagggtaatcctgaaggagatgcagcaaatgatccctgtacctgggatattaatgtgacaaatgaagatggtgtccttatgctgggtgataatgaggaaaacgcatcagaacggagagcacataccgatactaagacttatacctacacgaaaggttattgcggcggccatccggaaccggaaatcgaagaaagcggagatccggagattgatactgagaatgaaacagctgcgaaggaagtatggcaggaggaggtggactactgcgagcgtcttgcagaacagggaggcttttttcattccattgatgcaggagaagcaaaagaacagctggaggcagaccgggataagctctacggccagtttatatcactgaaatacgattactcagcagtagaactgactccgcgcccgggttatacaaatcatggaagtcatacagacgatattccgatagaggtaaaaactgtcacgtcttccgagtacaaagaccgtccggaattcaaggcagggaaaacagaaaaatattatctaaataagcgggcagccgggaaaaacagggattatatggacgaagacagggctggcaatacggctgtcccttcggaggccacagcttccaatacaatagcttccaaagctactatctccaatgcatcagcctccaaggcatcggcctccaatgcatcagcctccaatgcacctgtctctcatgcaaccgactccaacgcaaagaaaaagaacggtctcctggccaggctgaaggcattgtttgagctgccccggagtctggtcgagcgaaataagagtgataagtctctgcttaataataagagtgagtctgtggaaagcggatactttgaaccatccgaggcggacccggtagtaccgggaaaccaagccattacagatcatacgtttattgtatacaatcatcgaacggaaggtgaaatacatatcaacaaacgtgacctgtatttacaggcaggcgaaaacaatacttatcatgcatacggagattctatgggggatggtaccatggagggggcagtatatggcttatttgcccttcaggatataaatcatccggacggctgcaccggcactgtttaccaaaaggatgatttagttgccgtagcgtctacagaccgaaatggcgatgcctcatttatggcttttacggaagcacctggaatgacatggaattataagaccggaaagattgaaaaaagaccgggaggcttttctggacctaagaatctttatcggaacagaacggatgcagatacagtcatggacattgaaaactatattggctttgattctgaaggaaatcccgttcatctgaaggattccctggccggcggtgaggccggatactggaaatactcttccaaccagtcgggtattgaaggattgaaagggagccatgcagtatatccggtatcggataatgataaaaacaatggaaacggttggattgggcggcccttaattgtagaagaacatggaacggactattatgtaaaagaactggccagatcagaaggatatgagctctctgtcaatggcagaaccaatgtcatcacaaacggcagagataactatgaaggggagtatcacacggcggatgtcgctattggtaaaattactctcgatacggtgggaaacggaaactattttgatataaccgctcatcaggcggatcacgatctgacactgcagggtattcagtttccggaaggagcggtgtttgaactgtcagccagccaaaaggttccggaaaagattacggtacctgtttatcgaacagtgataaaaccggttatggcggcagcaggtacttttgtctatcgggcaggagagaaagtggcggcaacacagggggaggcggtattctttcccgggggacagagctatagtgtcaatgccgtgtcagatgaaaaagaacagacaatcggcgttaagcccatgaattaccatactatgggtataccggcagtaacagaactccattcagaaggggaagcggaggcatttcagaatctctataacagggaactgggcggcctcggatatatggaaccggggagtgatgcgccgtgggtgcgtgtgaaattaaacggaactacggatacggaatggattctttccattgcagctggtatgaaagcgtatgatctgcagtattttaatagtctgcgtatttcagatatggagcagtcagggagagatctttatgcgattatacggtatgaatggaagctttacgaggacagccgggatgatgcagtttatataccggataaaaaccgtctctatttgaaaaaagacagcgggaacggatattttgtctacatcgcatacgaagacccggaatccaatccggcagtgctgtcctggcgtatgaaaaatggttttctggagagagcgacattaaaacaacagaaaatagaagggctgaaggtatcatatccggcccaactcccggattccttttcagcagtgacggttcggacaccatcatactggatctatgcagctggcgagcagcagattgatgatgcgggagatttaaaatatgcggaagaaacagttattgactatatggaacaggatgggtttaagacggtcgaaaagaatatcaggctgacatccgtgtatgatgctgatcataagatgtatgaagttacacttccagcagaagcatttaaagatacggatactgtcaggcttaaagtatctgataacgggagtgggaaatattcaattaaacaggcgtatatcaatcagagttactttgtcagccggccagtccagcgggaggcagattcctatattcagaatataacacttacaccgccgtcgtatgatcagccgtggcaggatggaaatatgagaagagaacctgcaaatgtgatggaacgtcctgttatgcagaagattaagattgtaaaagacatccttgtcgaagaggatggtaagtatggggacaatacatttgctgattccggtcatgaagattattttacgcaaaatgggggtggaatagaggataccgcgtcgtaccggcctaatttccgtttcaagatttatttaaggtccaatctggaacaattataccgaacggaagatggagaggttgaatggcttgacagaaatggaaataccgtcgatattgcagcgtatcgggcagcatatccgaatctggtgcaaaagatctatacgaaagttctgcacaggaccgattttcgttccagaagatccaatagagatgtaatcgccaatcaggagctttacagttttacggatggacggatcaatgaatatccggagaccgggtatacggcagttctggaaaccattctgtctcatgaagtggatgcagatggagatgataaggagatcagcagatataattatcagaagttctttgacgcagttggggttgcaaatcaggataaatgggacaaagcaaaaccggaatatacttcttttaagcctctggcatttatcagacagctgctctttggaactgccggatcggagcgtatttatcctgcacagcataataatacggaaattcaaaatgaagcaaatacatcggagacagcaaaagaaaatagaaactggtcagacgcggtaagacagtttgcgatctcctggtatctggacagagaagtagaaaaactggtgaaagagaacggcacgggtgaaacagaaattgcagcaggcagtgaaaactatcaggacgaagtgtatgataccgcattaaatgccgcattgatcaaggcagaaaactatttaaaaccatttttccgctatgacctggatgagatttatgctattgagtgggacagtgaatcagacggcggcaaggataaagacaggacgactttgagtgcggataaggaggcagcaggatactgttatgctatctcggaatatcttccctatggtacgtatgtggcagtggaacagcagccaatggacaaagaactggaggattttcccaataaacattatgcagttgatgtgccaaaggaaattgaattaccggctgtatacgaagacgggaaggcaggggccagcgaaacgccggaacggttgagccgatattatcattataatgtgaatctgccggcagcagacctggcagcaaaatattttattcgctttaacgaagaatgggcgggaaaggcagatgaaagcgtaagagagcatgttattaaggcacatggatatttgggagattacgagatttataagtatggtctcgatctcgctaaactggctggaaacgctttgggagatcccagcggcaccccgcactttgagattactcagagtgaatacgatccgatgaaagattattataatacgatcgtctgcccggaagaggaaggaggaaatccggagagtcactatctggctgatgatgtcaatcatgggattactgcacctggtggaaaggaatacgaaagtgacgccatagagcgaatctaccgctacggctctgtttcagagcatagacagacgttgtcttccatggatggaatgcagacagcctatgatggaaaatatgcttccatgcttgtgccgtggtcagtgacggaaccggtaaatgaagagcacgataccatacagaatccggatggatcctctgacggcatgggatatggataccgaaaattcaggaataccttttacaggagtcgtctgcgtatagaaaagctggattcggagaccggtgaaaatattcttcacgacggggctgtttttacgatatatgccgcagaccgtgaagatggcgaaaatacagatggccttgccaggttctatgagacggatactcaaataaaaggatccagagaatttttagaggctatgggagcatctgagattacaagagctgccagggggcttccagaaccgggcggtctgtggacaggaattgtggcggctggaactcccatatgcagtgagcgcgagcagattgtcatggtggatgccaaaggccgcagaacaggggaatttgaggcgtatacgacaacacgggacggtgttcaggcggaggaggagaatccggcagagttatcctggcaggatcagaataccggttatctgatgactccgcagccactgggagcaggtacctatgttttatgtgagatgaggccgccttccggatatgccaggacgaaaccaatcgccatagaaatctattccgataagatttcttattatctgaatggaagccgggacagccgggtaaccgcggccgtctatgaggacgggatcggacagggacccgagggggcagcggatactgggcgaatttatgtgggaaatacgccgatacgtctcgaagtatccaagataaaagagaaaggccggactgttacttactgcactcgaacacgggtcgagggcagcgaaacagagctgacagcaaaatatggtaaggacaatcttgagtttgcgtataaaggaggaacctatttaaactatgcctggtataagggaactgcggaatacttagaaagccggaagcaggcgggagatgaggtcgttcctgtctgcgaggatggtgtgtttgcagggtacggccggataacacggccgctggatactgcaggtgataagaaccgttatgtttcaggggcaaagatgatcctgtatgacggcatcgagatccaatctaatggcgacagcggtgattacggttttgacggcgtagaggtggtccgggaccgcaataacaatgtgaagagcataaaggttttggaaggatatgcaggtaatactgtagaatttgtaaattcagatgatatagaaggaagtctgaaagggggaacgggatccggtacctggacgtaccggaccatggaacggaaggacacggatattctttattattctttgggaggcttgaaagtcacggaacgcggaagtgacgggcgaatatacggttatgaccgcgacggaaaatgcattcaggtacgaaaccaggaatccatatatgcattaaaaaatggccgtcccgtctttgaacttaccggcggtgatctgatggatgcagaatactcagccctggacaaatgttttacgctgcagtcaggaaccgaactttaccatgtagattctgacgggaaccgagatgcaaaagtccatccgacaatgggaatggcatacactacagaactgggaacggaccgaaaggggaagcagtacgagaggattctggtctggccggtcaatgtgtcaaagtcggcaaatggagctgtgatcgcgcaggaaaaaataaaaacataccggattgcatcaataaatgcggataccgaaggggagtatacgattggaagcttcgatggaacggcgtttaataagtctctgaatccgatcgtgggcagtcatggacttcccgaatattatcagagatctgaccaggtatataaaaaaggagaacctgtttatgatattgatcatgattacgtaagatatcgctacaatgatcttctgcctgcgttcaaccggaatgcctataaaattaataactgtggggaactgcgagatatcggagaagaggaagatcctgcggacgataaaaaattgtaccatcgtcagggcgaggcatggattatggaaaatgtgtggacgacaggcgaccggtatcctgatgatccctttcactatgcctctgggacaggacaggcggatatgctgaaacgcgttattccggggacctacattatggaggaggcggaagcgccggccggatatgttaagggattccccatcggtcttacggtcagagaaacgagacaggtccagaatgccgaactggtagatgaaaaaataaaggttgaaattgtaaagacagatgctgcagatcagtatcgaatagatatcgtcagtgattatcaggagatattaaagacgacagagcctaagggagcctacagctacggtcagatatcgggagctcatctggttctttataaggccaggaggaactatacgactgatacagaagcttatccggacggctattacctggagaaaacagaaaatacccctgcatcgtggacggtggaaaatccggaagataatactccggtagttgtgacggccgagtggattacggatggaaaaccaaaatactttgaagggattccggcaggtgattatatcctggaagaaatagaagctgcaggcggctatgtccgtaactccatgaatatagaggttaaaaagacaggcgaagtacagacgtttcatatgaaaaacgatcatactaagctggaagtttttaaatactgtaaggacgagtatgggagtatggtgccgctgccgggggagcatgctgcaggcctggcgctctacaatgctgtgactgatgaacagggaaacatacagatgaacgggggagagccgcagtttgcaaaagaccggctgatcgatgaatggaaaacagatgatctaaaagcgtacacggagaattacgagttaagccgaaaactgacggaccgtatcaaagcctttttgggattggctgtaaatcaatccggttttattttggatttcgagaatacatatcggaaacagggcgatgaatttgtatggctgacatggcatacaaaagcaggagagagatcggcagagcgaatttcttctggaaagaccggtgtgacgggcagcacggtacaattgtggagaacagatgacgataagataatcagaattaccatttaccgaaatgcgcggaatggttccctggaagaagatggacagcttccgctgaactttgagtatcagttcaattaccgggagctggcggacgggataaaaagctatgataccctggaagggatgcacagaattgattatctgccgtttacagggataaaagatggaagaagagtaggaaattatgtcctggttgagaacgaggttccggaaggctatgaacctgcaaagcccaaagcccttgtgattgaggagaacgggagtgtacagagattcagtctggaaaatacagaaaagtctgtctccatactgaaattaatttctgacggggataaggaatacgcggctgaaggcgttaagatggctctctatcggccggatacggatggaaactttaacagtgatgagaataatctgattgaacgctggatttcaggcgctgacggcagatttacagaagaagaccggtaccaggacaggatcccggaaggttttggcgtgggcgatttaaaaccccaccggatcagcagaataccagacggcccgtattatattgtggaagaggaggttcccgcatatatggtaaaacgggaaccaatgaaggtagagattggaagagatacagccgggataatccgtatggtgaatctgccgttgaaaggacgtctggaactggttaaaaaagcggatgatacgggggaaatgctggagaatgccagatttctaattacaaacagagatacgaaggaggaatggtacataacaaccggccgtgatggccgtgcgaaacttcagaatctggcagtaggaaaagttcgggctgatggaacgattgatccctatacgtacactatcgaggaagtatctccgcctgattattaccagctttccggtggcaaaaagttttttactttcgatgggaaagcagagagccaggttgttacatatacatgtgtagttgagaataaaccgactcaaatacgatttaaaaaaacagatttcgaaaccggtatggcattggagggggctaagatcgctgtctatcatgccgtggctatagacgggaaatacgtaaaaagcggcgaagccatagaagttaacatatccggacctcagggctttacgattaaaaagaaactgtcagcggggcatgtctatattatggaggaactggaagcgccgacaggcgcccatctgtcacctccggttatctttacagtaaatcgggctggaaccgggatcagtaagataaaaaacaatttcagtgtactggagtgcgcttcttctggcggagctattgattcacttctggttttcggacgtgcggcagataagacctatacagttttaaaagatctggataccggaaaggtactgcccgatatcatcagcagtacagacgttaccctgacggctgaggatggaatcgaggaagggcatttgtatgaaataactgagtatacccgttattcagatggcaatactgagatgagcaaaaaagggacaaggagaatctggtttgatgaaaatggatctttccttttaccttcgaggacatatttaaaaacgagactccgattggaaaaacaggataggacagaacttgattcctggacagtggagatgggcagtgtcgagcataaaataaataatcctgttaagaaggagagttcggttgcagaaattgccggaacagcaggaaacggttatatgccggtaaaaaacggtgatgtggtaaagtatgtgataacatataaaaattccaatgcggaaagcacggatctcactgtaactgctgaattggagaaaggactggaatttatgagagcgtccctggaaccggaaaaaaaggaaggaacactgacctggcagatccgtgatgcagccccttattctgttggtcagatagaacttgttaccctggtaagcggccagacgggagaacttataagatcagtgtttaccgccggaacccagacgaatcttatggaatcgatcctggaaaatccaattgctcccaaaggcagtctgacaatcagaaatcatatatcaggactgggaaagaacccggatgatgtgtttgcgtaccggattcgctttctggattcatcagggaggctgctgtccggttatcagaattatacgggttctaaagaaggccggataaaaggggaggggcagatttctctaaagggggaggagtacatgattttctccggtctgccctatggtacaaagtatgaaataatacaggaggtaaacagagactatgagccggtcagcagggaaagctccgggctgatatcaaaagaggcacagggcgccgtatatgtaaataacagaaacgatgagtccgtcagggaagtactgacagcaggcggcagttactgtctggctgagacaacagactacacggatggagcggagcagatcacaggaatttaccggtttacgttaaatgaatctggaagaatcgataatgtagatatggaagataagccggtcaggctgtatttttccaagatcgatattacgaccggtgaagaaatttcgggaggttcctatgtgctgatagacgcagtgacaaaggcggaaatctatcgatttacgaaagaggagtccttgccggtcctgattccgtcggacgtactcatacctggaaacgaatatatacttcatgaagatatgcctcctgacggttatgcgaaagaggaagatatacggtttgccgtcaataaggaaggcgttgcagaaactatagtcatgcaggatagaaagaccagaatttatttggaaaaggtggatgccgatacaggggaatctgtgaacgggggatattactgtgtaagagatatggaaagcggtgaagctgttttttgctatacggcaacaggaaagccggttctggcagagggagtcctggtggcaggaaggaagtatgaactggtggaagaacggcctccggctggttatggatcctgcagaaacattgctttttcagtgccgttaagaccggaagcaattaccataagaataaaggacaaaaaaacagaagtggttgtggagaagcttacactgtcttccgccgagaatgccagtccgtcggaagcagataaacaaaagccgggatttatcatgcaaattctgaacaaagataaaagtcctgcaaaagcggtaagagacttttcgggatttaaagaaggggaagaactgatctttaccacgtcacaggagtttaagagcataaccggtcagctgacagcgggcggtgaatactggctgcatgaagtgaaaccgcgcgatggctatgcgctggcggaagatgtaccgtttactgtggacagggacggaaaccggcaaatcgtggtgatggctgaccgtccgactcatgtggtgctgtcaaaaaaagctcttaccgggagccaggagcttccgggaaaccatatggctgtccgtgatgaaggggggaaggtcctggaacgctggatttcaggtgagaagccccatgaaattacagcaaagcttactgccggaaaaacgtattatctgtgtgaagaaactcctgaatcagggtacgcttatgcggaggaggtcccttttaccgtgagcgaagacggaagcgtggatctggtggaaatgagaaacgatgtgaccagagtgcggattcataaacaggatcagtctggtaatgccataaaaggagcgatcctgcagattctggaagcaaaaaaggaaattgttatattggaatttgaaaccaatggagaaccagtggatgtaaccggaatactgacagccggggagacgtattatcttcatgaaaaacaggccccgcccggatatcttccggcagccgatatttcgtttacggttccgcgaaagaaccgacagattgaagttaccatgacggacttaaagcagcacgattccgagagcaataccatgtatctgatgaagacggatgcagcgacgggaaaagggctggaaggctttgaatttacggttacagggccagggagaaatacatttaccgttgttaccggaagggacggtaaagcagaatttaccatgccgccggatggaacctatacattccgtgagacaagcgggcagtcagggtatctcatatctgaagagacttatcgctttaccatttctcatggaagagttaccgggaacagtatcattctggtggcagaccagccgctgcctccggaaactccgtctgatgatacccaccgcattggaagaataacggccagttataaacccggattccaaggcagagtcagcgctgcagagaaagccagccgtcagcccggtgcgcggacaggcgatgaatatccgcttatggctattatggcagctgcgctcttctgtctgggaggatttctataccgtatgagacgggcgggtgcacggaaataatgcggagaataagacggaggaacaaagtaaaacggttcaatataaccattctgctcctggccggttttctgctgtctgtgttctgtctggtaatccggtttgcagactatgcgtcgggacggaaggaatacagacagctgcaggagcagttagaagcgttcgcagacagcctgagcagtcaaacagaggaatggaactggaacagagaagaggaagaagaggaagatgaatggacccgcctgatgatttcccggaatccggactatgtattctggctttggattccgggaacaaatatcagctatccggtggtgaaaaatacgattcccggttattatttaaaccatacattcagcggaaaggagaatccatgcggaagtattttttgcggggagggagccgaaaacctgattatttatggacataacatgaaggatggaagcatgtttggtgatttgaagcagtatgtcaacgaggattacttccgggaacacaggtatataatgatttattgtcagggagactggcagaggtatatgatattttcctgctatattatccgggaagaggaggtgggagtatatcagagttattttaacagtgaggaggaaaaaaggacatatttaaataatatagaaagaaaatccctctatttgacggggaagcagccggagataacagattccatcattacgctgtccacatgcatgggaaaagggaaaagagtgattgtgcaggcagttttgttgtgatatactgaatgacaaaatcataattgcgcaggaggagaagggatggaggatcttaagataggaatattgggaaccggtgcgatagcggctactctggctgatacgatgaaccggatgtccggcgttaagctttacggtgcggcgtcgagaagtctggagaaggcgaaagcttttgcggaacggttcggtattgaccatgcgtacggttcttatgaggagcttgtcgcggatccggaaatagaactggtgtatatcgcaacccctcattcggagcattataagaatgcggtactttgcctggaacatggaaaacatgttttgtgtgaaaaggcgtttgcagtgaatgcggcccaggcaaaaaagatgatcgctctggcggaggagaaaaagctgcttattactgaggcgatgtgggtccgttacatgccgatggcaaagacgttaagagaggtactggattccgggatgattggggaaccaatgactctgaccgcaagcctgtgctatctgattgacgggattcagagactggttgatccgaatctggcgggaggtgcgctgctcgatgtaggaatttatacgattgcgtttgcgtctctggtgtttggggatgagatcacttccatcacttcgactgtaatcaagacagagactggtgtagactcacagaacagcatgacattctgctatccgggcgggaagatggcggtattaaacagctccattcacgtgctgtcagacagaagaggaattatctacgggacaaaagggtacatcgaagtagagaatattaacaattttgaatccatcagggtgtttgatgaaaaccgcaggctgaaggaagcctatacgagaccggagcagatatccgggtatgagtaccagatagaagccagccggaaggctatccgggagaatcgcctggaatgtccagagatgccccatcatgtgacgattcgtatgatggagaccatggatgctttgagagaacagtggggaatccggtatccgtttgagtaacggtaagcgcggaattcgatgcaggtgattcctgcggattacttcagagcagaaggacagttgaaagaggcagaaacatgtttacaaggaaggatttaacgaaattactggctccgctgatcgtggagcagatactggccgtactggtgggcatggtcgatgtcatgatggttgcggcagtcggtgaggcggccgtgtcaggagtttccctggtagattccatcagcgtgctgattattcagattctggcggcgcttgccactgggggagcagtggtgtcagctcagtatctgggaaaaaagcaatcggaaaatgcctgccgggcagcgggtcagctggttggtgttacaaccgtactgtctctggtcgtgaccacggcggccttaatcggtaaccgccatttacttggggctgtgtttggaaaagtggaaacagcagttatgaatgacgcggtgatatactttgggattacagctctttcttatccgtttatcgccgtttataattcctgcgcggcattgtttcgctccatggggaattccaggatatccatggtgatctctattgtgatgaatacaatcaatgtagtaggaaatgcagtctgtatctttggacttcacatgggcgttgccggtgtggcatatcccacgctggcaggcaggatggtggcggctgtgctgatggtctgtctgattcagaagccggataacatcattagaattaaccggttgagtgaactgcggccaaaccttcatatgatcaggaatattttatctatcggtattcccaatggtctggagagcggaatgttccagtttggaaaaatcgctttacagagtctcgtttcatcattgggtaccgcggccattgcaagctatgcagttgcatcaaatctggttaccctgctgtacctgccgggaaatgcaattgggcttgggctgatcacgattgtagggcagtgtataggcgccggcgagaagggacaggccaagcagtatacgcgtcagctgacaggcatcaactatgcgatcctccttgttctgtgcacggtgatgattgtgtttggagggcagctggtggggatttaccagctgtcgccggaggcatctgcgatatcaaagcagatgattacagcccacagcattgccatggtcgtctggccgcttgcatttaccataccgtacacactcagggcatctctcgatgcaaagtttaccatggcagtttcggttttctccatgtgggtgttccggattgcatttgcatatctttttgtgcgggtgtttcagctgggagtaatgggggtatggtacggaatgtttattgactggatattccgggctgcagtcttttctctgcgtttccacgggctcgaaagacgtgctgtctctgtttcataagagtgcagtggaagcgtgtctctgtatatataacagttggaagcataacaaaacgggattggaattatcactcaggacatcagggaaaatatgtcatgcagtttgattccaatcccgttttataatctcgaatgctcctatacatgttacagtctacggttcattcatttttccatcagaatttacgtaatagccgtcgatcacctgattgacggccatgagtcccatcgttccgtcggaatccgggttaaagtagtaccactctccgccgattttattccagccggtgaccaggatgccggaggggttggtataaaaccagccgttataatcaggatcgaagatccaccctgtcatcatggctccttcatggcttcctttttccggattgaagcggtaccaatggttattaatataattccagccggtaaccaaatagccatcggcaccaaaataataagaatagccctgatattctgcccaggtggaggtaaaataggcgggatttcccttattggcaaaccaccagccgtgatcgtctttttcccaggtcccatttaaaaagcgggattcgtcgggggtatgggcaaaacttgggaatactccggtccccgcgctgacaaacaggcagcaggcggcgagagcggcaatgctttttatttttcttttatgagaacaggatttcattcgttccgtctcctttcctgtgaggcaacagatatttcataaactgctaagtaaattataaaggatagggattcaaaagacaacataacggaaaaaaacgtaagattaatgtaagagcagtaacagggaaaatatttcttgacatcacataaaacatctgttatagtacatatagaacaattaaaacaaatgctttgtatctccggataggatgagaaggaggataatatgaacattaataaatttacacagaagtcacttgaggcggtgcagaactgcgagaagctggcctatgaatatggaaaccagcagattgagcaggaacatttgctgtacagccttttaaccgtggaagacagcctgattttaaagctcataacaaagatgaacgttcagaaggagcagtttatcaatgagactgctcaggcgatcgagaagctgccgaaggtgagcggaggccagctctatatcagcaatgatttgaataaggttttaatcagcgccgaggatgaggcaaaagccatgggggacgaatacgtttctgtagaacatctgtttctcgccatgttaaaacagccttccagaatggtaaaggagctgtttcgttcctatgcagttacgagagaaaacttccttcaggcactgtcgacggtccgcggtaatcagcgggtggtgagcgataacccggaggctacgtacgacacactggagaagtatgggtatgacatggtggaacgtgcgagagaccagaagctggacccggtgatcggccgtgacagcgagattcgtaacgtggttagaatactttccagaaagacgaagaataatccggttttaatcggtgaacccggtgtcggtaaaaccgcagttgtggaaggccttgcgcagcgtatcgtgcgcggagatgtgcctgagggcttaaaagataagaagctgtttgccctggatatgggggctcttctggcgggagccaagtaccgcggtgaatttgaggaaagactgaaggccgttctggatgaggtgaagaagagcgacggacagattattctgtttatcgatgagctccataccattgtaggagcaggcaagacggaaggatccatggatgccggcaatatgctgaagcctatgctggccaggggtgagcttcattgcatcggtgctacgacactggatgaataccgtcagtacattgagaaggaccaggcgctggaacgcaggttccaaccggttatggtagctgaaccaacggtggaggacaccatttcaatccttcgtggtttaaaggaacggtacgaggtttatcacggtgttaagatcacggactcggctctggtatcggcggcaaccctttcggaccgctatatcagcgacaggttccttccggataaggcgatcgatctggtcgatgaggcctgtgccatgattaagacagagctggattccatgcctgccgaactcgatgagctttccagaaagattatgcagatggagattgaggaagcagctcttaaaaaggagacggatcatttaagcaaggaccgtctggctgaacttcagagagaactggcggagctgcatgatgaatttgccgtttctaaggcccagtgggaaaatgagaaatcctcagtggaacatttatcggcgctgagggaagagattgagaatttaaacagggagattcaggatgccaagcagaaatacgatttaaaccgtgcggctgaactgcagtacggaaaactgcctcagcttcagaaagaactggaggaagaggaagcacgtgtcatgagccaggatttgagtctggtacatgagaatgtgacggaggatgagatcgcaaagatcgtttccaaatggacaggaattccggttgcaaagctgacggagagcgagagaaataagacgcttcatctcgatgaagaactgcataagagagtcattggacagaatgaggcggttgaaaaagtgaccgaggccatcatccggtccaaggccgggatcaaggatcccacgaagccgatcggctccttcctgtttttgggacctaccggtgtgggtaagacggagctggcgaaagccctggccgagaggttgtttgatgatgagaataacatcgtcagaatcgatatgagcgaatacatggagaagcactccgtatcccgtctgatcggggcaccgccaggatatgtaggctacgatgagggcggtcagctgacagaggctgtccgcagaaaaccgtattcggtcgtattatttgatgaggtggaaaaggcccatccggatgtgttcaatgtcctgcttcaggtattggatgatggacgaatcaccgattcaaccggtaaaaccgtagactttaaaaatacaattattatcatgacttcaaacattggttcccagtaccttttagatgggatcgatgagacgggaagcataacgccggaggccgaggccatggtcatgaatgacttaagaggccatttccgtccggaatttttgaacaggctggatgagattatcctgtttaagcctcttacgaaagagaatattgcaggcatcatcgatctcatgatccaggatttgaacaaacggattggggataaggaactgaagattgaactgacggattctgcgaagcagtttgtggtggaccgggggtatgatccggtttacggagcccgtccgctgaaacggtatctccagaagcatgtggagacactggccgctaagatcatcctgggagatgaagtgagagcggggaatacaattgtgatcgatgtggcggaaaacggaaaccagctgattgcatatcccgaataattaaaaattataacagaaagtcacagcaaaagaatggcggggtgatcttaaccccgccataaaatatctttatttactgttgtatagaacatatcatggatggcatgtgcgtcctgcgtctgtcccagtatccacatcagctttgtcacggtggcttccagtgtcatgtcgtaagcctccagcaggccgaattcctttttgatggtgcgaccgacctcataaacggacatattgctgccctcgttggtcacctgggtagtcatgacgacggtcttgccgagagagatccatttttcgatggctttgtaaaaatccccgctgtcataggatggaaggccgcctacgccgaaggattcaatgatgacggcgtcgtaatgctccgccatataatccagaacatcggcccccatggaaggaatcagtttcagcagggcaacgttgggattcagcgtgtggtaaaaatgcacgtgatccgttaaatgctccttttcatccaggtaaaagatgacatggccatcctgaatcatggcaatataaggaaaattgatactggaaaatgcattgtagctcttcgtccgctcctttttcccacgggttccggcaatcaccttaccgtcaaagacgatggtgacgccgcatgcgcggtcgtcgctggcaaaacgaaggctgtcatacaagttgatcctggcatccgtgttttccatatcgatgggcttctgggccccggttatgacaacgggctttgcagaagactggatcagataggagagggcggccgccgtataagccatggtatccgttccgtgacagattacaaagccgtcgtattcctcataatgtgtctcgatggcttccgccatggcaagccagtgttttggctgcatattggtgctgtctatattgagaatctgaaggctgtccgcctgacagaactgtgctgcatccggaacgtatgagagaagttcgtcagaggatatgaggggctttaagccgtattctccgcgtttgcaggcgatggttccgccggtaccgagcattaatatttttttcattggatatcctcctgttatgatgctgaaaacgattgtatcacgacttttttcattcgtacaggcctttcttgaaaatactgataatatatgctagaatgaattgcattgatacagaacaggagaatcagaaatggcaaatatacccaaagatccggtcatgctgctgagttttctcaatacccagcttcgcgactattacccgtccctggaggactgctgcttgtcacttggtattaatatggaagagataaccggcggactggccttgatcggctattactataatgaagaaaaaaatcagtttatttaattggaagaatcgaacacgaaaacgtatgcaaaaagatgatatgggatttaccttaatagaaacgcttacggtgctggctatcgttgcgattcttgcagcgaccaatattccggtgctgaacgggtttatcgatgatgctaagaaaaagtcgtatgtggcagaggcatatatggttaaagctgccatgcagtcatacgtcattgaacggattgccgacggaaccatcgatgatttcgtgatgtatgaagagatcttttacccggaggtaggaagtgaggagaatgccctgtacgagatgctgaaaggaagcgtcacgaaaggcgggaagatccggctgatcaattatgacaggacgacaagtaaagtaagcggtatcatctatgatgtgaaaaattacgaaattgagataaaaaatgataccgaagttgaagtccgtgacagaaaatgaaaaggaataccagggatgagaaattggagatacgtgagagaaaacagagaaggatttacactggtagaagttcttgcagttctggtaattattgcgattttggcagcggttgccattccgaccatgagcggttttatcagtgatgccagaaagaagtcgtatacttcccaggccaggaatgtctatgtggcggcacaggccgcagcactggagctggagacgtcaaaggatgggactgcggccgcctcggtcaccgtttataccagaaaagacggatcgaaatacatggacagagtggaggcatttcttggaaatgatgtggaaaacggaagccactttacggtaacactggatggaaacaaggttgaggaagtagagtatactccggaaaatgggaagaagattacaatcaccggaggagagggcgttacgtatgaagaatgaggagcatatgggcagaattattcccgggagggtcgtcgcagctgcggtggccctttttctggcgggtctatcctggcatcactgcggcggactcagcctccgcgcggtcatgatatggctggtatgcctgattttgactgcaatttcatatacggatttcaagaccatgcatattcctgaccgtatgacggccgcacttctcatacctgcggttctgtctctcggcgcggagtccggaatttctctttttagcagggcgctgggaggtgcggcagtcagttttcccatgtttctcatgacgcttgctgttccgggaagctttggcggcggtgatatcaagctgatggcagtctgcggtctgatactcggctggccgcggattgccgcagcagggtttctctctgttgtaaccggcggctgttatgcaatctggctgctggcaacacgcagagccggacgcagcgaccattttgctttcggtccgtttctggcggtgggtgtagtgctttccctgctgtatggggatcagctgctggcctggtatctgggatttttacggtgagagaaaggaggaccctgtggcggattatgagtatactgcgaaaagcatcaatggcaggcgcatgaaagggaagattcaggctcaggaccgtgatcaggcatggatcaagatccgtggtatgggactgtatccggtgaaactgaaagaagaacgaggaagagtcagaaagcgcccgttcagctgtggcctgcttgcacggtttatgagtgaaatggcggtcatgctgaattcagggattccgctggcacaggctctgaatttaatcagtgtcagagaatccagaaaagatttaaaggagatttatggaaaactctatcatatgatcctgcacggcatggatttatcccaggcgatggagatgcaggacggagtatttccgcctgtcctgattggcatggtacgcgccggagaggcgggaggcagcctggcagacgctttcggcaagatggcagagtactttgaaaaggaagatgagacgagaaaaaaggtgggaactgccatgatttatccggcctttctcttcttgacggttgctgtggtggtgatccttttattcacaacggtactgcccagctttttcgaactgttcgaatcgatggagaaaataccggtttccacacaggtactaatggcggtaagtattgggcttcaaaatcattttacggagattgctgcggctgtcggctgtgccgctgcgattctggctggaatctttacacgccctggggcagcggtgtggagggacaaaatgatccttcatattccctgtatcgggacactcctcaagatggttatggcaggcagatttgcaaggaccttcagtttcctgtacggcggaggcgttccgtttattaatgccctggaactcacagccgatgcgctgggcagccgttatatgaagaagcggctcttccaggtgatggaggatgtgaaaaacggcatgcttctttcggattccctggctcagattcgtgaactatgcccggaattcatacacagcgtttacataggggaggagtcaggtaatctggaggccatgctgaagcgcactgcggattcctttgaaataagatcagagacagcaatcaagcggctgctgtcgcttttggagccgacgatgattattatcatggcagttatcataggttatctgatgctgtctgtgatggttcccatataccagtactatcagagcatcggataatgccttaaacaggagggcacatatgagattatcagtctatttaggggaaaatgagatacgaactgtgcttggaaggtcggggaaaacgatagagattatggattgcctgagcgtccgtttaaaagaaggcgctttaattaacgacgttgtgactgaagaggctgcggtaaaagaggtactgaacggaatcaggaagcggtatgggaaataccgcagacacgtgtatttaactatgggagggaaccagattatcaccaaagtgctgagcgctccgcggctgccccgctgccagatgatggaactggtccgaagggagctttccgatttgattctgccgtcagagaaggatggctacgtctacgattacagcatagtcagaaagaaaaacagggatcacaaaggacggaccatcctctgtgtggcgatgaaacgaagcgtgattcacgagtaccagactctgttttccgagtgcgggatgaagctgaaagcgatcgacgtcgcagtggatgggctgaacagcctggttgattttctgccgtcgtttcggaataagacgtttattatggcagtagcagatggacgaaatatgatgacatcgctctacatcgacgacgtctatgcgtatacgaaccggatgcgcctggtcgatgagagagggacttcggagagtctggaagagatggtgaaggtgatacggtcggtaatccatttctgtaagatgcagagagacgaatttgaactggattttgtctgtctctgcggactggggaaagaggaagtggacagcctgatcccggagattgtgaacaatgaggatattgcggtgacagtacccggaccggaatcttggattacggtgaaggaaggcctaaactactccatggaccagtatatgtatgtcacaggcagtctgctgggaagccgaaagtctctggacctgattggagcggcgaaacagaaggcaggacgcggggaggaagagaagtcccattttcttgcagcatgccttttgcctgcggcagtgatcacggtctttctgggaaatgcagtcagaaatgagattgccgtgaggaatatgagggaagaaatacaggttctggaagaacgcctttcggtaaaggaaagaaaagaggcgctggcggaggaaaaacagttaaaggaaaaactggcctcattgagaatcctgacggccgggcagagtgcggtgaagaaagaggcggcaaagatgccggagatgaacagcgctgtgagatcgtatatcttcggcacagcagaggggaagctggaactctccgaaccggaatatacccagggtgtactgcggtttgacgggaagtcgcggaagtatgaggaaatatctgattatgtgcgggaactggaagagagcggactgttttcaacggtggaatattccggatttaccaatgtcaatccggttacaaaggaaaaggatgactggtattatgttcagctcgcatgtatgctgaaaacaccggaatgaggaggaaaccatgagaaagctgacgcagagagaaaagatcctggtttatatagcggcggttcttctgttgttaacgggaggctactatctggtagagcagccggccgaaatgaggcgggtaaggacagagacggaacttaaaatcctgcagcttcaggaacgtgaaagcgaagacagccttacgggaaaatcaactctggaggaagagattggcagggaacaggacatggctggtgaaaatacggaggactatctgccataccgcacgaattccgtgctgatttcagagctgacagagtatctgacttcctttgggatagttcccgagacgatgaaggttgaatctgtttcggttctggaagaacaggagacgacggaagccggataccatatccacagggcggacattcatgtggaggcattgggaacgatggaggagttataccgcctgctggactgggcatacgacagggactggatttccgtgatcacatattccggggaggccatggaagataaggacgccgggctgaatggggcggcagatgaaacgggagaaaatgaaacgggagataatgagacactgtccatgacgtttacctgctttatgctagaactgaaaaacgccgatgaaacaaagaacgctgaggaaccgagactctgaagtgaggtggataaatggcagggcagaaaaatggaaaagagggatatgtgcttggctgggtcgtaatcatggttctggttctgatgattctggtgaccgccatactgtttgcctctacggcgtattacaggcagagtttcagagaatataatgacagacaggcatatttaacagcgcgatccatcgtgcagacggcggcagcggattttacaggaagcggatcaggggaattgcgggatgtgctattggatgaaatttcggtatatctgaaagacgaaccggattcagagtcccaagcttccccgcccgatgaagcggccgataaaccgacggataaaccgacagataaaccgacagataaaccggataccgggtatccgatccccaagatcaagttccagctggattccacgatgggaagctgtaccatgaccggctattatatgccggacgaggatcttctgatattgactgccgaggcaaggaagggcggcagtaccgaaattatgacggtttatcttcaacacagtccggagtcggaggaggagccatgggctgtcctgggatatgagcggggagaagcgcagaagggaggaaaatcatgaaacgtaatgttttcaaaaagcattggaatctgacaggacgcgttaggggcatagggtccggaagcgcagataatggttttactctgatggagtccctggccgcgtggacgattctgttgatcgccgttaccatatttttaaagtgtctgggaatggcccatgcctccatgggtaaagggactgtgatgagaaaccagtatatgactgccctggaacgtgtggagctgggaggggaaccgcttagaacgaaggaaacaaaattgaaatttatcatagataaaacgacattttccatggatgcggtaatgatggaatatggtctgccgcagtccggcaagggagaaacacagccggtcacactgaaagtgattggtccggtttcgggagccggggaatgagggataacgtgggcggtaaatggaatgagcgtatgagagatgaacggggaatgacgctgacagagctgatggtatccctggcaattgcatttattctcatgagttttttgatccggatgtatacctatacgggaaacatgcttgaaacgagcgcctccaccgacgatttgaggagaacgacacaggtggtcatcgactatctggaggaccggattgcctgtgcagacagtctggtgatcagcagagaggagctgtctggagaggaattcggccatgaaatcctgttttcagaggatggccggatttactgtgacggggagccggtatgcgaagaagaattttaccggaagagaacggtcttctgccagattctttccgccttctcagaagataacacaccggccttaaagtacaggattacgtggaagaatcaaaagaatacgactttatattccgcagactctgtggtaaaattagttaatttagagctgaacggcagggagataatccgccgtgatctggagaccggggcaggaatgtccgggaaatccctttatatttactacaaagatccggattattcccatggcatagtatttgattgaaaatacggtttgaggttgagagaatgaaaggcatacacattggagaagtgctggtggaacagggagccatcacgaaggaacagctgaacgaagggctgaagcttttgaaagccgggacgaacgaccggcgtctggcggaggtcctgacagatcttggatatatcacggagcgggagcttttagacgtgctgggacgcggcatgggactcgaagtcattgatctggagttttttcatatcgatgagtgtgccgtggagaaaattcccaagcagctggccttaaaatatacggttatggccgtatctatggagggaagcggcttaaccgtggcgacggcggacccgctggatttatatgcgctggaagatatccgtctggtgaccaatatgagaattcagctgattcttgcggtacggactcagattcgtcatgcaatcgagttgaattattcaggaattgacgccagagcagcggcgagactggccagcgagcacgccgtattttccagaacctttgcggaaaatctgatggtgaattccgatgaggaccaggcgcccatcgtccgcctgttaaacagcctccttttgaagggctataatacaaacgccagcgatattcacatcgagccctacgaaaatgaaacggttgtccgtatgaggcgcgacggaatgctgattccctacatgacgctttctccggcaattcatcagggtatcgtggcacgcaccaagattctggcgaacatggacattgccgagaaacggaaagcccaggatggtcatttcaaaatcacactggacggcagggagatgaacgtcagagtatccttcgttcctaccgtctatggtgaaaaaggcgtgcttcgctttttgacgacgaatacgccgattgaccgcagcgccgcatttggcatgtccggtgataactaccggagaatgaaacagctgctgcgggtcccgcacgggatcatttactttaccgggccgaccggaagcggaaagacaaccacattatattctgttcttcagtatttaagcggacgcctcgtgaatattgttacaatagaagacccggtggagcgtaatctgccgaaggtcaaccagatacaggtaaatgagagagcaggattaaactttcagacagggcttcgttccattcttcggcaggatcccgatattatcatgatcggagagacgagagatccggagactgccgagatttcagcacgcgccgccattacaggccatctggtattttccacgctccatacaaacgatgctgcgtcatcggttacgagactgatggatatggggattcccgcatatctggcagcggcatccattgccggaattatatcccagcggcttatgagaaaggtttgtccctactgccaggaagaatatgaggcgaggcccgaagaggtgaagattctgtatggaaggcctgcagaacctggggaacatgtgcgcctgcgccgtggaaagggctgttatctctgcaatgaaacgggatacaagggccgcattgccattcatgagattttaagtgtggacacggagatgaagcgcatgatctcagagggcagaaacgaggaggagctgaaagcgtatgcagtccaccgtcacgggatgacgactctgaaggaagaggccgttaaaatggttctggcgggaataaccacattggaagagatggaacgactgatctatacgattgatatggattatttcggggaagaatgaagaagaataaggaaggggaaaaggccggcaggggaacagtaaaaaaggaggacttcatatggagacagcatggatggcggtcacagccgtctggtcgtggatcatggagcatttaatttacatcaatctgattttttcaatcataattgtattttttcaaaggcgcgatccgaaatctgtctggacctggctgatggttctgtatttcattccggtatttggatttctgttttaccttcttctgggacaggatttggggaagagcaagatgttccgggtcaaggaggtggaggaccgggtctattttaccgtgcgcggccaggaggagtttttaaagacacacgatagcagcctggaatcccatctgtcacgggactatgaggatctggtgctgtacaatttagagacgtcgggagcagttttgaccgtcgataatacggttcgcatttttacggacggggaggcgaagtatacggatctccggagcgagttaagaaaagcctcccgttttatccatatgcagtattatatcatcaaggatgacgagctttttgattccatcagtcccattctggccgagcgggccagagccggtgtggaggtccgtattctctgtgacggtatgggcggccgttttatgccgaaaaagaaatgggaggagcttaaacagtgcggtgtgaaggtaggaatcttctttccgcctgtgctgggacggcttcagctgagaatgaattaccgcaaccacaggaaaatcgtggttattgacaataaagtcggctatgtgggcggatttaacattggccgcgagtatatttccagagatcccaggttcggatattggagagacactcacttaaagctgacaggcggttccgtgctgagccttcagatccgttttgcattggactggaactatgcagcaggagaaaacctgtttaaagatatgaaatattttgagaccggtacggatttattccgactggatcagatcagtccggagattcatccgctgggaattcagatcatagccagcggcccggacgccagctgcaggcagatcagagacaattatatccggctctttgcaaaggcacgcgaccacatctatatccagacgccgtattttgttccggacgatgccgttctatccgcactttccatggctgccaggtccggtgtggacgttcgcctgatgattccgtgtaagccggaccatcccttcgtctactgggcgacctactcctatgtgggcgatctgctgtcggcgggagccagatgctatacgtatgagaacggctttctccatgccaagggcgtaatgacggacagccgcgtatgctcctatggaaccgccaatatggacatcagaagcttcgaactgaattttgaagtcaacgcggtcatttacgacgaggagacgacgaaggaactggaaaatatctttctggaggacctaaagctctgcaaggagataaccagagagggatatgcgtcgagagatttgtggattcgggtgaaggagcagtgcagcagacttttgtcgccgcttctgtagagtcagggaggagactgcattcttatgcgccggtgtgaaacggcggacggaatgcaatctccttctcctttgcggcaggccggttatgaaaacaggcgcctgacgccatagccggccgggagcgggtttcccgagagcagccaggtttttgcacttttttgcagataactgttctccggatattccgagggacaggatttcaaacaaccaaatattcgctcttctgcctgacgggattctgtatcaacgcctgttattgtgtattcattttgaaactgaagaatgttggaaccggctggcagaagatttttaagagccggacagagaagccaggaatggcagataaagacggccggatgcatgctgaaaaaacgggcggcctgctgataagaagcctcgcatgcagaaggggtcagtctggagccggaagggatatggacgtttaacacaggatctcccttttggatcccgtatactgccggtaaatcccaggggcagcagaccggctggaactgcagccggcccagggcaaaaagctgcagacgaagatgaagcgacagccactcgtactcttccagaccgtgagctccggtatgttcaaaacataccttttcccaacgcccgatgtcagaaaacgtatgataaaacacgtcctccggaattttccgttcctggtatttccgataggcgaagcgggtaaattgaaggtaatagaagagatataaaaggctggaatccggttctgcattcaaagcgcggaaaaaacggggcagatccgtatgaaaaagcctccatgcctctaaaatggaccagggagccagattagcagcgcaggctgccgtttcacgggcctgcgcagtcagttccggaaaatcaaaggggatatcagtcataagcattactcctgttcaaatgatacttcaatggttttgcccgttaacctcgacttttctgccgcaaaacagatcagatgactctgaagactctgctgcgcggacgatttatttttggtaaaatcaccttccctcaccatggcgacaaagttttcaataaggcggtaatcaccgcctccatgatggtaggctgcggatacgtcaggaagctgcggacagcagacctcttcattagcactgccaaacaggtgaaaacgaatttcgctgcggttcatgtcaccggttagctggccttttgtacccatcagtgtcagggtacggttgcagtcttcagtgaaggcagtcatgataaagctgaccacggcggaattgtcaaattccagattgacagcctgatgatctaccacatgattatcacagtgatagacacagcggccgtaaggtccatggcgcagggcttccatcagtttttcccttcccggttccgttgtcaccattgacacgaaaccgtctgaaactgcctttggatgctccagatagaagcggggagcgtagtaggggcaggaaccggaggacggacagccgtcgaggcagcgggagggcgcgccagccggtgcattttccggtttgaaatgtgtaagggatccgaaagaggagacctttgtacaggtaccgcctgtcagccaggaaagaatgtccatgtcgtgacagcttttctgaagaatcatgggactggaggtggtatcgtctgcccagttgccgcggacaaaactgtgagcctggtgccagtagcccacgtgctctatttgctgcactgccagaatctttccgagacgtccgctgtctatgattcgcttgatctcgctgtaaaacggagtgtagcggagtacgtggcagatgcttaaaagccgtttgtttttttcagcggccgccccgatccggcggcagtcctcttcgcgtaccgccatgggcttttcaagcagcacatggtaaccgagctccagcgcttttaccgcgggcccggtatgcatctgatccattgtgcagataagcgctgcgtcagcgaaacgcggccgttcgagaagtggttcccatgtttcatatacggagtcttccggtattttgtgagcttttttcatggcttcccgttttgcagtatccggctccgcaatggcaacaatctgaaattcgtccggatggtccagcgcataccgggcgtatacgccgcctctggcgcctgcaccaagcagtactgctgttattttctttttcatatcgatactcctttttttaccccttaattcctgaagatatgatgcttttcttgatctggcttgaaaatatgattgtgagaagcatgacaggaagaatggaaagcagggataatcccataataaaattcattttaataaactggttttttgaaatgttatagagcgccacatttaaggtccacaggctttgcttttcagtgacaagccaagcccagaaaaagtcattccagtttgccagaaaggtctgaagcgcaattaaggaaataataggcttcgacagcggcatacagatttttacaaagctgtaccagttgccggcgccgtcgattctggccgcatcgaagagactctggggaagctgatcgaaaaagcccttgtataaatagatatagaaaccgtagggcagcaaaaacggcatcagcagcgcacggtagttattataaaagcccagtctctgaaacatggtaaactggggaatcatgatcgatataaaagggatcatagtacttccaaggaaaaaaaacaacataattccggataactttttcggaagaaggcgtgagatggggaatgcggtgattccgcacagcactacctgagtgactatggcccatgtaatcacgagagcagtattcatgataaaaattaaaaagctgtagcggcttaccagttcgtttttgctgtacatcacagaaggaagctggaaatagtaggagaaactttccaggagcagaaggttatttttatgactcgttatcgcagtgagtgccccatggagctcgtatttttcctgaaatacagcctgtatcctggaggccagttcctccccggaattttttatccggaattgatcccctttcggaatcccggccggatcatactgatatcccagaaaatcagaagctttttcccaacgctttggatttagcagaactttgggttccatggtggcatgggagtaaagccctgcatctctttgcagctccagggctccgcggtgtgccctggactgaaagaccggaacgccatcccttgtgccgacgagtctgacttcaaacacagagtcctcatccatttcatagatcgtcaggaatccggtcagaatctgatcctggcgcatagcctccagaagctggtcctccggtacccggctgtaatccagttcaaatgtaacgctgttagccgcatagggaagcagcctgggcggcagctcatacagttttttgctgtctttcatggaagtggccgctatgtaaagcagaggataaagaatgacgactgcgaagaagattgatacggcataagctgcgattttcaggcttatcgtactgccaccggctttgattcctgtctgtttttttcttttcatgttattttcccccctttattctgcttcggactggtccattcgcagttgaagaaacgtcaggactgcaatgacgagaaacaggatacaggatgccgccgttgcttttccgtaatccaggtctgtataaaaggtagagtagatatagacccccatggaggtggaggcgccgctgggccctccggctgcaaattggtaaggtgcatccagaatctgcatggaactgataactgccaatactaactgaatgataatgatgaaccggatattcggcagaatgatatggcggattcgctgccagccggaacagccatctaactggctggcctccagtacatcttccgaaataccgttaattgcggataaaaacaacagaactcccacgcctccgcccacaaatccgggaaaaataatacagaatttagtcagtgctggattactgagccacatctgctgcggcaggccaaatgcttttacaatctggttggcaagaccgaaatcgggattccagatccatttccacaggataacgcttacggaaatgggaatcagggcagtaatcaaatagatggtgctgaatgtcttctgaaaacgcttcagctcatttaaaaagattgcctggaccagcggaacccagaatacgaggaacagctgcaggatcaggaaaataaacgtatttttccacgcatccaaatagtaggctgcggtaaacagattgatataattctgaaatcccgcaaaatgtcccggtggattgactgcatcataactgaacagcgacatgtaaaacgattttatgatcggataataccgcagccataccgtaaatatgattccaggcagcatgaacagccatggagacagggctttgcggaaggaagcagagtgaaacctgttattttccatagtgactcctccttttgagctttaactgttcttattatatcgaacttcaactgccttttctgataaacaaaattaaccaaacaggagacataattaatatattttatttaaaatatctgcaaatggctgaaaaattaaggggaacatgttaaaattgttacatatatacgctgcgtttgtctctatgtcatagtaaaaatatcctgtagaataaaaatataacaggttccggcatggagaaggcacctgccggaatgacataataaaggaggattttatatgagacgtagacaggttatgaaaaaagcggcagctatcctgttaaccgcagctgtggcggcagggctaaccgcctgtggatctaagccgtcggaaacgcagagtacggcagccgaggtgaaaaaaacagaagaggaaaaaacagcggctgaaaatgggaaggcagcggaggacaagggaaacggagaggctgttacactgaccatgtgggtggaaagtaagaatgagaccgatataaagcaggaactggatgaagaattcatggaagaaaaccctgacattatccttaataaggtaatgaaagagggagacccgggaaacgatttttatcagggggttgctgccggcaacgcgccggactgtgtaacggtttccttcactttaatggacaaatacgccaatgccggtatactggctccgctgaatcaatatttcgatcagtgggatgagaaagacggattctcccagtcctatgtggatatgtttacaaagaacgggaatctctatggaattacttcaatcgatgcgaatttcctgctggcttacaacaaggcggtattcagggaagcaggaattgaaaatcctccggcaacatgggaggaggcttatgagacggcaaaaaagatcacgaatccggatactcagacgtatggctatggtgtcctcggttcggagtggaccgactggttcttccagtattatgtatggcaggccggaggtgatttaacgaagagaaatgcagacggcactctggaactcacctttacagatcccgcagtgattgaggcggcaaattattatcagaagctgcgccgggacggtgtcagccagccggatctgaccctgaaattcaacgaactgattgaaaaatttgctcagggcaagattgccatgatgccgttcgctacggattgggtgagcacagcggcaagcctgggagcaaaagtggatgacataggactctgtccgttcccggcgggtccttcaggaaagagtgttaccacaagccttggatacaactgggtaattaacgcgaagagttctccggaaaagcaggatgcagcatggcgatacattgcttttatgagttctaaggaatccatggaacgtacgattgaagcttctgcagacaaaggagcggtagatcccattcattatccgcgtacagatgttaatgtaagtgaattaacagatatgaacccggaatatcaggaggtacttaagaagattgaaggaacaggcaggcttgagtatgaaggaaaagacataatttctccatatgtagaccgtaccgttcagaaaatcctggctgatttaaatgcagatccggaaaaggaatttgcagcggcttccgaacaggctcaaaaagaggtcgtagaccagtataacaaagaggtattggaaaaggcagaaaaataatgatagatatttccagaaagaaggctgcatgctcgccttctttttggtgtatcgtcaggaaaatcagcaggaggctcagtcacgatggaaactctggaaaaacggaatgatcttgtaggatggcttttgggtatatgccgaaaaacctctatttttgtgcgcctcatcattctttcctgtactcttttgatgatacccagctgtcttcttatttttctcacctttcatgtgtataccagtgatttgtttaagacgacgcttcagctgtttaagaacaacaacctccttatcgggagttccatatcccatgtcctgaaacaaaatgaacagttcctttatgaaatctattccgacgaggagctgaccggtgcgctgatcgagctgtaccgtctggaaaataatccggaggaggatctgtccgataaaaaggagattctgagagatcagatcaacagccgtctgtaccattactatacggacggagacagtctgatccgcagtatacagatcatcacggaatacgaccagttttctccggtcagtacatacgggaatatggcgggggcctggattcctgacatatccgcctttcgggacagtgatatctatcagaaaacaatcagggcttccggaacgccggtctggttcgatccgcctcagttttacaacaccttttaccatcagaccatgttcaatacgcctctggtggacacgtttgtgcttgcgcggtcgattcccagctatcaggttaattccagcctcggtatcattgtaatcaatctggacatgaaatctctgctaaaaaatgtggatgcctccaccctgacatcggacagtaatcttctgcttatgggcagccagcccctgtggtctttcaatgtcaatatcgaaggtcctaccctggcatctgacgatccggttatggaacaggtgaaaggcagggaagaaggggacatagaggcggtgattcgcggggaagcgtgtgaactcaccttccttcgcatcacagggaccgatatgtacctgatcaatctggcctaccgtgaccggctgtttgagcggcctctgatgctgcgcaggttcagctttctggtgctggcagtcagtctgataatcgccgtcttcatcgcatatattattacggtcagtattgtatctccgctgaaccgtctgaagaataccatgcagaccgcttcaagaggaaatctggaggtggaatatgaagatccggcaggtgacgaagtgggaatactgggacaaaaatataatgagatgatcgccgatttaaaaagcctgattcaggaaacctatgtatccgagcttaacaaacgccatttggaaatgctgaaaaaagaggcggaattaaacgcctttcagatgcagatcaatccccattttctatataatacactggatatgatccggtggaaagccattgcagaggaacagggggatggggaagtaagccatatgattaaacagttttccgatcttttgagactgggaattaagaagaacagcgtgattgttcctttttcagaagagctgagccatgtggacgcctatcttgcgattataaatctgcgttactccgaacccattcagcttacggttgatctgccgttcgaccccggagacgtaacgattgccaagctgtctttgcagcctcttgtggaaaacagcgttattcatggctttgacagtactccggcggagatttcccataagaggatcgccataagcgggtttatcgagcagaatctgattcatattctggtggaggacaacggaatcggaatgacgcaggaacagatggaggcattaaaccgggaactgaaagaccgtgttcatacgcagggtggaatcggagtgttcaacgtcaatgagcgtctgaaactttattttggcgatgactgcggactgtattaccagagctctccattgggagggacaggaatcgagatgcttctgcccaaacagagtcaggagcaggagatctagtattcgggaggtaaggacagatggaaacgaaaaaattatatcagcttctcattgtggatgatgagagctttgtgcgtcagggcctttctcagtatgtggactgggaggcgctgggctatacggtggcgggaactgctgactgcaaggagacagctctgcattttctggaggaaaatccggttgatgtcattctgacggatatccgaatgcctgatggcaccggactggagcttctgcaggaatgccgcggcatacagccggatgtaaaatccgtgattttaagcggttacggggagtttgaatatgcgcagaaggcgctgaggctggggagctttgatttcctcacaaaaccggtggatttttctcagctcactgctatttttctcaagctgcacgacaccctcagccagctggaaactcagaaccggaatttacaggaggtataccggctgaaaaaagataatttttttcataatgtgacgaagtattcggtagaaccggaaacactggctcaacggtgcagagaatacaatctgccgccatgcggccgctatgggattttaagaatcagatatcccgacgcagagaactgccttcctggcctgccgccggattgtagagaggcggtcagccggctgatcggggagagcggggccggtgaccgctgctacgtttttccaaatgaagcacatgaaattacagttgcgctgtatgatattccgaaaggggagacggcaggtctcctggaactgttgaaaccatatttggattaccatgaggccatagccggcgtgggatccttttatgagggcataggaaaattaaaagaagcgtaccaggaggccggtcaggctctggaataccaccatctccagacagaagagcggatcatagaatatggtaaggcgagtggacagattgattttggcgcggcttacagccagaacagtaaggaatccatgttagactgcctgtcggagggacgttccgatctgctggcggagtttctggtcagtcatattgacaatctgatagccgacggaagttctattgatacgatcaaagcgctggccatcaattcgattctggtggtggaagagtatttaaagcagaatacatcctgccgtgagactggaaacggtattcaggagttgatctgccggatcatttccatgaagtcgagacaccggattcaggatattgccagagagtatctggcttctacggcgcctttgattgaatctgccaaaagcaggagtccggttattgaccgtgcgttagtttatatcagagaacattattcggaaaacatcacgctgcagtcacttgccgaggacatttacctccatcccgtctacttgagccggctgtttaaagaaaaggtcggtcagacatttctggagtatttaactcattaccgcatcgaaatggcgaaagactacctgcgtaatcccaatcttcgtatctacgatatcggtcaaatggtaggatatgaaacaccgcagtatttcagcagagtttttaaagaactgacaggaacgacaccgaagggatttcgggaggagctggcaggaaaaggggaaaaacacgaaaagggtgtttaatccccttttcggttttttcccggctttgggtgcggggaaagaacctcttttttctttatttccgttcataaaattaccgctttgggtacatactggtacttatgaagacgacaacactaaacacaacaacattcaaaaaatttacaatcagcagcacggcgctgcagctaaaacagcttccggtcaatttttgcaaatgcggaatcacaggctggtgcctggaggtcctttttacttcagcggaatcgatcatgaggcacgactggaggctgatggggaggacgtcccttttgatgttccctatctacggctgcggagcgcttctgggacccatcggtaaatggattgacgactggcttaatccgggcagagtattaactgtaaaaaaatcggatctggcagtgcgccacgggatgctttacatggttctgatttttgtggcggaatacgcctcaggagcgtggcttcggtcacggggaatgtgtccgtgggattatacggggcgcagtacaaatattgacggcctcatacggctcgattttgctccgctgtggtttgctacagggcttttatttgaacaaattacgaaaaagaaaggcgggtaagtcttgtaattacactcttcattttatataatagtaaaaatggaggggaagaccaatgatacgttttatatttgtagcagctacagtcattctgtttttgattttgagtattccgctgatgctggtggagtttctgatcgggaagaaaaaccgccatctgcgcgatgtgcagagtctggccgtgatccagtgtgtattccggctgatccttaagatggcaggggtgaagattacggtaaagggaagagaaaatgtcccgacagaccaggcggtactttacgtagggaaccaccgcagctattttgatatcctggtgggctatgtaacggttccgtccctgaccggttttgtggctaaaaaggagatggagaagattccgctgctttcatcctggatgaagctggtcaactgcctttttctcgaccgtgtgaatttaaaggaaggcttaaagaccatccttgcagggatcgagcaggtgaaacgcggcgtctccgtatggattttcccggagggaacaagaaataaaaatgacaatccgctggatttgctgccatttaaagagggcagcttaaagattgcagaaaagagcggctgttacgtggtgccggtggcgctgaccggaaccgcagaagtttttgaacagcattttccgaagattaaaccgtcccatgtgaccatcacctttggagaaccgttccacacaaaggaacttccgccggaagtgaagaaattcccgggcgcctatacagaagaacagataaaggccatgcttacgcttcagctggcagaaggacaggatttatgagtacattcgatttacaggaaatcagaaaacaactggataagatcgacagggaaatcgtgaccctgtttgaagaacgcatgcgtttatgcggtgatgtggcggaatataagattgaaaacggcagaccggtctatgacggagatcgggagagacagaagctggagtctgtgaaggccatgacggacgacagcttccagaagcaggccgtggaagaactgttcagccagatgatgacgatcagccgtcggtttcagtataagctgatggcggaacacggactgaccgccaggatggattttcaggccgtgaagggacttcccatgcagggggtacgcgtggtctaccagggcgtggaaggggcgtacagccatgaagctacacttcagtactttggagatgacgtggatgcttaccacgtgcagttctgggaggacgccatgaaggaagtcgaggcgggccgggccgattacgcggttcttcccattgagaattcctcggctggagcggtcagcgataattacgatctgctgatcaagtaccataattatattgtggcggagaccttcattccggtcagccacgcactgctgggacttccggatgcggaactttcggatatcaccaccgtattttcccacccccaggcgctgatgcagtcttcccggtacttaaactcccaccgggaatggacgcagtacagtgtggagaacaccgcggcatcggcaaagaaagtcttaaacgacgggaaaaagaatcaggcggcggtggccagcgagacggccggccggctgtacggcttaaaggtgctggaaccttccatcaactttaataaagacaataccacccggttcatcatactgtccagagaacccatataccgggaggacgcgtcaaaggtaagcatcagctttgaacttcctcataccagcggctccctgtacaatatgatgagcaattttatctacaataacgtcaacatgcgcatgatcgaatcgaggcccattccgggaagaaactgggaataccggttctttgtcgacatcgaggggaacttaggcgacgcgcagattcagaatgcgttaaaggggattgaagaagaagcgtccaacatgagaattttaggcaattattaagggatgaagaacggtcaggcggccgcaggctgcctggccatttcgaaaaataagggaggaacatatgaaatcgcaggaactcattatctaccgaaatctgcagcaccgggaactgtttgatcacgtttccacacttctggccgtggggccggatgacaagccgggaacaatgccggattcctatgcctgtgccagccagctgatcgacatggcggtgacttacggctttgaggggaatctctggcattgttttttagcattctgccttgccaataacgaaaatgtatacagcacctcatgtgagattgtgggccatatcgaaggttctttaaatgaactggccgcccatgacttcaacgtgatcaaggaactgtttgattacgatatccgcacactggacggaggagacggccggacaggcggtatctggtccgctctttcagactatcatgcggccaacggaaacagccgcgtgtttaataagagaatccgggatcagatcgttgctctggccgtggaactggagcaggccgtggacgtggaggccttcggaagggctgtgacggaattttaccgccggttcggcgtcggtaagtttgggcttaacaaggcattccgaatcgaggagatcgatcacgaggtccacattaatcccattcccaacgtggaacatatctatctggacgacatcattggctatgagcttcagaagaagaagctgatcgagaacacggaggcgtttatccagggaagagccgccaataacgtgctgctgttcggcgacagcggaacgggcaagtcttccagcatcaaggctattttaaatgagtactacgatcaggggctgcgcatcattgaggtatacaagcaccagtttaagagtctctctgaagtacaggagcaggtgaaggacagaaattacaagttcatcatctatatggacgatttgtcctttgaagactctgagctggaatacaaatatttaaaggctatcatcgaaggcggactcggaaagaagccgggcaacgtactgatctatgccacctccaaccggcgccatttaatccgtgagaagttcagtgataagagagaactggatgatgaattacataataacgacaccgtgcaggagaagctgtcgctggtagccagatttggcgtgaccatttactttggttctccggataagaagcagttccagaacattgtgcgggagctggcggagcggtatcatgtaaatatgcctttggaggagctttatgcggaggcaaataagtgggaactgagccatggaggactgtccggaaggactgccagccagtttatcactcacctgatggggacacgggaagattttacacaaatttgacacatgtccttacaaaaggatagtataatggaaaggatgttgcccgtactgggcggtaaggaggacaagtatggcaattaaactgtttgcagccatcgacgtgggttcgtttgaactggaactcggtatctatgaggtttcgcccaaatacggaatccgccgggtagatcatgtgcgccacgtcatcgcccttggaaaggatacctataaaaacggaaaaataagctacgaactggttgaggagatgtgcggcgtcttgcagcagtttgcggagattatggagtcctataagatttcagagtaccgcgcctatgccaccagcgccatgcgcgaggcacgcaacaatcagatcgtactggatcagatccgggttcggacaggaattgaggtacagatcatcagcaactccgaacagcgttttatcagctataaggccattgcctccaaggatgcggaatttaataagacgatacagaaagggactgccattgtggatgtaggctttggcagcatgcagatatccctgtttgacaaagatgcgttgatttccacccagaaccttctcctgggggttttaaggatccgggagatgatgtccaacatgcaggcagacatccggatggagaataccctgatcgaagaactggtagacaacgagcttatgacctttaaaaagatgtatctgaaggatcgggagatcaagaatttaatcggaatcggcgaatgcatcctctatctgtccaggggaagcggaacgggtaagcctgtggaccgggtgacagccgaagattttaaggcattttacgaaaagctggtggatatgcctctctaccagatcgaggagcggttcggtgtcaacagcgactatgcggccctcttaatgccggccgccatcatttaccggagagttctggaactgaccggcgccgagatgttctggattcccggaatccgtctctgtgacggcattgcggcggagtacgcggaggagaccagggcggtaaaattcagccacgattttaccgaggatatccttgccgcatcccgcaacatggcaaagcgctacaaatgccacgcctcccatacggcggacatggagaagcacgtactcgatattttcgacagcatgaagcggtatcacggcatgggaaagagagagcgtctcctgctgcagatttccgccattatccactcctgcggcaagtttatcgggatgaaatatacgggtgagtcgggatacaatatcattatgtcgacggagatcatcggtttatcccatatggagcgcgagatcattgccaatgtggtgcggtataacagcattgatttcgattacaacgaggttatatttaatgaagacctgtttcgtgatacaaagggggagctgacccataatgacgtgaccatactgattgccaagctgacggcgattctgaggctggccaacgccatggaccggagccataagcagaaactccacgactgccgcttaaatgtcaaggagggccagctgcttgtgaccacaacgtatgggggagacatgaccctcgaggcggtggcatttgcccagaaagcggatttctttgaggagatcttcggaatccggcctgtattaaaacagaagaggaggttatcctgatggcagatattgatgaaagattttacaatccagacaattatgtaaaccgtgaactgagctggctggagttcaactaccgggtgctgagcgaggccagggataagaacctgcctctgtttgaaaggctgaaattcttaagcatcacctcatcaaacctggatgagttcttcatggtccgcgttgcctccttaaaggacatggttcacgcaaaatatactaagccggatatcgccggcctaaagccctccgagcagctggagaagattggcgtaaagacgcacgagatggtggccatgcagtattccacctacaaccgctccatcctccctgccctaaagcagaatggcctgtgcgtggtcacaagccatgttgatttaaatgcagagcagggcgcttatgtagatgagtatttccgggaaaatgtatatcccgttctgactcccatggcggtggattcttcccggccgtttccgttaatccggaataagacgttaaacatcgcggcgcttctgcagaagaagagcggggaagaggatttagagtttgcaatggttcaggttcccagcgtactgccgagaattgtggagattccggccggcaggaagtccgggcggtccgtgattctgctggaagagattattgagcggaatatcggttccatgttcttaaattataatgtgattgcctacagcccattccgtatcatgagaaacgcggatttaaccatcgatgaggaagaagcggtagacttactggaagagatccagaaacagttaaagaagcgtcagtggggcgaggccatccgtctggaaatcgatgaaaagatggacaaaagcctgctgaagatcttaaagagagagctttccatcagctccggcgatatctatgagattggaggacctctcgatctgacattcttaatgaagatgtacgggcttgaaggcttcgagcatttaaaagccccgaagtacattccgcagcgggttccggcgctgatgaatgaggacgatatcttcaccaatatacgaaaaggcgatatcctgcttcaccatccgtatgagacctttgcccctgtggtcaacttcgtaaagagcgcggccaaggatccggatgtactggccatcaaacagacgctttaccgcgttagcggcaattccccgatcatcgcggccctggcggaggcggctgacaacgggaaacaggtctctgttctggtggagttaaaggcgcgattcgatgaggaaaacaacatcaactgggcgaagaagctggagaaagcaggctgtcacgttatttacggtctggtagggttaaagactcacagcaagatcactctggtggtgcgccgggaggaagacggaatccgccgctacgtgcatctgggaaccggtaactacaacgattccaccgcaaagctctatacggacttgggactcatgacgtgtaacccgcagatcggcgaggatgccaccgcggtgttcaacatgctgtccggttactctgagccgctgcactggaataagctggtggtggctccgatctggctgagaaacagattcttaaagatgatccgccgggagacacagaacgccttaaaaaagaaaccggcgcatatcatggcaaagatgaactccctctgcgacaaggagatcatagccgcgttatacgaggcatcctgcgccggagtaaagattgagatggtaatccgcggcatctgctgcttaaaggcaggtattcccaatttaagtgagaatatcgaggtacattccattgtcggtaacttcctggagcatgcccgcgtgttctattttgagaatgacgggagcccggaggtatatatgggaagcgctgactggatgccgagaaacttagataagcgtgtagagatcatgtttccggtagaagaggagtccttaagggaacaggtgatgcatgtcttaaaggttcagctggaggacaatgtgaaggctcatattctgaagccggacggaacctatgagaagccggataaacgcggaaaagtgctggtgagcagccaggaacagttctgtgaggaggcgattaataacgtggaagcagaactgggaaagatggatccggtgagcaaccgggtgtttgttccggtgaacagttagagggatgtgctgtgagagaaaagcagtagcgcaggacgttttttgaaatgagaatatggtaacagggcggttcatctctgatggggtgagccgtctttttttgagccgggagagggcggagaaatttgtgttgaatgtagagaaatattaggaaaaaagtaaagatattgagggggtaaaatgatagaataagtttatggtgaatgagtaacgggaaaggcggtgtcggcgctgtgacagcggtatatgctcttgttcatatggcagtggatttatcctgtgcttttctggtttttgcatatgtgtcagggggagagcggtggtatctttggctgctgatttataatttctgcgcatttgccctgcagatgccgattggtgcagctgcggaccggttggaccgcaacagctgcgtggcggcgggaggctgtgccggcgtgctggcggggcttctgcttggaagcgtgggatttccggctgctgctgccgttgcagctggtattgggaacgcctgctttcatgtgggaggagggatcgacattctgaaccgaagcggggggaacgcggcgcctctggggatttttgtggctcccggtgctctgggaatttttctgggaaccatgcttggccgggcaggaaaggggccggaggtctggcttggagggcttctgatcctgtctgcggctgcgatccgtttgatggcgggaagagagaggctgtggacctcatccgggaatgcaccggtttcctttgcggtgcagtcggacaaaacggtgccggctgccgcctgttttctggcggctgtgattcttcggtcgtattccggtatggtgcagaactttccgtggaaagagacgctggcgggaagcggttttattctggcaggagcagtagtactgggaaagatggcaggtggtgttttggcggataagacaggagtttggaggactgcgttctgctctatgtgcgcggctgcggtgggatttctctgtctggtttacccggccgcgggtattctggcggtattttgctggaatatgtccatgccgctgacactttgggccgtcgcggaggcgtttccgggagcgaagggctttggcttcggtctgctgactttcggcctgtttgtgggcttctgtccggcctggcttggcggaagcagcgtcggtttcgcggctcagtccggcatccggcagctggccggagctgcctcttcgcccgtcggcctggctctgatggcagtgctgtcccttttgctgctggactggggacttaagcaggtggtgaaatgatggggctgtggctggtgcccgttctgctggtgtcgctgggacttaccattgctttggaggaagccttcggctggcttgccggtgtgcgggactggtggaatcgtctgctgattgtactggtcaatattctgacgaatccggcggtggtatttctttactacgtgaatgatctgtatctgggctggaatcccatgatcgttactgtggctctggaagcagcggcagctgcagtggaagccgtatgctatagatcggcagggaaaatacgccgcccctggcttttttcgatcggcgcgaacctgttttctgttacgctgggggcggtggtgacaaaatgcttttgaagcttgcggcggtttctattgaacggtttgactgaatctgccatcataaataaacagggaggagagaacagaatgaaagaaatgaatcagaaaggagtcagcagaggcccggcaatgaatgtaaaacgtatcctggctgcttccgtatttatcctggtcctggcgtcctttcttctggtgccgggaagaagagcatcagccgatgtgatctggacgccggatgatacgttttatgagaaacattatgaagactgtaagtatataggacgccgttactacgccaatggtgcagacggatatgtcacagttgtggaaagccctctgcgcagaaacgtgatcgattttatagccaacggcccggtcttattcgtttacataacttacgacaaagggaattccgggacctggggactggtccagtacgttctggatgaggaaggaaagccgaaaacggatggtaactgggaagaagaggccgccgtgggctggattaagatggaagagctggtgaatgtatacgatggcatcagcttttccgaagagcacggggcggagattcaggagacggatgagagtacggctcccagagtaattatgccggatacgggagtcatctgcctgtgggaatatcccggctcggatatttcttatggaaaactggaatcactggagagtgagatatctatcgaccggacgtatcgtgatcccggcggagatctctgggggcactcgggttactatttcggccacagggacttctggattaacttaagcagtccggacgagacgaatccgaagttagaaccaaaggcggcgccggaactgatcccgcctgcagacagtaaaacgctggaaagtcttccgaagacaggaagatccggcctgggactgccccttgccatggccggattaattattttgacaattgtcctgaccgtgtttgcaatacggtttatggcagtgaaaaagaggggagaagaaataacggagtaggaaatatcatggtaattttgtaagaaaatagtaaagcaaagaaccctttcttgtggtagaatggaaacagactaaagctgaaataacacaagggaggtatttttcatgtcagaaactacgaacattctggtggtagatgatgaaaaagagattgctgagctggtagagatctacctggtcagcgacggatataaagtatttaaggccaataacgccatggacggattggatattctggataaaaacgagattcatctggtgctgctcgatatcatgatgccgggcatggatgggatggagatgtgcagaaagatcagagagacgaacaacattccgattatcatgctgagcgccaagtccaccgacttagacaagatcatgggactgggaacgggagccgacgattatgtgaccaaaccgtttaacccgctggagctgacggcccgtgtgaagtcccagctacgccgctacacacagctgaatcccaacagtgcagtgaatgagaaggcgggcaacgagattaccatccgcggactgattatcaacaaagacaaccataaagtgaccgtttacggggaagagatcaagctgacgcccatcgaattcgatatcctctatcttctggcgtccaatccgggccgcgtgttcagcacggatgagatattcgagaaggtgtggaacgaaaaggtatatgaggccaacaatacggtcatggtacatatcaggcgtctgcggggcaagatgaaggaagacacgaggcagaacaagattatcaccacagtgtggggggtaggatataaaattgaaaaatgacatgaaccggcgcttccgcacccgcgtgataacaaatattttttacagcgctgtcgttaccgtcttaatcgagatcttcctagtaaccaacgtatccctgatcgccacctatatggataatgcgggaatcgataatttctttatatcgattctcgtaacctttgatgtggtggttattctgatgtatgtgctgtttggcatccttgtctttaccgtcacatttatgattcttcaggaaaagtcgctccgctatatcacaaagatttccgacgccatgcagaacatttccgaaggggatttgaatgtcaccgtggaggtggagggagacgacgagttttcttccatggccgccaatttgaataagatggtagaagaattaaaggaactgatggataaggagagagagtcggagcggaccaagaatgaactgattaccaatgtggcacatgacctgcggacaccgcttacctctattatcggttacttagagctgctctccggagatgtgaagctggatccggagctgcagaaaaagtacataaatattgcctatgtgaagacgaagcgtctggaaaaactgatcgaggacttatttggttttacaaagatgaattacggaaagctaaccatgcatgtggcccaggtggatgtggtaaaactgctcagccagctgctggaagagttttatcccagctttgtagacaaaaacttatcgtatgaactgcagagcaacgttcccgccaaggtgattaccgcggacgggaatcttctggcccggcttttcgacaatctgatcaacaatgccatcaaatacggtgcggatggaaaaaggatcatggtaaagctgcatgcggatgatgagattgtcacagtttctgttatcaactacggctatgtaatccctgcggatgaactgccgcttatctttaacaagttttaccgtgtggaacagtcccgttccaccaatacgggagggaccggactgggcctggccatttcaaagaatatcgtggatatgcacggcggtacaatcactgtgaccagcgatttgtccggtacggtatttacggtgaaactgaaagtgaattttgacgttaacaaggaaaactttggaaagataggatgacaaaaggatgagattcagaaaaaatacccttgtatgggcagtgatactgagtatggcaggcagtgttctactgcctgcctcctgtgtaacggcctatgctgtgcaaacgatgacggagccggccaataacttaaatacggagtccgatatctatctggcgtcgtcgccggtcgtgatggatgtggcttacggatatgacggagcggccaagagcggccgctatgtgccggttcgcatctctctggccaatcaggaacagaaggcgtttgaaggaacgattcgaatccaggcgatggagtccgactatgatatttatgactacgattatccggtatccttaggcgctgaggagaagctggagaaatccctggatattcccgcgggcagaggcgagattctgtatgtaaagctgttcgatgggaatggcacggagcttgtgcgcaagcggctgagaatcaatgtgagccgcgaagttgcagaactgtatgtgggcattctttctgattccccggaccgtctgaactatttaaacggcgtgggggtcaattacagttcagtcaggacaaagacatttcatatgacggcggataccatgccggataaggcggcggggctggaccttctggatgtgcttctgatcacggactacgatacgagaaagctttcagacagccagacaggggctgtctgggaatgggtcaggggaggaggaactctgttaatcggaaccggaggccgcgcgaatgataccctggcagcgtttcgtgaggagatcgtggagacggcatttccggcaccggaggtgcgctccgtggatatgggcgtggaatacgccaccgacggccctggagattcctttatcaatctgacctgtgcagacatctcgttaaagggcggtaccgaagtgctggccaacgacgagtttccggttctcacatcgactccgaaaggaaaggggctggtgggagttgcagcttatgacttcgtggacatcgcggacttctgtgagacacagcgctcctacgtggataaacttctgaccgcccttctgggtgaagataagctgaataacttatcgtcctatctctattacggcaattccagcaaatactggtcggttcagagtattttaaacacaggaaacgtagataagctgccgaacatgcctctgtatgtgatcgtgattctcgggtatatcattctggtgggcccggggctttatctgctgttaaagaagcaggagcggagaagattttaccggacaggagtggtcgttctttctcttgcctttgcggctgtcatctatcttatgggagtcggaacccggtttaaaaatacattctttacctatgccacgatcctggatacctcggaaaagtccattgatgagtatacgtacatcaacataaggactccgtataataaaccgtacgcagtttccctggatcccggctatgacctgcttccgattaccagaagctattattacgatatgacgccggtaccgaagttcacaggcaccgaggagagcaaggtgagggtggaacacggcctccaggagacgaagatttccgcgcagggtgtggttgccttcactcccaagtacttctcccttgtgaagaagagtcctaacacggagcatcagggactgacggggaatgtcacactgtttgacggccggataagcggtacggtgacgaatcgttacacgttcccggtggaaaaagtcggtgtaatgatgtatggacagatggtagtgatcgatgaactgggaccgggagagacagtgtcgctggacggtctgaagatcatcaattatccgttaaacagctcttacttaatcgcagagcgggtaacgggcggatatcagtatgagaagccggatatcgaggatgagaactatatgctggcgctttcccgttccaagattctgagcttttacctcgatacgtatgcctctgtctacagtccagaggcgcggatcgtagcgtttggcagggaacagtctgacagcaagtttctggcaaagggggactttgagacctacggtatgaccatgtttacctcggccctggatatcagtacgaagaagaacggctatacctaccgttcggcgctgatgaaggcgccccacgtggtgagcggccagtattacgcccccagcaattccgtctacggcatggatccgacggttttagagtactccctggggaatgatatcgaggtggagagtctgacatttgaaaagatttcggacgaattcctggaaggtgagaagaacaacggattgtccctgttcagcggaagcatctacttctataatcatgatacgggaatttacgatctgatggattccggaaaagacgtttatactgcggatgaactggagccttatctgtctcctgggaatacgatgacaatcaaatatatctttgacaacaatacggattacagctgggtgacactgccgatgctgaccgttatgggaaaggataaatgatgctggagatcagaaacttaaaaaaaacatttggaaaattttacgcgctggatggtctggacatggatatcggcgacggggcgctctacggcttcgttggacccaacggagccggaaagacaacgaccatcaagattatgaccggactgctggaggcggacgaggggcaggtactgatcaatggagtgaatgttacgggaggcctgtcccagctgaagcttaagatcgggtatgtgccggatttctttggcgtatacgacaatttaaaggtcagtgaatatatggagtttttcgcctcctgctatggaatctatggcctgaaggcgagaacgcgttatatgacgcttctggaacaggttggtctggatgacaaggtgaatttctatgtggacggcttatcccgcggtatgaagcagagactgtgtctggcgagggcgctgatccacgatccggcccttctcgtcatggatgagccgacttccggtctggatccgagaacccggtttgaatttaaggagatcctaaaagagctgcgggagcagggaaagacgattctgatcagttcccacgtcctctctgagctttccgagctctgtacggacatcgggatcatcgaccaggggaagatggtgttaagcggcagtatggaggcgatcctgcgccgggtcaatacctcgaatccgctgatcatctccattctggggaacaaggagaaggcgctgacgattttgaagagccagccctgcgtacagaccatttccgtaaaggaaggcgatatcatggtccagttcgtcggggatgaggaggacgaggcggttctgcttcagcagctggtggatgcggaagtgatggtgcacggttttacccgtgagcccggaagcctggagtccttatttatgcagataactgaccacgatgtagaaaaggcggtgttggtacatgaaaatgaatccggtatataaaagagagaccaccgtcagctccagaagcttccggctggcgctgattatcatggtatttaacggaattcttgccctggtggccctgctcaatatgtattccgtggttgcgagagtaaagattacggcggagattcaatactcctccttcctgaacctctatgtatttgtgagtgtggtagagtttgtcatgctgatgttcatcatgccggcgctgacagccggaagtatcagtggggaacgggagcgccagacactggatctgatgctgacgacgacgatgaagccgtcggacattattttaggaaagctgagcgcgtccttttcgaccatgtttatcctgatcgtatccagtttcccgctgctggccgtgtcctttgtatacggaggcatcacgttctatgatgtctgccttcttctcctgtgctatgtggcggtagcgctgcttaccggaagcatgggaatctgtttctcggccatattcaagcgttctaccatagcaacggtggtgacctacggcattctgatactgatagcggcgggaacgtacgcgattaacgtatttgcgctctccatcgcccgcatgaacatgaacaatacgtacataagctcggtcggttccatgacggagcaggccaattcaggcggatttttatatctgctgctattcaatccggtggcaaccttttatgtgatgatcaacggccaggccggagataatcaggtgacaggaggtttaaaccgctggtttggcccgcatccggataattttattatgaattactgggtggttatcagcattgtcattcagctggcgctgtctgcgatcttcctgctgatcgccatacgcgccatcaatccggtaaagaaaaaaccggtaaaacagcaaaaagaaaagagaaaggtgggggtaagcgtccctgcggcaggcagccagctgtaaggcggcggccgtgtacgcttcgcgcggtactgtgcagtatggagctgtcttaccgatcaccatgataatgaacgcggcccgcgaacacgcgcactttgtgtccgacagtcgcgtttatttttatggtgaagccgtggtacgccggccggagaccctcacgtttgcagtgatcaaagagtaaaggagaaaaaatatgcttacaattggatgtcatttatcatcttcaaaaggttatcttgccatggggaaagaggctgtgaagattgatgcgaatacgtttcagttttttaccaggaacccgaggggaacgaaggcgaaagcgatcgatgaaaacgatgtggaacggttcctggtatttgcaaaggaaaatggaatcgaacggattctggcccatgcgccgtataccctgaatgcctgctcagcagatgaacatctgcgtgagcttgcgagagatacgatggcggacgatttgaggcgtatggaatatacgccaggaaactgctataatttccatccgggaagccatgtgggacagggggcagaggcgggaatcgcatttattgcggatatgctcaaccagattctgaaaccggaacagcgcaccacagtacttcttgaaaccatgtcgggaaaaggaagcgaggtaggccgtgagttcgaggaactgagagagattctggaccgtgtggagtgcagggaacgtatgggggtctgcctcgatacgtgccatgtgtgggatggcggttatgacattgtgaatgatttagacggcgtcattggaacgtttgaccggatcatcggcctggaaaagctgaaggccattcatttaaatgacagcatgagtccgctgggagcccataaggaccgccatgcgaagatcggagaaggatatatcggtgaggaagccctgaagcgggtggtgactcatccggcttttaaggatctgccgttttacctggaaacgccgaatgaacttccggggtatgcgagggagattgcgatgatgagagaggtctgcagataaaactgtgaaaattatagaataaaaatataacttctggttaaaaaaataaactatgaattaaaagatgctcaattgcagacctgcctgcgtcctgctataataaaatcatgaagggcccttcttcatggagaacaggagggaagacagatggcaatgaatacggtaatacgtgaaaaacgaaaagaactgggtctgacccaggagaaggtggctgtgtacttaggggtgtcggcgccggctgtgaacaaatgggaaaagggaatcacctgtcctgatgtttcggtgctgcctgcgctggcccgtcttttgaaaacggatttaaacacgctgctctgtttcaaggaagagttgacggaacaggagattgccggtttctgcacggaggtggcggaggcggtccgggcggacgggatgagtgcgggaatccggctggtgcgggaaaaggtgcaggagtatcccgcgtgcggcgcgctgattcacagggctgcaatgatcctggatggcgcatggtttataaagggctcgtgctccggggagcgggaggcgtatgcggatgagatcctttccctctatgaacgcgcggcagagtgcggtgatgaggaagtatccaccagcgcccggtttatgctggcatcgaaatatatggtccggatggaatatgataaatcccagaggatgctggatctgcttccggaaaacaatcacgcagacaaacgccagatccaggcgaatctatacatcagacaggaaaagcttgatgaggcggcccgtctgatggagcggacgctgctgatgcggctgaatgagcttatgggtgtcctcttaagcctggcagaaatcgcagtgaaagagggccgtccgggtgatgccacagacataggagagcgctggaaggtggtggcggagcagatggggctgtggaactataacggcctggtaattgcgctacaggccgctctcgatcaggaagacacggagcagagcctccggctgatcaaggagttactgaaggccgccgaagggccgtgggaggtgaatcactccccgctgttttgccatatcccggtttatggggcaccggaaacttatacaaagcagataattccgccgattttatatgagcttgagaacagtgagaaatgcagctttgttcaggataaccgggaatttaagcagctgatcgaacagtaccggaagcagatgaaagatttttaaacagtatcccgtaaattttgtagatagatggaatcccggtatggtataatagctttatatcgggatatttattatttaacgtgacaggaggcagcagcatgggaattatcaaagcggttacgaccgcgatcagcggttcactggctgaccagtggcttgaggtcattgagtcaggcaatatgggagatcagacagtttttaccagcggtgtgaaaatccgcaggggatccaatacgaagggaacggagtatacaatatccgacggttctgtcatccacgtgtaccccaaccagtttatgattctggtagatggcggcaaggtgatcgattacacggcggaagaagggtattatacggtcaggaattcttccctgccatccctgtttaacggacagtttggggaggcgcttaaagagtcctttgaccgtgttcgttacggcggtgagacgcctacctcccagaaggtctactttatcaatctgcaggagatcaagggaatcaagtttggaactccgaatcccattaattatttcgatcagttttataacgcggagctgttcctgcgtgctcacggtacgtactctattaaggtgacagatccgctgttgttttacaacgaggcgattccgaaaaacaagacaagagtcgaagtcacagatatcaatgaacagtatttatcggaatttctggaggcgctgcagtcctccatcaaccagatgtcggctgacgggatccgcatctcctatgtagcatccaagggcagagaactgggcagctatatggctgacactctggacagtcagtggaaggccagccgggggatggagattcagtctgtgggaattgccagtatctcttatgatgaagaatccaagaagctgatcaatatgagaaaccagggcgccatgttaagcgaccccggcgtgcgggaaggctacgttcagggagcggttgccagaggaatggaggccgccggaagcaatcgtaacggctccatggccgcttttatgggaatgggcgttggcatgaatgcgggaggcggctttatgggtgcagcctctcaggcgaatttacagcagatgcagatgaaccagatggctgggaaccaacagatgaccggagctccacagatggccgggaaccaacagatgaccggaaccccacagatggccgccgcccagacaggcacctcctggacctgccaatgcggagctgtcaacacgggaaaattctgtccggagtgcggaactccccggccggccggaccgtggacctgtgaatgcggaactgtcaacagtggaaaattctgttcggagtgtggaaaaccaagaccatgagtgcaaccataacatataagtgtccaaactgcggcggtggtctgcagttcgatcctgagaaacagaaatatgcatgtgaatactgtctttccgagtttacgcaggatgaactggaacggctgagccccgaagaatcggctgaccaggccggcttttcgttcgatgaagcggctggagaggagaacaccggggagcagagcagagaggggacctccgtcctttatacgtgtcccagctgtggcgcggagatcgtaacggatgagaccactgcggctgacatatgctattactgccataatccggtaatcctctccggaaagctgtcgggagagtataatccggattacgtcatcccctttcagctggaccgggaaaaggcagtctccatattttcccagtggatgaagaaaaagagatacgtcccccgcgccttttattcggaagagcagatccagaagatgtccggcgtgtattttccctatctgatgtacagctgccgggtggaaggcgaactggaggcccgtgccgaccggctgcgggtctgggtgagcgggcggtatcagtatacggagacccagacgtacgatattctccgcgaaggcgacatggaggtgagccacgttacccgcaatgctttaaaaaaggcgaaccgggagctggtggaaggagttcttccctatgacatgaagcagctggaaccctttacgcccggttatctgtcaggcttcgtggcggaacggcgcgatatggaagaacaggatttttctgccgatgtctgcagcgaggtgcgccagtttgctctcgactccttaaaagaaagcgttggaacgtatgaccgggtcagcgtgcgccggtcggatgcaatgctgagagatgagagatgggaatatgcccttcttcccgtctggacgcttacctatcacgaccaggccaaaaacgagatgtactattttaccgtcaatggacaaacgggaaaagtctgtggaaaacttccggtcgacaggagaaaattgttgattctgtttgctgagatattcttcccggtcctgatatttatgcttctgatggggtatctgatatgacaagacgacaaagaaacaggatatccgcatacataacaaaggatagtctggtgcttcggcttctgctgttagctgtcatggctgtttttctggccggtgccggcagcggatttacggcttatgcctccgggaaatctgatctggcggccggagagaagagggttttcgatgaagcaggactgtttggggaaacggagaagagttccatggaagaagaaattgcttccatgcggaaagagatgaatatggacgtggtaatagccaccacggacgacgcagagggaaaatcagccgaaacatactgtgaagatttttacatcaatggaggctttggaacagggaaagactacagcggtgtgatattcctgattgatatggataaccgggaactgtatattgcgccggtagggacgatgaaccggtttctgaccgataaacggtggaatgagattttagacaatgcctatgaaggcgcatcgaacggggattacgcggccagtgcggaagcgtttctggatggggtccgtcaatattacgcagccgggataccgggcggtcagtataattacgaccgtgacaccggaaaggtcagcatttaccgcagcataacctggttagaagccctggttgccctggcagtggcgctgtttacggcggctggaccatgcatcggcgtcatgaaccgctacgcgatgaagaaggagcggaggcaggccggtaattacttaaaagcctatcgggcagactgccgtttctgcttttctgccaatacggatcatctggtcaataagactgttacccatatcgtgattccgaaaagtaataccggcggtcataccggcggtggcggcggttcctcttccggccgcagtacgacccattcctccggaggccgcagcttcggcggcggcggaaggaaattttaacaaaacaagcgagaattcccctgcctctataggtggagggatgaaacgccaaaaacaagtttaacggcagtggcgggcggagagagatcggtatcccccactgacatgaagtcaagccgcgcatctatatgatgtagtcgcactctgtgaaattatcgagcgtggattgaaacaaaagagaatccggcagcagagtcatcctgaatgatctatgggttcaaaatgtggcgggaaataccggcacaggctggtcgattgccaatgaatccacagttaccatacaatcataggcgagaacatgaacgccggactcgtgagcctggcgcagcgcatctccgaactggggatgcgtttttttgttgggcgtaaattccctgatgcccttcatctggattacaaacaggatataggcctcataccctgcctttaccgcttctgccagctccagaatgtgcttgatgccccgctcggtcggagcgtcggggaacatggcgatgccgctctcctctaaggttacgcccttgacttccataaaagccggctttctctgttcctgggacgcagaggcggatgagccgaaaaccagatgaaaagccagatcaaaccgggactgtccataggtaacttccctgcggatatcggccagtgtaagagacgaaggaagtttcttcccgtcaaaaccggaaaccggcagtgcgggcgcctgttccattgaatgaagccattccgccgccacctggttcggagcctgagagtccatgttgataagcagaaattcgccatgctgctccttccaaacaccaataagcgaatattccgtcttcctgcctgacgccgcagcttccggatgaaactgaagaatcaccgcagcacccggcaggagcagttccctgcagcggcccgtgtttttgacgtggcagaccacaatttcttcctcagcgccctcatttctctggatcgccgcgtgggcgataaagcggttgggccggcttataaaagttccctgtatgatatgttcgtatctcatgaccgaatggtatcctttctatgcagactattcatagcataccacattgcggaacaaaaataaattggaatgtgctgtctttaaactagatacatatgtccgtactgtgaaaacttttttgctgtttctggttgcaccttccaacaaagtgtgctacaattctggcaaggttttagagtgaaagcttgaaaatacggctgaatgacaatctgtaagagcaagaaaggaaagacatatcatggaattatcctatcaaagcacccgcggcggcgagaccggtgtgacggcctcccaggcaatcttaaaggggctggccgacgacggcggcctgtttatgccgacctttatcccgaaactcgacaaaacgatggaagagcttgcgggcatgacgtatcaggagaccgcctatgaggtaatgaagctgtttctcaccgattatacggaagaagaactgaagaactgtatcgcccgggcgtatgacagcaaatttgacactgaggagatcgcgccattagcgaaagtgtccggtgcgtattacctggaactgtatcatggaagtaccattgcatttaaagatatggctctttccattctgccgcatttcatgacgaccgcagcaaagaaaaatcaggtaaagaacaaaattgtagttctgactgcgacctccggtgataccggtaaggcggccatggcaggctttgcagatgtcgaaggcacagccattatcgtcttctatcccaaagacggcgtaagccgcattcaggagcttcagatggtgactcagaagggggataacactcatgtggtggctatccacggcaattttgacgatgctcagaccggcgtgaaaaaaatattcggtgataaggcatttgcggaagctctcgctgaaaagggctgccagctgtcctccgccaattccatcaatattggccgccttgtacctcaggtggtatactatgtatacgcctatgcaaagcttctggaggcgggggagattgaagcaggagaaccgatcaatgtgacggtgcctaccggcaacttcggcaatattcttgcagcttatatagcgaagcagatgggcgttccggtgaagactctgatctgtgcttccaatgagaataaggttctgtatgactttttccgcacgggtacatatgacaggaaccgcgattttatactgaccacctccccatccatggatatcctcatctccagtaacttagagcgcctgatctatttaagcgccggcagcgatgcggcagccaatgcggctctgatgaaggaactgaatgagaagggaagctacacagtcacagatgagatgcgtgagttcatgaaggatttccgcggtggtttcgcatcagaagaagagaaccgcgccacgattcaaaagatctttaaagataccggatacttaatcgatacccacacaggcgttgcagcgtctgtatacaaccgctataaagaagagacaaaggatgaggcaaagactgttattgcctccacagccagtccgtataagttctcaggaagtgttctggaagccatcgacggtgttcgtccagaagaagatgaatttgccattgtggaccgcctggcagagctctcaggcacggtgattccacaggcggtggaggagatccgcacggcccctgtgcgccatactgtccagtgcgataccgatcagatgcaggccacggtagccgggattctttcagtataatctgcctccagtccatttcgcatcgtgcgcgtggaagacagtgttttcagacgcagccacgccggttcatcgaaaagatgatggtcgaaaaaggagatatgtaagaaaatatgtaagattgttataaaaatcacaattcaaaaatatttatctttgcaaattccgcgaaatggtatataatgtagaaatgaaataaatataaatcgaattggaggtttgtgatatgttagtttcagcaaaagaaatgcttgaaaaagcaagagacggaaagtatgctgttggccagttcaacatcaacaaccttgagtggaccaaggcggtcttactgacagcagaagaactgaaatccccggtcatccttggcgtatccgagggtgctggtaaatacatgacaggttacaagacagtatcagcgatggtgaaggctatgatcgatgaactgaacatcacggttccggtagctttacatctggatcacggcagctacgaaggctgctataaatgtatcgaggcaggattctcctccatcatgttcgatggctctcactatccgattgcagagaacgtagagaagacgaaagaactcgtagccgtatgtgcagagaaaggtatctccttagaggcagaggtcggctccatcggcggtgaggaagacggcgtagtcggaatgggcgagtgcgcggatccgaacgagtgcaagcagattgcagacttaggcgtaaccatgctggctgccggtatcggcaacatccatggcaaatacccggagaattgggctggattaagctttgagactctggctgccgtaaaagataaagtaggcgacatgccgctggtacttcacggtggtacaggcattccggaggatcagatcaagaaggcgatcagcctcggcgtagccaagatcaacgttaacacagagtgccagctgtccttcgctgacgctacccgtaaatacatcgaagcaggcaaggatttagaaggcaagggctttgacccgcgtaaacttctcgcaccaggtacggaagcaatcaaggcaaccgtaaaagagaaaatggaattattcggttccgtgggaagagcttaagtttgatattcctgtctcctgaaatgtaattattaaaaaaaatacttgcatttttgagaaaaatggtttattttaattaaggaacgatggcgttctcctgacaacaggagggcgccatttctggtatcatagataattgcgcgagaggatggaaaatttatgagcgaagtagtaaatgttgccgagatctttggtaaaaacgtatttaacgaaactgtcatgagagagcgtttgccgaaatccgttttcaagaaattaaagaaaacgatcgaagacggagcggaactggacccgtccattgctgatgtcgttgcacatgcgatgaaggactgggcaattgagagaggcgcaacccactatacccactggttccagccgttaaccggcatcacggctgaaaagcatgattcctttatttcagcaccgacctccgagggaaaagtcatcatggagttctccggaaaagaactgatcaaaggcgagccggatgcttcctcctttccgtcaggcggattgagagcaaccttcgaggcgagaggctataccgcatgggattgtacctcaccggcatttttaagagaagacgccatcggcgttactctttgcattccaaccgcattctgctcctataccggagaagccctggataagaagactcctcttttaaaatccatggaggccgttgacgagcaggcgctgagaatcttacgattattcggcaataccacttccaagcgggtgatcccgtccgtaggggcggagcaggagtatttcctggttgaccgtgaaaaatatttacagagaaaagacttaatttacgcggggcgcaccttattcggcgccatgcctcccaagggacaggagctggaagaccactacttcggcgctatccgggaacgcgttgcagcatatatgaaggaagttaacgaagagctctggcgcttaggcgtcccggccaagacccagcataacgaggtggcgccggcccagcacgaactggcaccgatttacgagcaggtcaacgtggctgtagaccacaaccagatggtcatggagaccttaaagaaggtagccggccgtcacgggttaaactgtctgcttcatgagaagccctttgccggagtcaacggttccggcaaacataacaactggtccctgactacggaggatggaatcaacctgttaaatccaggcgagactccccacgagaacattcagttccttctggtgctctcctgtatcctaaaggcggttgaccgtcacgccgatctgcttcgcgaatccgcggcagacgtgggaaatgaccatagactgggggccaacgaggcgccgcccgcgattatttccgtgttcatcggcgagcagctggaggacgtggtggatcagctttgcagcaccggagaggccactcattccaaggtgggcggcacattaaagaccggcgtcagaacgctcccggatctcttcaaggatgccactgacagaaacaggacatcaccgtttgcctttaccggcaataagtttgagttccgtatggtaggctcctccgattccatttcctcaccgaacgtggtattaaataccattgcggcggaagcatttaaggaagcggctgacatactggaaaaggcggaggatttcgataccgcggtacatgacatgatcaaagaacagctggcggcccacagaaggattatctttaatggaaacggctattcggacgcatgggtggaagaagccgagaagagaggccttccgaacatcaaatccatggtagaagcgatcccggccctcactacggaagcgtctgtcaggatgttcgaagagtttaacgtatttacgaaagccgaactggaatcccgtgttgaaatcgaatacgaggcatacagcaaggcaatcaacatcgaggccagaaccatgattgatatggccggcaagcagatcatcccggcagccgtcaaatacgcgacgatgctggctgattccttaagcaaagtgcagactgcctgcccggatgcggacgtaagcgtacaggccgaactgctgacagagacctccgcctatctttccgatatgaaggtggcgctggcagcgctgatcgatgcaaccgagaaatgcggaaccattgagaacaataaggaacaggccaatgcctaccacgatacggtagtcccggccatggaagcgctccgcgctccggccgataagcttgaaatgatggttgataaggaattatggccgatgccaagctatggagatttgatttttgaagtataagaaataaaatcgcctgagaaggtttcaataacaataacaccccggctgtaatataaaaaccgccccctgtctgacaggaggcggttttattacggccgaagctgttttagaatctatgctgctatttgattccgggtccaatctctttcttagaatctgtctggccgctgtccgcaggagattcctgcgtggcgctgcctgtattttgtccatttactgccggttcattttggctgctctgtccgctctgaccgtttccttcggctccattttgtccatcctgtgtgccgtccgccggttcttctaccttcgtgcagacaccatttgcatcgaccgtataatcgacgccgtcaaaatcaagggtggtagaaaccgccatcctgccgtcggaaggatttaagtaataaagctgtccgttgatctctgtaagtcccgtcaccatggcaccgctgccgttgaaatagtaccacgcgccgtcaacttcacgccatccaactgtcatctttccggaagaagtgcttaagtagtactttgcgccgccgtcatccagccatccggtctgcatctttccgtcctgattcagataataccagtttccatccggattgatccagccgcgcgccatatcgccgccctggttgaagtagtaccatgtaccgtctaactgaagccatccgaccgcagccgcgccgctgtctgttaagaagtactttttgtcgccctccgtatgccagccggttaccatggatccgtcgttgtttaagaaatacttcgttccattttgatccagccatccggtcgccatgattccagtatcctgaaggaaataccattttccggacagctgtttccatccggtcgccatctttccggaattctcatcgagatagtaatactgattcatctgctgaagccatcccgtcttcatggtaccgtcggcgttcaggaaataccgggaaccattgtcatccagccatccagtgctcattgcaccgcttgaattaaagaaataccagctattagaaagctgtttccacccggtaaccatgcgtccggtggtttcgtcaaggtagtaatgtaagcccagcttttccagccatccgacagaggcaagtccgtccccgttcatatagaaccagccggttccgtcattgatccaggcgtccttctgcatctgataattctggtaataatacgtcttatccccgatggttctccagagattacctggaagatagggagtcaggtctttataaaggaaattaatatcaacatttccggcaattccgtcgatggagccggtactggtggcctgccacatgatcgggtcagaaaaattgtgttttacctcataacgggccacccatacatcatagtgcatgtttgacatatcaatcttattggccagccagtagtcgttggcgtagaccatgggataatagccggctgcctccacacgttcgcagaacgcgttgatgatctccgtcacctgtgccggcggcagcgatcccagtgtggaactgtcctccgcgtcaaatgcgatcggaaatgaaattggataatccttcaccagatcgaggacgaaatccgcctcctccacagccatctgcggtgtggtggccagtgaatatatgtaggcgccgacccgtactccggcatcggaggcctccttcacgtttttatgaaaataggggtcaaccgcccctttcgaccgggttcccagcatgacgaattccacatcgtcagcggccacggcattccagtcgatattgccctgccatcgggatacgtcgattcctcttgctacgacgccgtcgatcacggttccatccagcatctgataatacccgtttacccgttcatagcccgcggcataagcgggcggggcggagtacaggaatgctcctgaacagcccatgacggcgctgagcgctgccgccgtaattcttccagtaagtcttctgtgtttcaaagtgtcagcctcctcatccttgcagtcagttgttccgttaaaactacaatgggtatccgcgccgaagtgcagatacccacacaaaatctgtatttaatttccaccggccatgagctatgggccgaacggacatgccggtatcagcccggtccgttagtcagtcccggtgccagctggtaaacaccgttgttggaggaagaacctccaggagcattgctgccccccggtgagctgctgccgcctggtgtattatcgctgctgcctggcgcactgcttaaactgccgttccccgtggatgatccgccggggcctccggaagtattggtgttattgttgctggtaccgggagcattggtattatttgttccgctgcccggtgctgatacattgccgcctgtgctgggagcgccggaattgctgttctggtaagcgccgttggaggcaaatgtatagctgactccgtcaatggttaaagtcgtattagccgccatcttaccggtagaaggatcaaggtaatagtagacaccggaaagctggatccatcccgtcatcatgtggcctgcatcattaaagtagtaccaggcaccgtcaagttccttccagccgtgagccatcttaccgcttgatgtgtccatgtagtacttattcgtgccgtcgctgagccagcctgtcatcatcttgccgagaacgctcttgctgtctgagttcaggtagtaatagtctccgccgatctgctgccatccggtcagcatcttgccatcgggcccgaaatagaaccagtcgctgccgatctgtccccatccaagggtacacttcccgtttgccttaaaatagaaccagccgccatccatctcacgccatccggtggacatggcgccgtcgcccttcatatagtagtaatcatcgccgattctcagccagcctttgacgagaacgccggtgtcgtccatcaggtagtaatacttcccgccatcctccacccatttcgtcgccatagccccgtttgaacggaaataataccagttattgttaatctgcttccatcccgttaccatgtaaccggttgagagatccatataataataagtaccatcagtactttttgcccaacccttatgttcagacccatccgtgtcgatatatttccattgtgagccttcctgcttccatcctgctgctgcccaggcagtgtccgccgacatgaaaacggaacttcccacgagtccggccaggagtaacgcagtcattgttttcccacatctcatcctaatctcctcctattcttacaagatacgacatcacatatgaattcattataacacaggagaccttataatgcataaaaaaattattacgatttgtggacaaatttccaaaactcatccaatttccctgcattttttataaaaatgctttgcgtaccggtacataatgatcgtatattcgccgaactcttctccgagcgccgccttgtacacagcccagaggctccataaaaatccgccgagggccatatgggcgtaaaccgaataacgctcatccagtgacggttcacgttccagataaatccggatcagccgctcagtctcctcatctgtataataggaatagattgcgcacatggccacatccaccagcggatcgcacataccggcgtattcccagtcgatcagccggaccccgccgtcttccagcatcaggaaattatcgccgttgtcatcgaggtgagaaaggactttcctgcgtcccatggagtccagccggtccatcagttccgtcatccagccacgtacttttccgtaatcttcaaatgggatttctccatgtctcctgcaaagatcctcataaaagtcaatccgctccctcatatcaaaagagtgctcaacagtaagcccggaatgatgaaggcggcgaacgattgccatgcatttttccatctgctcccagttccggggatcggcattattggccccgtcataatactccgcgatcttataaccggtctctccgtcaaagtaaatgattttttccgtaataccgagaccggctaccacatcgtataccgccttttcctgccttctgttaataagaagctccgtacccggaccgggaattctgcagatatagtggcgttccttcactttaaacagaaatgatttgttcgtcatacctgattttaagcatctgatttccgttatttccgactcaggaactttgaaaacccgggcgaccagttccatagcctcgttgtcagaatggcgctgatacttgatatcaaatctccggagttcctccagattttcaaactcgtatacctcatcctccggtctgcggttcacatacatgtcaatgtcttcgcctgcttccttaaggtcaggaaggcgtttggccgcttctccggagagcatttccatatagacattttcccaatagaactgttccgtccccggaagctcataataggcctcaaggacaggcagaaatttggcagtaaattcttttgagaagtaggaggggccatacatgacccactgattggttccgccaactgagacgcctccgattctgcctttcttattataatcgaggcaccattctgaagtctccccttccataaaagcggaagagtaccaggcgccgccctcataggcatgatacatattgtgccgcatccagttatcggaagagagaacatacatatttctgccccgcaggacctctcttgcgcggtaaatggtggtcagtgtattcttggtagagtactcgggattatatagaagctttacgtcatatttatcaatcaggtattcaaatttttctttcagatacccgacgacaatcgttatatctttgatgccgacctcatggagctgccgaatctgccgttcaatcatgcgttctccgaagacctccaggagaccctttggcatttcaaaggtcaggggaacgaaacgggatccaaagccggcggcgataatcagagctccgtcaaccttatattgtttcagcagctccagccctgccgggagcagttcgtatgctccgcctgtaccggccggcgtgataagatgctgcgaaatacattccttcacaagattattggctgtgccgagagagacatccagcgcctgggccagttcccgctgtgtgatagcaggattctcgaggatagaacggcagatgatgatattacgattcatgatgaatacctccgtgattgataatcattattttagtaaaatgcatattttaaaagtagagatttggtgttcaaaaaatacgatatattaatgtatgtgaacattatagcataattgtggggaaatgcaagattggagttaggggatgagagggagagaggtgggcggttgaaagttgggagttgttgagaagatggagattgggcaggggattgacgataataggaagggaggggcggagggagacggttttagaggggagtttgggaggaggtttaatgagatttattatattgagtaggtcttatatctgtttgtctgcctggtatagaaatattatagtatatataaaaagatgactgtgtataaagaaatatggaggagtggttcggtaaaggggggatttgacggggggaaggaagtgtttgtaaagaagattgtttgttaagggcattatttgtgaaaagggttatttgtaaagagtattgttgtaaagattattatttaataggtaagaataatattggtggagataatttgattaaacataatattagataatttcaggtaagcacagatatacacaggattattattaagtgtaattcgttggtctaagattacgtgtggtattaaaaagtgggataagctatttacttaaaaattagagctttgtaatttattccgtcaaatgcttttataatttataacatagaaagaaacatttattcaatgagtgtatttaatgaatgtattcaatgaatgaaatggagtaagaataaaaatggaagaatggaaatagggaggaggggagcgtgcgtgggcgaaaaaatacagagagcaccggagtaaagagcgtagctgatcagtcatttttgatcctatcagtaatgagcctacagtctctcgaattcattattaggataatggtgaatacttaaagtatgcaataaaagctatttttactatctaaaatataaatctgtatgatagtttcgcaatataatggtttgtactattaaaattttggccgcatgcgacatcatgcatgcagcgaaatatatagcacaaaattaagagaattaagcggataatccgaaataagattggattgtactaatttgagtacaatatgtcgcggaggcccggttttcgtaaagattacgtaagaaaatgcacagagaaaagttatagcatttttgaaaaaattatattatactgtcagtgtgatggaggaaatgatattttcctggaggaattgtgaatatttattactttttgaaaaatatgcaaaaaaagtgaaaaaaagtattgataatttcccttataggaagtataattacctcgtaatgcaattaggaatttcaaaaagtatttcaaaaagaaaaaggagagtgcatttttatgagaaagcagacaaaattagttgcagtattatctgcagcagcactgcttgccatcggtgcttccatgacttctcttgcagctacaggctggcaggaagaaaatggtacatgggtttattatgataagaatggcgatgcagtaacagaacagtgggcaaaatccggtaataactggttttggctcaatgaagatggtgaaatggctacggattatctggtagatgatgatggcaattactattatgtggatgccaacggagctatggtaaccaatcagtgggtttccattgaaaatgaagactatgatggagacgatggtgatgaaccgttaaactactggtattattttggagctaacggcaaagcatacaagagctcttccaacagcaacagtgcatcatttaagaccatcaatggcaagaaatacatctttaacgatgaggctcagatgctttatggctggattgatacagacggtcagagagtaactggtgatgatgactggcgtgaaggcacttattactgtggtgatgaaaatgatggtgctcagaaggctggagaatgggcttatcttgatattacagacaacaactgggacgatgtagatacagggctttccagcaataatctgtttgacgacgaagatcagacccgctatttctatttcaaaactaatggtaagaaaatgaccgacgagaagggaaaaaccatcaacggcagaaaatatagttttgacgaatatggccgaatgaatgcagagtgggttaactgggatgcaactccatccacagctagcgctggttcagcttcctatacaaccggttacagatactatggagatcctgaggatggtgcaagagtcacaaaaggctggttccaggttgttccggattcttatttaagcccagatgattatgaagacgatgaaaacaactggtattattctgataaggatggaaaattagttgcctctgaagttaaaacaatcaatggcaagaaatatgcatttgactcttatggcgtaatgaagagtggcctgaaggcaattaagttcgttggaagcagcactactgaaatcgacgaaattaagggcgatgatggtatcgctaatatgcatttcgatacagaagataacttcaaggataacgtttctgacttatatggtgctgattataagttatattactttggatccggcgatgacggcgctatgaagacaggaaagcagaccgtaaccattgatggagaggactattccttcttattcaacaaatcgggcagctccaagggtgctggtaaattaggtatcgatgacgataagtattacttaggcggcatgttattaaaggcatctaaagatgacaagtattctgtaatcaaaattacaaaagatgcaagtggtacaattactgcactggaatgcttaagtacagaagagttccttgatgatgtaaatgcaacttcctctattccgacaggaaaagccgacgattacgatgagtactatgatgtaaaagccgatgctgctgatactgctacaacacagtacagacttgtaaatacctctggtagtgttcagaagaataagaataaagcaaaagacggcgatgatcgttgcttcaaggttggcagcaataaagaaattgaggctgtttttgtagaaagctaattgtaattaacaataagaaattctaattgccaaagaagttctgttttgaatgttggaagtgtacttaacgagtacatttccaacatttttttaatttgattgagcagtcttgggcgaatataattttaacagcttatatccttgaatacacaaatgaatacacaaataaagaggatattcaacaaattatgatacgctttgttgaataccctcttttagcaattagaatttcttatcgaaatttatggaattactaattatattattttgcctttgcagtacttccaaagtatgttaccacaccatattcatctgtacagtagtacataccatcagcatcttttaagttggtcttcttcttcatgatagaagcagatgtattaactaaatatccaccaaccttaccagcaacttctttaccatcttcaccaaaggactgatatctgtagtctttgtcagctttgatcttacgtcctaaaactaacagagtcttcttggtctcatttacacctttgtacttagtagcgcctgtggtaccaaaggaataagaatagttatcgccatctacatcaatggtctgattaccagtcttagctgcgccatcatccccactaccaaaatagtatacggcataatttttgtttgtactatatgctgcatatgcagtatcgaatttaccagcgtcatcaatttcaatcatttcgccaagaattttaccagtagaatcaatattaagtgcccataatccactgatcatttcgccattagcattaaatgcgtatttcttgttattgattgtctttaaagctgagttatatacattaccacttccgtcagcatagaaccactttgtagaatcatcatcataagcgctcttattaaccttttctgccggaactactttaacccagcccttctgtaatctccaaccttcatcgccaccgttgaagtactgatattcagtaatagtagctacatctgcatctgttgccaaagtatcagtccaaccatcctgcattacaccagtctcatcaaacgcatacttcttgctgttaattgtcttgattgcaaactttgtagcatcgtcagctgcatactttttgccattcgatgggttgaagtagaaccagtagctcttatcttcatcatctttaataacatcaagtttcatccagcctgaagcacgagaaccatcattttcgtcgccacagtaataatcacctgactgccatgcatcatcgccagtgattctggtagcatcctctttgtttacccagccataaagcatcttgccttcgctgtcaaaagcatatttcttaccgttgattgtcttgaaagaagcggaaccggaggacttatatgccttaccattagcctggaaataataccagtatgcatctggctcgtcagtatcgcctgcattctcattctcaactgctacccatccattagttaccatagcaccattggaatctacatagtagtagtttgtaccatcatcgatcagttcatcggtagccataacgccatcaccgtttaaatagaaccaagcgtctcctgattttgcccaagtatctgttacctgatcgccgtccttgttataataaacccactcgccattctcttcctgccagccagttgctgcaaaagaggtcatggaagcgccgacagctaacagagctgctgcagataatactgcaactaattttgtctgctttctcataattaatgcactctcctttttctttttgaaatactttttgaaattcctaattgcattacgaggtaattatacttcctataagggaaattatgggcagtattggaaggggcggaaatgcgttgaaatactgggaataaaagttgcaaaaattcataaaatcttaaataatatcccagctttttcatgagggaagcggttgcggtatctgagttaaaatgttatactgtgtaataaaagtaaatcagtaaaccataaattgatgtgttctggtaatatgcagtttggagaggataattatgtcgtcagtgaaaattaataaaagtaagaatagtaaaagtgattcggcacttttatcacatataatagatatttttacgtttttaatattatgtttgtttccactttttgtaatggataaatattataatatattacaggcaaaatattatttttatattggttcagtgatactattagttatagctgttatttttgcgggctgtatagaacacaataagctggaaaagtatattacatcttttaagtggaacgactttataaagaaattttctgttacggatgtcgcactgctggtctttctaatcatcgcgggtatctcaacgataagttccgattacgtatatgaatctttttgggggaatgaagggcggttttcagggctcttcttactctgtttgtatggtgtggcatatttttgtgttaccagattcggaaaattaaaaagatggtatttagatgcctttttaattgcaaatatgctggtttgcatatttgggattacagattactttaagatggatcttttacattttaaggtgggcatgctggaagaacagaaatttatgtttacctcaacgatcggtaacattaatacatatactgcactggtagggatggtgaccgcagtatcggcagtattatttgcagtggaagataaatggaaaaaacagagcttttattttgtcagtcttgtgatcagtttttttgcactggtgatgggcatcagtgataacgcctatttatcattagcagctttgtttggattccttccgctgtatttatttaagaataagaaaggagtaaaatcctatttattaattcttactgcatttttttcggtaatccaatgcatcgactggattaatactggaatgggagataaagtactgggaattgacagtgcttttaatataatagttaaatacgacggattattattgattgtaacagctctttggattatttgtgccattgtttatgggttagattatttatatgcaaaaaagaagagccggaatgtggagatacgtggcggagattccgaagagaatgggaaaaagttaaccgggtgtggcgttttgcgaattatctggctggcgatattggttatctgtattttaggaattggatatgccttatatgatgtgaatatccaggggaatacggaacgatatggagccattggtggttacctgttgtttaatgatgactgggggactcacagaggctatatctggcgaaatgctatggaatgctttgaacaatttccagtaatgaaaaagatatttggctttgggcctgatacctttggaattgttttgttggataagacaaagggaaatatttatggccaaatttttgataatgcccataatgagtatctgcattatcttattacagtaggaattacaggattaatggcgtatcttgtttttataagttcttttgtagttcgagttattcgtaaagctggaaaaaatcagtatattgtagcggttttttttgcagtgctgtgttatagtacacaggcatttgttaatttgaatttaccaattgcaactccggtcatgtggatgtttctgatgctgggtgaattaaacattagagaacgttacagacagtctggaagtaaggataaaggaaaatgagaaattacgagcaatataaaaggctgataaaattattttcatcctctgtgattgtactgttggaagttagtgcttattggattgtgtggcatcgctattataataatcttatcatggccccctttttcaggcggggaaactggttgatggtagcggtatacggaattttattactattcttcttaaaaacctatggaggtttgaagatcgggttttataagactggtaatgtgatttattcgcaaattctgtcgattctctttgttaacattattacttacctgcagatcgcgttacttgccttgggatttccaccggtcggcgtaatgtttctcatgactttgactgacgttgtattaattgttttatgggcatttattttccaggcagtatatgagaaaatgtttccgagaaagcgtatgctgttggtatacggagatattccggcatttcatttacaggaaaagattaattcaagggaagacaagtaccagatctgtggggctgtgcatatccggattggcatcaggcggattatggagatggcaggagattacgatgcagtaattataggagatgttccatcgcatgaaagaaactgtttgatgaaggaatgttttggtgcatcgataagaagttatacagtccctaaaatatcggatattcttttgagctcatcggtggagcttaatatatttgattcgccgttatatctttccagaaatgaggatttaaaggttgaacagaagtttttcaaaagactgatagacatacttttttcatcgctgggattgattgtaacatcgccattttgggcaattatatcgatcatgatcaaatgctcggacagaggccctgtgttttataaacagctgcgtttgaccaaagatggaaaggtcttcgagatatataaattccgaacaatggttcaaaatgcagaggaagatggagtcgcaaggctagcatcagaatctgataacaggattctcccagtgggacgttttttaagaatgaccagattagatgaacttccccagttgatcaatatactgaagggggaaatgtcagttgtaggtccgcgtccagaacgtccggaacttgcagctgagattgagaaggagattcctgagttttcctaccgccttaaagttaaggccggcttaaccggttatgcgcaggtttacgggaagtataatacgactgcgtatgataagctgaagctggatcttacttatataaggaagtattccgttttcctggatcttaaattgattcttatgacacctaagattatgcttttgaaagaaagcacagagggagtaaaggaaagcctggctgaacaatcagcaagagaggaagcagcggcggctagtttaaaggattaatttaagagtgaatggtggttaatggaagaaatgtaagaaggaaaatgtcgcattttgtttaaaaagttgattaatatgagataaggtggtatactatccgaaggtttagttcgcataagcgcgattatgggaagtacccacggaaagggctttaaatggctgataacacgcaagaaggcgcccagacagactgtattcgggttctgcattttgtctccactctgagccgcggaagcggtgttatgagtgtgattatgaattactataggcatattgatcggaatgaggtccagtttgattttctgcactttgttgcctgcgaggattcatatatagaggaaatacgggcattaggcggtagaatctactgcattgataagcctggaagttcttttcagtccgtaaaacagctggatttattttttcggttacatgctgaagaatatacctggctgcataaccatgaagtatacttgacatttttgctaaggcctatcgctaaaagatatggattggaaaagtttattgttcactgtcatgctacgaaatactcggataagacgcttcatgcagtgagaaatcggatattgtgtttgccgatccggtttatgaaagtggatagatttgcatgttcagaagcggcaggaaagttcttgtatggagagaaaatgctgaaggctgggaaggtatttatcatgcacaacgcgatcgattgtgaaaaatttcggttccgtccagagctgagagaacggcttcggaaagagatggggctggaagggaagtttgtgattgggcatgtggggagatttgagaggcagaagaatcatgaatttttgattgaggtgtttgctgaagtaaagaaatcaataccccaggcagtattattactaatcggagatggaagtctaaaagagcggattaaaagcaaagtagtagaggccgacttgaaaacttccgtcatttttttaaggcaacgaaacgatgtgaatgaaatgcttcacgtaatggatgtttttgtccttccatcttactatgaggggcttccagtatcttgtattgaggcccaggctaatggtttgccctgtgttatttcggggactattacgaaagaagtatgtattaatgaaaatgtttctgtctgtaatttagaaaatcccccctgtgtttggagcgagttacttaagcatttaaccaatcaaacgatatctcaaagaatattaagacaagattctatactaaaaaatggatattgtttaaaaagcgaatcagcaatacttagaaaaaaatatttaggtggttataatggataaaatcaaaaattattatatgggttttcaacactatcaagcactcctttatgaattggttataagggatattaaggtccgatataagcgctcttttttaggcttgttatggactgttattaatcctatccttactatggctgtcatgacaatcgtattctctaaattattccggtttcaaatcgaaaattatactacttattttttagttggaaatatcctttttaccttttttacagaagcaacaaataacagtatgcattctgtgttggataacagtaatttgataaagaaggtatatgttcccaaatatttatttccaatatcaaaagtaatgtctagtgtagtcaatttatttttctcttttatagcgttaataatagttatgatagcaacacgtgttccatttcaggctactatgtggttaactcctattgtactctgctacataattatgtttgcagctggaatcggattgattttggcaacagttatggtgtttttcagggatattgctcaattatacagtatcgtcactcttttatggatgtacctgactcctatattttatccagttgatcttttgatggaaaatgcaccatgggcattaacctttaatccgatgtatcattatattgattttatgcgaaaactggttcttgatggaacactccctagcataagtgaaaatatgctttgtctttcaatttcagtgattacactgctgattggattaattgtattttaccgtaaacaagataagtatattctctacatctaataaggagcagaaatgagtaatatagcaataaaagtaaatgatatatcaatgatgtttaataaaagttcagaaaaaatcgatagtttaaaagaatatatgatcaaactggtaaaacgtcagctcatgtttgaagaattttgggcgcttcaaaatatttcgtttgaaataaaaaaaggcgaagcagttggtattgtcggtttaaatggatctggtaagagtactttactaaaaacaattgccaaagtattaaagccaacaaagggagaagtagaagtagttggaacaatagctccattaatagaattgggggctggatttgactcaaacctttctgcacgtgagaatatttttttaaacggggctgtgcttggctataaccgtatgcagatgcgtgaaaaatttgaatctattatggatttcgctgaattatgggattttgttgatgttcctattaaaaacttttcttctggtatggttgcccgattagggttttcgattgcaacttctaatatgccagatatattaattgttgatgagatattaggtgtaggcgattataaatttcaaagaaaatgcgaagagcgtatgagtaaaataattgacaacggcgcaactattgtatttgtatctcattcgattgaacaagttcgtgaagtgtgttccagagcaatctggttagaaaaaggccatatgcttatggatggatctgtagatgaagtttgcgataaatattcggaaagctaaaaaaggtgacaaaatgcaatttgatttttctaagcagcccggttgtatacagattaatgataatattgctgaaactatccctgcattagtcagcgttataactccatactataacgctgcagaatactttgaacagacttattatagtgtgataaatcaaacgtttccatggtttgagtggattatagtagatgacggcagcaaagatggtgccttagtacttgataattttcaaagaaaagattccagaataaaggtaatacatcagaccaaccaggggcaggcagcagctagaaatgcgggaattaatgcatcaaaaacggatattatcattcctcttgatgcagacgatttaataataccaacatttttagaagtaatgtattgggcactgttaaagaaccctgatgcttcttggtgttatagcgactcagttggattccaggaacaggaatatatatgggctaaaagcttttctgttgataggctaacatataataattttcttgtctgtactgctgcaatacgaaaaaaggatttggaattgatcggaggttatgattcctcctgtaaacattatgatgaagactggaaattatggctggatctcctttctcaaggaaagtatccggtacatattaatgttctgggattttggtatcgacgaacttccagtggaatggggagtcaggtccgtatggataaaaaactcaaaatccagtcggatgatataattcgccggtcagcgcaaagcgttaacaagggaattaaagcaattgaatatcctaaagcttgtgttacgaatcgatttttgcagcctgcgttaagtgatttttccttgcaattaccaccaaaagaaaaaaagcatattctaatgatttttccatggctcgaaatgggaggtgctgatttatttaacctggaaattgtgaaaaagctggataaaaagaattatgatttaacaattattaccacagttaccagttcaaatacttggcgtcagcgttttgacgattatgtgccggaaatattttctcttccggattttatggacgtagtggattacccggaatttatctcctatataataaaaaccagacgaacggatttaatctttttatcgaattcgtattttggatattaccttctaccttggattcgcaacagtttcccgaatctggcagtatgtgactatgtacatatggaagaatggtactggcgccatggcggttatgcccgggtctcagggatattcggagattatatagacaatacctatgtatgcaataaggggactcgcaatgtattaattgattcctttggaagaaatccagaaactgtaaagactttatatattggtgttgattcccaatactactcaccagggagttttgttgaaggaaaagtatataagatgtttgatatagatattgataggcctataatactttttccttgtcgtatacatccgcaaaaaaggccttttttaatgattgagattgcacggacgatgatagatcaaggtagcaatgccgcatttgtcgttgttggtgacggaccgcaactaggagagttaatggatgccagtgcacagcttggacttagcaatacgatatattttgccggacgacaggaagatatgcgtcccttctacattgatgctgcaattactcttatctgttcactcaaagaaggtttggctcttactgcatatgaatcgctagctatgggaacaccggttatcacatcagatgttggcggacaggcagaactgattgatgattctgtcggggcagttataccattactacaaaaggaagcagattcactggattgccgcaagtttatgccagatgaacttaatttatatacgaatgctatttttaaattactgaataaaggtaatgaagagtattatcagaccatatgcaagaattgcagaaaacgtatattagaagggttttctacggaccttatgatccaaaaacttgaatatgagtttaaagcactgtgcagcaaatatccttctacaattcaaagtttttctgaaaatctaaaaatagcacaagagcttactacgctttatacagaatatgaactgcttgaagcttatgcaaaaaatgtatcacagccaatggatactaaaactgagctgatcagaattgctaattcaaagtggggaaacagaattattaaaattgcctttaaactgaaactaaacaaactatttcattagatcaggagaattattgcaatgagcggtgaggaaaataaaaacatctttgaaacattaaaaaattatgttcagtcacacacagtagatgaaataatatttcttggattaaagcatttcttcgatataaactacgatatatctcttgaaacgcttatcgaaaaatacagatctgaaaagttcaacgaattaggtgaaaatttacactattttcaagataatataagagatttaaaggaaaatttttgtgaatatgaaaagatatataatagtttaaaagaagaaaaaagtagaaatgttttttcaaatatgttatgtgcaaaggtatttatggatatctcttttataagggaagcctacgattctgatgatatttattttgatttatccatttgggttcaactatccaatgaggtttatgtcgattgcggtggatattccggggatactgcgttatcttttatctgtcattgccctgattataaaaaaatttttgttttagaaccaatggaggaagcagaaatgctttgtaaaaacaatttacaatggttcattcaggagggtaatgttacggtaataaaacgcgccgcatatgatcaggatatccgcttaacgtttaacgaaaaacacggtactggagatagctgcatcgatgaaaatggtaagacatctgtttttgcaacatctttagaccaaatgatatcggaacctgtaagctttattaaaatggatatagaaggctctgagagaaaggctttaatgggtgctagaagacacattgctcaagatgcacctaaaatggccatatgcgtatatcatttaaaagacgatttttggaaaataccacaattacttttaagtattaattcaaactatgatattatttttaggcagcatcgtcctgatgttttttctgagactgtaatgtatgctattcctaagaactcaaatgaggtggttttgacaaaccatagagctgatttaatttattgtcgcattaaaaatgcattaaatcatctgcttctaatttctacagatgaatatacaaacttaataactaatgtcaaggataaagcatggtatctctatcaaatacgtatgcatattaaagaaatagagcacttacgttccatacaaacagatttcaatggccaatttaatacattacaaaaacagtatcaggaacaaaaattatggttagacgaattgcaaactgcgaaggactatctggacgcacaaaataaggcttacttacaggaaataaaaaatttaaacagttcattggttgaacaaaaaaaatggactgaaagtctgcaaaaggggaaagactatctggaaaatcaaaatgctgatttgataaaagaagtagaagctttgcaaaatattttaagtgaccagaaaagctggactgaagaactacaaaaatcaaaagattatttagaaatatgtgtaaatcagcagaaactagatatagaaaaagcaaaaaccgatatttttaataatgaaaagcaaatatcagaattaaaaaatgatcaagcaaaattaaaatataaatatactaaactaatgaatgatccattaattaaaaaaattataaagctaaaaaagattgagttataggagaatggtatggactttgattttacaaaagaaccggggcttattcaattaaagccttgtttagaagaaaaaatgatacctttaatgtcaattatcaccccctactataatgcattcaaatactttgaacaaacatttaattgtgttattaatcaaacgtttccctggtttgaatggattattgtagatgatggtagtacgcaggatatttcattactattggagtatgttaatagtgacagccgtataagaatcatacaccaatcaaataaaggacaggcatcagcaagaaataaaggaataatagaagctgcttctgatataattgtcccattagatgcagatgatttaattattcctacttatttagaatatgtgtattgggggttgaagtgccatcctgaagcttcctggtgttataccgattctctaggttttcaggaagagtgttatttatggaaaaaggctttctccagtgaaaaaatgaaaaaggaaaaccttttggtctgtacagctgcaatccgaaaaaaagaccttatggctgttggaggttatgatgaaagcaatcaacattacgacgaagattggaaattatggttagaactattggccatgggtaagtatccgatacatttaagcgtctttggattttggtatagacgaacggctagcgggatgggaaatcaagtaagaataaatcgggatctaaaaaattgttcggatagcctagtacaacaatctgctcaaaagataaccaaagttatcgaggctatagagtatcccagacaaagtagtgcaaatttatttagtaagcctgtttgcagtaattggacatataagattccccaaataactgagaaaaagcatattcttatgcttttaccatggttagaaatgggtggggctgatttatttaatttagagttggttaaaaaactaaataaatcaatttatgagataacaataataacaacagtaaatagctctaatacctggaaacaacgttttgaggagtatgttagcgatatattcaccctacccgattttatggaaatttcaaattatccagaattcataacatatatcataaattcacggcaaatagatttgatctttttatcaaattcttactatggttattatcttatgccttggattagaaaagaattttttaatattgcaatagttgattacatacatatggaagaatggtattggagaaaaggaggatttgcaaggacttctggggtaatgaaaaatattattgaaaaaacatatgtttgtaatgaaagaacaagaaaaatattaattaaggactttcgaaaagccccagaaaatgttgagacggtatatattggtgtagataaagatttatataattctgttaatatagaatccgggttagtcagaaagcaatttaatctagaagaagacagacctattattttatttccttgtagaatgcatccgcaaaaaaggccctttatgatgcttgagattgcaaaggtattaaaaaaatcagaaatgcgggttgcatttgttgctgtcggagatggtcctcaattagaggaaatgatcagttttattcacgaaaatcaattagaggacacagtttttttcgcaggccggcaggcagatatgaggccttattacaaagatgctgctataacgcttatttgttcattaaaagaaggactagcgcttaccgcttacgaatcattgtcaatgggtactcctgttataacatctgatgtaggtggccaagctgaattaattgacgaaaaggtcggaagagttattcctttgatgcaggatgaagctactcaactggattccagattgtttttgacagaagaaatattgctttataccgatgctattaactccattttggcagatcgtgaatattacaaaattctatgctatgagtgccgaatgcgaattgaggagagcttttctaccgatattatgattaaaaaaatggaacaagaatttttgtcattagatttgccggctgtaagtgccttacgccataaaaagagtgacgagttaagaaagtattctgatataatagatgattaccttgaaatatatgttgaatatgaaatggcagaaagtaaacaagaagaaatatgggcggctagagaatggtatcggaatctttatgaaagtaatatcagttgcactaataaacttgaaagcgccaataatcagcgtatctggaaagttgtttttaaagaaaataaatttttgcgaaaaggctttgcacatatctggaattcattaacgaagaggtaagaagggtgaagaatgtaaagtatttatgcatctcaattttgattattattatttctatctgcacattcctaaagccagtttttatggttagccaaccagaggatatggagcttacatttatccagactggtcagaaaaatgaagagtcatttggtacagaacttcgtttattaaaagtaacagtaaatggacaagaaataccgtggaataagtttaaaaatgtagagggctggtcgttagatggtgatttacttgtttcatacgatcccgatgcacaggcattagcaaaaattacactatcagatgtagcaactattaaagttgactatatcaaacaacgtggttcaggctatttaataatccagtccaacggagagcagattgctgaattagacctatattcagattcggattgggaagaatgtacttggaattatcaaccaccaaaacaatttatccctcgttttgatatatttatggaacttgtattactggtttacatattaatcatattaatatgtaaatataagattataccatataaaagcgataatgttgatcatagtcatagattaccaaaagaaaaaaactcaaaaacactatggtatagttgcttcttaattacatttttgtctatattaggaagtattactatttatacaacccaggttaagacgatacggtttgatgatttttctgagggcataatgatttcggatatgttatatggtgatcattataactataatagtaattttttaatggctattaatggagaattaactttttctgacgattctaaaggaactttggaggagattgaacaacactacaaaggaggtactacatataatcaagatgattattccatatataactctaatttaacatttcatcgatatttttatcgccttattaataaaataataagtaataaatcactggttttatatttgttaaagggtattaatgcattcttaatggctataatgctcaccgtaattgtctattggatatataaaaataacggaaaagcatctgcaataatactctatactattttagtgtttttttcgccttcattgtgtatgtatggaacgaatttatattgggttggttggagtctttttttgcctatggtcagttcaatctgcacagtcgaatttataaaactaaaaaaaactgtaaattatcctaatatgtactttattgctttttctgcaacattattaaaacagctattctattttgaatttatatcaacaattatggtaagtttaatgattccatatatatattatgtattaacagagaaagttgatattaaaaaatctattaagatatttttagttccagctttaggggccataagttcttttattgctgcaagttttataaaattgttattacttacaaaagaatataatagtttttctagagcactaaatgcttattgggaaccaataataaagcggttaataggggatactaattcctccaatatgttagtacgtagctctacagaaattggacagttggatgttttaagaataatggggcagtatcctgcaatatctataaataaattaggtacaatttctgaagtctgtgtatgtcttatttttatttttacgattttattactatttatttttcggcgagataaacgatatttaaaagaaatgatacctcttggtatttgcactgttatttcattagcaggaccattttcatggtttattctcgcaaagcctcacacgatggtccatagctacatctgcacaattttatggttcattccatttaatattttagcgtttacatttattggtaagatagtagtttatatgtggaatagacgaaaatattttaaatttaaacaatgtctacgcctagactttagtctcatagctttgtttttaattctgctttatataggaaatatgggactcaaatattatgatgttacacaaaaacttagtgtaatagataaaaacggtattttatgtgcacagaatgatttctttaaaatgtatttgtatgaagattccttttactactatattgataataaaaagatacctgataatggctttatttatatgcatatatatccagataatacacaaaacaaagactttttaaacagagatattaatttagaagatatacaagaaaaaacagtgttgccttttaaaaagaaagcgcttatacaacgtcctattcctgattacaaatttgagtatattatgacaggaatttcttctaaagtggcagataatcaatacaaagaatattctcaaaatactatatattctaatgatatttatactaataacatttattcaattaccgcatttaatttaactgatgagaactgggtaaatggtatatctcaaaatggtaattgtattttgttaaacggtaatctgtcagattatataaacttgacggggaaaacaatccaattactatctggagaaaaagttcaaattattgatgtaaaaaaagtggatgacaattggttatatatctttttggataagaaaatcagtaaccaaaatggttatccagtccaactgattatctctccctaattattaggttactggaggttttaaatgatttacgaaaagattatcctcggcgcaggtttatacggcctatacgctgcaaatttcttagcacatcaatcaaatagtagtaaaatcttagtcctggaacatgattcaacgcccttccgtcgtgcgacgtatattaaccaggcacgtgtccatatggggtatcactatccacgttcctattcaacggctataaaatcagctcattattttaaccgttttatggaagactattctttctgcgtattgacaaaatttgatcagatttatgcaacctctgcggatttttcatggacaaatgcgttgcaattcaaaaaattttgcaacaacgctgatattcggtgtgatgacataaatccaaacaaatactttaatcctggtatgtgcgatggtgcttttctgactgaggaatatacgtacgatgctgatattttaaaaaagtacctattaaatcaattgtctcaatatccaaacgtagaaatttgttataatgcaagaatcaataaaataactaaaaaatcaacatactttgagttaacaatgaacgatggtactacatatgaaacagattttttgttgaatgctacctatgcttccactaaccaaatcagcagtatgcttggatatgagccatttaaaatcaaatatgaattgtgtgaaatcattttatgtaatgtaacagaaaaattaaaaaatgtaggtattaccgtgatggatggtccattcttctccattatgccgtttggaaaaacagggtatcattcgctgacttctgtaacatttactcctcacataaccagttatgacgctgtacctacttttgactgtcagaagaagagtaatggagggtgttcaccaaagcagttgggaaattgcaatgattgccctgctaaaccagaaacggcttggccttatatgtctaatttggcaacaaaatatttaaaggaagagtatggttttgagtactcccattcccttttttccatgaaaccaattttaaaggcttccgaaattgatgattcaagacctactgtaataaaacagtattctacagatcctactttcatcagtgtattatcaggaaaaattaatacggtctacgatttagatgaggtgcttaacaatgctactaaataaagaaaaaaattttatatcggctgttgtatatgtctataatcaagaaacacagatatatcgttttcttgaattagttaatgagactcttcgtaatagttttgagaagtatgaaattatatgtgtaaatgatgcttctacagacggaagtataaaagaaataaaaagatatgcttctacggtcaaagggaatgtaatcagcatattaaatatgagtttttatcagggacttgaactatccatgaatgctggcgttgatctggctattggggattttgtctttgaatttgatttaccacatgcatcatattcttctaacctgattatagatgtttaccagcgttctctacaaggctatgatatcgtcgcagccgcaccacttcatgggaaacgcacatcttcaaaaatattttatgctgtatttaatcgtttgtctcacactcagtatcttctgcgtacagaatctttcagaattttgtcacgacgcggaattaaccgggttcattctatgagcaggacaattccataccggaaggctgtttatgcaaattgtggtttaaagacagatgtaattacatatgataatgagagctattcgtcgtttcaagataaagatacccttcataagcaaaaggatactgctttagatgctatgatactttatacagatattgcataccgtttttctatggtctttgcttatattatgatgtttattactacccttacaggaatttatacagtttgcatttatattggcggacgtcctgtagttggttggacaactactatgcttttcctgtcttttgcctttttgggtctctttgtaatattaacaatcatcataaaatatatgtccttaatactaaaaataaattttaataaacaaaagtatattatagaatccatagaaaaaatcactaattaaagaggatctgctatatgaaaacgatgttagttggttatacaggctttgttggttccaatttatcctgccaatatgattttacagaaaggtataattctaaaaatattgaagatgcatatgggagtaaacctgatttattaatctatgctggaattcgtgctgaaaaatatcttgcaaatcaagatcccaataaagatttgagaaatattgaaaatgctttttataatattcagcaaattcagcctaaaaagctagtattgatttctactattgatgtttataaaagcccaataaacgttaatgaggatactcccataatttctgaagatttgcaaccttatggagccaatcgttattatctggaacagaaagttagagatgattttccagaaactttaattattagactgccaggcctctttggtaaaaagataaaaaagaattttatatatgatgatatacattatattccgtccatgatccaaaatgaaaagtttggaaaacttgcaactgtcagacacgaacttaataactattacaaattgcaggataatggattttataaatgcagtgacatatcttgtgaagaaaaagaagcacttaaaactatttttaaagaactgggattttctgcacttaattttacggacagccgtggtgtatttcagttctacaatttgaaacatctgtggaatcatattaagtatgcattaaaaaatgatctttatcttttaaatttagccactgaaccaatcggcattgcggagttatatcattatttggaaggcaaaaagtttcagaatataatatcaaataatccaccttattatgatttcaagactaagcatgatacacttatgggcggtaaaagaggttatatttttgataaggataatgttttagccgaaatcaaaacatttatacaggagcaatcatgttaaaattatcaatatcaaatattagttgggattcaaaatacgatcaggagatttacaaataccttcttgataataatattcagggacttgaaatagcacctaccagagtttttccaaataatccatacgaatgcgtaaaagaagcacatgatttcaaagagtatttatcaaaatcctatcatttgaagatttcctctatgcaatctatctggtacggaaagacagagaaaatgtttcaatctgtaaaagaaagaaagcagcttatggaatatacgaaaaaggccattgattttgcggcagcattagaatgccataatcttgtttttgggtgccctaaaaacagaagtataaattgttctggtgattataatatagcagtggattttttctcagcaataggagaatatgctcataatagaaatacggttattgcattggaggctaatccggttatatataacactaatttcataacttcgactgcagaagccttttcaatggtaaaggaagtacaatctgaaggatttcttgtcaatttagatattagtactataatttataatgaagagtctttagatataattgctgataatataggtttaattaatcatatccatattagcgaaccagggttagctggcatactaaaaagaaaactgcataggcaattggctggtattttagcgggccaatactctaactttatatctatagaaatgggaaaacaggaggatctgcaacgagtgtttgatgcattatcctatgtgaaagaggtattttatgatatataacagtataccgggtgtacccaattttgtttccgaggaatttgtgcaaaaaagatcaagctattgtatatgcatccctattattaatgaaggccgaagaatacatgatgagttgaaacgggccagaaaatataagattgatacgattgccgatattattatctgtgatggcggatcaattgatggatctacagacagtaccttactggaagcatttggtgtcaatactctgctcattaagaaagggccgggcaaacagggggcacaactgcgcatggggatctggtgggcactggaacgaggctataaaggcgttatcactatagacggaaataacaaagacagtattgaggatgtacctaaatttatagaaaaattagaagctggctatgattttattcagggatcacgttttatcaaagggggcaaggcaattaataccccttttcttcgatatttatcggtacgtttgcttcatgctccggttatttcactaacagcccaccatcactttaccgatactaccaatgcatttcgcggacattcaaggaattatttaaccaatcccaaggtacaaccactacgggatattttcaatacatatgagttacttgcatatttgtcgaccagagcatctcagataggattgcgtgtatgtgaagtgccagtgacacgagcttaccctataaaaggaaaagtccccactaaaattagttttttaaaaggaaattctgaactgctaaaaatactattttctaatatgcttggaaaatataatccacaaaagtgagagcctgctatgatagaatcaataaaaaaaaataaaactggaatactcctcatgtgttgttcatcagtctgcgtttgtctagggcaacttttatggaaactttctaccggagggcaaatctcgttcctttttgttggtttcctattgtatggagttggcgcacttgttatgatagtagcttatcgctttggcagcttatctgttttacagccaatattaagcctaaattatgtttttagtatcgttctttcagcctttgtcctgaaagaaactattactctgctcaaatgtattggagttttgattatcatctctggagttatattaattgcaggaggtgatgagtcatgaagtattatatcgttttaattatcatgactattttaggtgcctgtggaagcttctatttaaaaaaagcatcagacgcaaaaaaattaaaaatattagttataacgccagcattttatttaggtggttttttatatctgatatctgcaatattgaatatctacattttgaagttcttggattattctgtggtacttcctttaacttcgattacatatatttggacgttcggattgtcctattgctttttgaaagaaggtattacacacaaaaaaattatagggattgttttaatcgttttggggagtattattattgctgtatgatagaaataatagaacgtaaacgtctatgacgtatcattaaatagtgtcaagaatttttttaaatttaagttttaccgtctggcagccagcagtcattcggctatgtcatctgaacctgcataggtctccattccgcggatataatccttgttcatatagcgttttgttccccactaggttccggctacatgacggagtctggcgcatacaagtatcagggcgctctgtccatcagggaatgcaccaattgctttcgtattcaatgttatcttccagtttcttgacaacggaagagcgtttcatttcccggagcttttcatcaacaagcgggctttgtcatgggctacctccttactttcctgtgagtgagtggctttcaatatcatggctaccattttatcctgttccgtggtgtaacagagaagatgctgcggttaaagtggacgatacaccgctgatagagggcagccgggaatacctccggtatggtttccaacatgccgaagtttttattgcctatgatgagttgcacatcgttaagcccgccaggactctttgtcttcattcataccctcagctgcaccgatgatttcccagcatccatcctcactgccccagatgaccacaaaaatggaaacattctgcacctcgccgcgcccaagtgtaaatgcaccataatccgtgggatgacttgcaactgattttatacgataatgatctcatcaaatccacttagaaaactccagaaactttgattggagttttctgggtttcggaaggggatctcaagtatgaatgaagcaatgcaggttcgtgcggcaagctggcctgcaatggttaaacagcgtaacgatagtggcctgaccgtcaaagaatggtgtgctgccaacgcgatccaggagtccgtgtattattatcgattaaaccgactgagaaaaatagcacttgatgtttgagaaacaccgaattccatcaaaaacaattctcctgtttccggaacctttgctcagataccagttgcttctgctgttccggctccgaattagcgattcgcctccgacatggtgacacagttgtggaagtaagcagcgatgctccggatcacaccctttcctttctgaaagaggtgatgttccgtgctttctgagaccaccggctttcgggccatctatatctactgcggaaaatgtgatcttcgcaaaggaattgatggattggcgacgttattaaaggaacagttccatctggatccttttcaaaaggagatcctgtttcttttctgcggatgccacactgaacgattcaaaggcctggtctgggaaggcgatgggttctgcctgctttataaatggatcgaagctggacgcctccgatggccgagaagtcaggaagaagccgcaacaatctctcctgaagaacttcatcttatgttgaccagaatgacgatactgaaacgttcttcgtaagcgccaagtgttgggataccttaacacttggcgcttacaataagccaggggagacggttctgcggatttttctattttctgaaataggttttttccatttctgaagcaatggcaacctcggcaagttcggcttccctgcgacttgcagcactgacagatatgtaaaattttaatttaggttctgtaccggaaggccgtatcactacggaggtgtttccctccaacaagaatttcatgacatttgactgcgggagatttatgatagtcttacttccatcggtattcgatgtcacggaagttttgtagtcactaattgctgtaatagcctttcctgcgatggctgttggagctgcagtacggaaattttccatgatttttgtcatggtatcaaatccttcggcgccttcaaatgtatagcttctcaaggtattcaggcagtagccgtactttttgtataaggcatccagaacttccagcaaagtctgtccatgggatttgtaatatgcaaacatttcacagatcaggagcgaggcattgacgccatccttgtccctgacaaatcctccggaaagataaccatagctttcttcaaaaccgaagatgtatcgctccgcctcacccttttcctcaagaagaccgatctgttctccgataaatttaaaaccggtaagaacgtcaatgacttccaccccatagtcagcagcaatgagttttgccaaatccgtagtaacaatcgtcttaaccaggattggattatggggcattttccccagtgcaattctgcgcctgcatatatagtcaaacagaagcaggcccatttcattgccgcttaacaattcatatccatctgctgacttgactgcggtgcctacacgatcacagtcgggatcggtagccagcaataattcgctgccgagctgtgaggcgtattgaattcctaatgccagagcttccttcatttcaggattggggtagggacaggtggggaaattgccatctggctgttcctgttcctttacaacagcgatattggtaaatccattctcctttaatgttctcatgacacaatgaagcccagaaccgttaagcggagtgtagataacagatatatttttattaatctcatcaccgcacagcgcctgtgtggaaacggcttcgatatatgcggttacggtcttttcttcaatgtaaacaataagcttctgagataatgccgcatcaaaatccatgtatttaacatcactaaatggatcgatattattgatttcatttaaaatactgttggcggtttctgtagtaatctggccgccgtcactgccgtataccttatatccattgtatttcgcgggattatggctggcagttatcacgattccgcctgaacattctaaataccgtacagcaaaagaaagggagggagtgggcatcaattcctgatataaatgaaccttaatgccattagcagccagtatgcacgctgcgcgccgggcaaatacgtctgatttaatccggctgtcataggctatggcaacagagggacatgaacatttttgattgaggtaattggcatagccctgagttgccttcccgacagtatagatattcatgcggttggtaccgacgccaatgatacctcgcagacctccggtaccgaattccagatcacggtaaaaatgatcttccagttctctgtcattctgttgaatactcttaagctcatctattaaatccgggtcctccaggacctcctggttccatttattccatcgtgaaagtacttctgattccattttttgattctccattttcatgtttattttattgtcactgggatttgaagtgggattaatcccaagtctttgaaccaggcggttccttctctgagcagatctatttcaatcatataatcccccggggtgctgagaagctccgcctggggagtaaatgttaattcaccggtttgaccggaagccagattctcagggagttttactcgttccccttccgccaggacggttcctttcttgtcttttataagataagacagctgtgtggcctcgtaaccgctgctgcataaagcaattccggagttgttccggatggtgactgtgattggtgaatgtatatctgcagaaacggcatcggtagctgaattagcatcagccgaattggcaacagttgaatccattgtcaatatgatgccggagtaatccggaattacagtattctgcacggttaaaggaatttttagagtttccatcccctgagctgaaaaccaggttacaccttcctctaccagatctgcttctacgatgtaatcgccctcttccaatggaaccagtacttcccagatttcatttttaattccgcgggctttgacagggatgagagaagtacggattccatcctgtacaagtacctccccagctgtgtccagcagatgatatgccagaaatatattgttgtctgaggtcaggtcctgatatctccggctgtctatcgtgatttcaagcttcgccagatttccgccattctcgcaggataattcacttaccttagtttttaatttaaggtcgtattgggaaggtacggcacggtatccgcagccgcttaagagcagcagtgatatgaggacaaatatggaaagacttattgtttttaatcgattcattgtctcctccagtaatccagtgtttcagctaatgtgcgggaaagcggaatctcaggcttccagccagtgacagcctgaagcttgcttatgtcggcttctataatcgggacgtcgaccgggcggattttttccggatcgacggatacttcgatttcgcaatgtgccatatgcagaatggtatccagaatacttttaattgaaacggctgttccggaaccaacattgtaggtctcacccgcaagtccgttttccataagcatgacatacgcgcgaacaacatctcggacatcggtaaagtctcttctggccgtaagattaccgactcggattacaggttcatgaattcctttttcaatttccgatgcttgtttgcaaaaatctgagaccacaaagagcggtgcctgatttgggccaatatgattaaaggccctgacgctcataatatccatatgataagcatcacagtatatcttcccaatcatgttctggcatgccttagtggccgcgtaaatattacccgggcgggttaatgtctcttctgtgattggtatttcttcttcaagtacatggccgtattcttccccggagccaatcaggaggaggcgcggcctcttttgcagttctctgacggcatccaggagattgagtgtccctttgatgttgatatctaccgtcaatccgggcttcttccacgacagagccacggagctttgagctgccagatggaagatataatcaggctgaacccgatccaaaatggtgattatctcctccggtttcataagattcaaatccaggatttcgattcccttttttacaatattttcctgcggaagcttcgtgacggtaatagaccatatgcagtttttctgtatatggtctatcagatagtcgcctacgaagcctgccgcaccgataatcaatgctttcttcatagaggtttccttatttattttatatttgagattttgatttctttttcaacaatggcaaggtcattttcaaccatgcgcctgaccagttcctggaaagtgatttcgcgtttccagcctaatttctcctctgcttttgaaggatctccaagaagaacttcgacctcagcagggcggaaaaattcaggatttacagttacaatggtttttccggtggccttgtcgataccgttttctgttattccgcttccatgccattccacatcgattcctgcatagcggaaagccgtttctacaaattcgcggacggttctcgtctcattggttgctatcacatagtcatcaggcgtatcctgctgcagcatcagccacatggcttttacataatctttggaatgtccccagtctcgtttggcgtcaaggcttccaagctctacgtgatccaaaataccaagcttgatacgggctacggcgtctgtgatttttctggtaacaaattccaggccgcggcgctcgctttcatgattgaagagaatgccgctgcaggcaaacatatcatagctttctcgatagttctttgtaatccagtggccgtatacttttgccacgccgtaggggcttcgcggatagaatggcgtcttttctgtctgcggcatttcctgaaccttaccgaacatttcactggtagaagcctggtagaaatgggcttccggttttactgtgcggattgcctccagcatattggtgacaccgatcgcgtcgatgtcggccgtagcgataggctgctcccaactggtagccacgaatgactgggcagccagattatagacctcatctgcctgagaaattctcatagcgttggtcaaggaaacaacatccgtcatgtccgcatagatgaaatgaattctgtctttgatatgttctacattgccgtagtctacgacactctttcttctcatgaggccatagacattgtagcctttttctaataataattctgcgagataggagccgtcctgtcctgtgattcctgtgattaatacgtttttcatgattgctgtttctccttttggttggtttttgttggttgtagtttgttgtgattgactatagttagctgtaattagttataattagatatattcatttctgttgcatatttttaagttttccgtcacctttttaatgtctccggcgctgtctttcgcgcagattaaagtggcgtcttttgtatctacgacaatggtatcttccatcccgacgatggcgattagctttttgtcaccctggataatgcagttgtgcgtgtttaccgtaatgatattgccggcaaccgcattgccgaattcattcgttttcttaatgcgctccaccgccagccaggaacctacatcgtcccaaccgaatgttccgggaagtatatagatattatcagccttctccataattccgtaatcaatagactgtgactgcatgttgtgaaactctttttctaaaatgaaatcctgctgtggagtaccgattgcttctttgatttttatcagactctcatatgtatcaggcataagtttctgcatgttttttaatatagaagagaccttccagataaacatgccgctgttccagagatattcttctgtggataaatattctttggcaacttcgaggctcggcttttccacaaatctttctacagcataggcctgtccctctgttctgcgcgggtcgaactttatgtagccgtatcctgtctccggataatcgggagtgatgccgattgtgacaagattcgtattgttttctgctacatcagctccggtctcaagtgtttttaagaacatattcgtaaacttgatcaggtgatcagacggcagcacaaacataattgaatcatcgtatttctgagctatatggatagcacccagaccaatgcatggggccgtattgcggccaatcggttcgcagaggatgttttcttccggaagtccgggaatctgctccagaaccagctcccgatatgctttgttcgttgcaatgaagatatctttcagctttactaatggtaaaattcgttctacggttaactgaatcatggtttttccatcatcagttaaagataaaaattgttttggtaaattcttgcggcttttgggccagaagcgttcgcctcggccgccggccatgattagggctgttgttgtcatttgtttttcctcacagttttagtatttacctataggtaataaatttatttaaaataaattgcataatggagactatgatcatcaatcccaatttaagtaaatataaatttgcaaatggttttaataaatatatcatcaatgttgaaaatgctattccacagacgcaaacactgccataagacaataggcgcctaaaaagtttatcttttttcttaaagttaagaaaagtattcattgaaaaggtgaatataaaaccaactaatgctgcaataatattggctaattctactttttcaacaattttatattgagtcaataaataaaaaaatgagtattctattaaagcgccacaaacaccaaatattccatatactaatagattccataatgcaggaaatcgcataattgtaagcttgaatagcgattttatataatctattataaatggaagtaaatttcgttttgattctccataaactcttttattaaaaacaatgggaatttctcctatttttaaagaaggattatttagtttcatttttagtaaaacttcttgtaaaacatcataatttttattatctagtttcacattttttaattgttgtgtgtcatacattctaaaatcagtagaaatatcgtgagcttttatgcctagacatattctaaatgctaaatttaacattttagacataaccacagatgtcttcttatcattagtttctccaccttttatataacgggagcctataacaatatcgtaattaccctcgtcaaattttttgttgatttctggtatattatttggattatgagagccatcactgtctaaaatcataaacttttctttatttgcatatttgattccggttttaaaagcaccaccaaatcctggccattcttgattaatatagcgtgcattgaattctgtacatacttctctagtatggtctaatggttctgctgtatcaattacaagtatttcaaaatcttgaccaattttattcaaattatttataatttgaggaagtagaaatttcaaattatcttcttccatgtatgccaataaaacaacactgattcctttatctatgatttccattagtaattcaattcctcctaataaaacattttgttttaatcatgtcgttttaaagtatcattaaggtatgttacattatagtaggttaaatctgggtacgataatatatctttagtgtcaaatggctcccaggagttgtaccattcatcatgtatgataatacactttatattgtagactccattaaccatctgtgcatttacactttcaaacatcatagtccatggccagtaatatttctttatattgctgagatcgactttattagcaggaataattccttcattcattgaagtgatttcataagttttttgtaagtgctgattataatcataggctgatttaaagttaaaccacaaattggaaattaataatatacccaaaacacaagttaacctggataatgaaaagtctattttctttatatatataaagagtacaactaacgataaggcaagaggaaacgctaaattagttattcttgaattgtaactttcagtagcgatatagtcggtattaaaaaacatcagatacgcaaaccaacagccacaaacgagattaagaaaacataagcaattgttaaatgttttgcgtttttttgtatccttagcataattgatcaatatagaaaatataaatatgatgaataacaatacataagtagcgattaatctataatcaagagacagtattgattgcaaagccccctttgcatttactgggtcacgtggccatatgacatatctaaagccttgaaaactggcatatgctaaaagtacactgattccaaggataaatagtttttcttttcttttccaaagttttttattaaatattgtcagtagtaaaacaatgccaaaaaatgcaaaggattcatatactttaacagataaaattacagtaaaacatacaaaccatttaggtactctattatataattgagaatagtgaataaaaaaaagtaataaaaaccaaaatatccctacagcagccaatgactccaacatgataaaaaaaccagtaaatatatgggtaagtgtaaatattacaattgtatacaccataaatttgtattcctttaatttataagaataataaatagttagcataaagtaaaatatttcccaaaagacatagcctaggctgaaaagcatagctaacactcgtacattcttgatgccgatatcaattccaaatactaatggccattgactaagcaacaaaataaaatttctggaattgtcatgtaggtaaaacttttgacgacttagtatcaattgaaaataattactcccatccgcatataagcaagttgtataaagaactttaaatatagcaaaactcaataaggtgattattgaacctatatacaaacaatgatagattgtttctttgccctttgatttttttaaatagtttatcatttccaataccatcttcctttattaaccgttggtttatctcttaggacaaacaggaattttttgtacattttctatatcatgaatttagcataatgatactgtggattctatttttttctgaaatgtaaatcagtctaatagctcataggttattcttctcgttacagtatccaaaatataattctcatcataaaaagaattacatgctataaaggtagcaatttttttcaacattgtataattcaaatttttcccccccgcaataatttcgactataaaatttcgatacatttctgcgcttttttctatatttaaatacgtttttacatattcatgagcggcttttgctatgccatgccgtaacttttgattgcgaacaagttctaacattgcagtgtaaatattatttatttcgttttccggagcagtaggtatttttatacatacattatcaggaagttccgaaaaggaacctatatcactaacaatacaggcctttcctttacccataattctggacagtgcagcggatgtttccccaccatagggactccttagattaatacaaatatccgaaatatttatgtaattttccaattcatctaaagaaacataccccggcattacaacatcggaaaacaacttgtgcctagctactactaagtctatttcagacttgatttcgggctcaatctgacctacaattaagtatttcaattttatcaaagggagggcaagctttagtttattaaatgcctgtaatattggtacaatccgttttgaagctgtaacaaaaccaaaagaagccagaataatcgtatcttgagtataatgatacttttgtgtctttaaggtatcgtcatcaagtacatcgtcacattttgaataaagaggtatttttgtaattaatttcgaaaaatcttgttcccatatccctagtttactatactcactatgaacaatgattcctcgtgcattttggaaaatatatttattaaatggatttttgccgtcattatttccattataataaattgaattacagtttgtatcacaaaactgttttaactcttccgataaaaaagagcgtaagtagcttaatataaagtcatgcaaaacaatgattcctggaaattttaataaatatggaatcatataaacatggtcaggattattccctatttggtatatgaccgcatcatagttgcggtatgatttttcaaagctataatgactgtaaattttacacgaatctataattatatgattagttggttcataattagtatcgatataaacatcaatgtcaaaatattgaactaattgaaccaagatatcctccgtataatgcgctattccatttttaagaggagataatggtgcaaacatagcaattttatatttcttatcaaaaagttttgatgatatattgacattgttagcctgttgttcattcatgaatacatctaatgcatgattgatttttgtcttgtctgatatcgcctcggatgtattcaataaatacttgttaaacatcatttctaaatagtctattcttgctttttgatattttatggtctgcagtaaattatcctcaagaatacactgatgtgaactttgagaagagtttaacaaagtcaaactgtattgtgcatactctagtttttctacttcttttttcttgatttcatcaccatcaaactgttttaatagattgctgtaatcgataaatgaactgtctatcttgctaatttcatgcaacaaatgcctttggactaaagctttttttctttttatgtacttttccataaaatccccttacaacaattgatttaatttaggatataaggtttctttgacaattttatcccagttaaaatattctttgacatatgtataggcttctaaaactctgttagtttgatttgacaaatcaaattggttaatatatactggcatttctttaatatcacaaatgataaaactatccttattttcaattcctctagtagcaaacagcgtagagataatgggtatgccgcaagccatataatcaaacatttttacattcgtaccagaaccactacatatgggattaacagaaaaatctgcgatacctaagatactatttttcacagattcgtttaccattcctaaaagtcctacattatttggtaatgatatacgctcatacttcgtgcattggctgcctatcaagaaaaaatatgtttctggacatctataagcaaaattaataatactgtcacaggcgtcaaaattggggggatgtgcactacccaaaaaaatacctatttttttgtcacgtatacctagcttttctttatttaaaattctttgaggcactccagtaaaaaacgtgttcatcatgtctacgccatttgggacaacaagaatcttatctgggataatattaaatatttctgcaatttcatttttatcattttcagaacatgtcaaaattaaagtcgcacggtcacaacatgctttttcaacttcaaattgatccttcaagaatttttttttataatgaccaacgtttgataaaagcgatgtcttaacgctatacgcaacgtcatgagcatcataaataaataacttatcttttaaatagggttccaaacatggatataaataaggattacatgttaaaattaccagatcggaccaagttataagttcctttgcctttgcctcgtaaatgggactatagttaatgttataaattaaagaagcgtcataaacgttaatacctttacatttaatgtcaatccgatcatcttctttttgatgctttggcgtcttaggtactgtagtttgtttgaaagtctctgtaataaattcagtagagatgtcacttataacttctttttgttgcaatgaaagcattgatatatcaaaataagatgacaaatatttatataaattgaatatcctggcctttcctccgcctgtcggtggtaaaatacaatagggtgtgaataatgcaatttttttcttcatgctaatcctctgagcgcttatgatctgttagttgttctttatcaagaatttcttgcattaacattttactggtatctaaagtaataagcacactttcattaaattgattttgttggtatactatttcgcggaaataccaccccagcatttttctgataagttttttatatgaaatagcaagaaaacctattattctgcctctactgcttcctatataa
